United States Patent Application Publication US 2026/0258424 A1 - sequence listing, part 3

SEQ ID NO: 2048 - protein, 2096 aa, synthetic construct
MPAAKRVKLDGGDKKYSIGLDIGTNSVGWAVITDEYKVPSKKFKVLGNTDRHSIKKNLIGALLFDSGETAEATRLKRTARRRYTRRKNRICYLQEIFSNEMAKVDDSFFHRLEESFLVEEDKKHERHPIFGNIVDEVAYHEKYPTIYHLRKKLVDSTDKADLRLIYLALAHMIKFRGHFLIEGDLNPDNSDVDKLFIQLVQTYNQLFEENPINASGVDAKAILSARLSKSRRLENLIAQLPGEKKNGLFGNLIALSLGLTPNFKSNFDLAEDAKLQLSKDTYDDDLDNLLAQIGDQYADLFLAAKNLSDAILLSDILRVNTEITKAPLSASMIKRYDEHHQDLTLLKALVRQQLPEKYKEIFFDQSKNGYAGYIDGGASQEEFYKFIKPILEKMDGTEELLVKLNREDLLRKQRTFDNGSIPHQIHLGELHAILRRQEDFYPFLKDNREKIEKILTFRIPYYVGPLARGNSRFAWMTRKSEETITPWNFEEVVDKGASAQSFIERMTNFDKNLPNEKVLPKHSLLYEYFTVYNELTKVKYVTEGMRKPAFLSGEQKKAIVDLLFKTNRKVTVKQLKEDYFKKIECFDSVEISGVEDRFNASLGTYHDLLKIIKDKDFLDNEENEDILEDIVLTLTLFEDREMIEERLKTYAHLFDDKVMKQLKRRRYTGWGRLSRKLINGIRDKQSGKTILDFLKSDGFANRNFMQLIHDDSLTFKEDIQKAQVSGQGDSLHEHIANLAGSPAIKKGILQTVKVVDELVKVMGRHKPENIVIEMARENQTTQKGQKNSRERMKRIEEGIKELGSQILKEHPVENTQLQNEKLYLYYLQNGRDMYVDQELDINRLSDYDVDHIVPQSFLKDDSIDNKVLTRSDKARGKSDNVPSEEVVKKMKNYWRQLLNAKLITQRKFDNLTKAERGGLSELDKAGFIKRQLVETRQITKHVAQILDSRMNTKYDENDKLIREVKVITLKSKLVSDFRKDFQFYKVREINNYHHAHDAYLNAVVGTALIKKYPKLESEFVYGDYKVYDVRKMIAKSEQEIGKATAKYFFYSNIMNFFKTEITLANGEIRKRPLIETNGETGEIVWDKGRDFATVRKVLSMPQVNIVKKTEVQTGGFSKESILPKRNSDKLIARKKDWDPKKYGGFDSPTVAYSVLVVAKVEKGKSKKLKSVKELLGITIMERSSFEKNPIDFLEAKGYKEVKKDLIIKLPKYSLFELENGRKRMLASAGELQKGNELALPSKYVNFLYLASHYEKLKGSPEDNEQKQLFVEQHKHYLDEIIEQISEFSKRVILADANLDKVLSAYNKHRDKPIREQAENIIHLFTLTNLGAPAAFKYFDTTIDRKRYTSTKEVLDATLIHQSITGLYETRIDLSQLGGDGGPAPGGSEAAAKGGLGIEDEYRLHETSTEPDVSLGSTWLSDFPQAWAETGGMGLAVRQAPLIIPLKATSTPVSIQQYPMSHEARLGIKPHIQRLLDQGILVPCQSPWNTPLLPVKKPGTNDYRPVQDLREVNKRVEDIHPTVPNPYNLLSGLPPSHQWYTVLDLKDAFFCLRLHPTSQPLFAFEWRDPGMGISGQLTWTRLPQGFKNSPTLFNEALHRDLADFRIQHPDLILLQYVDDILLAATSELDCQQGTRALLQTLGDLGYRASAKKAQICQKQVKYLGYLLREGQRWLTEARKETVMGQPVPKTPRQLREFLGKAGFCRLFIPGFAEMAAPLYPLTKPGTLFSWGPDQQKAYQEIKQALLTAPALGLPDLTKPFELFVDEKQGYAKGVLTQKLGPWRRPVAYLSKKLDPVAAGWPPCLRMVAAIAVLTKDAGKLTMGQPLVILAPHAVEALVKQPPDRWLSNARMTHYQAMLLDTDRVQFGPVVALNPATLLPLPEEGAPHDCLEILAETHGTRPDLTDQPIPDADHTWYTDGSSFLQEGQRKAGAAVTTETEVIWAGALPAGTSAQRAELIALTQALKMAEGKRLNVYTDSRYAFATAHIHGEIYRRRGWLTSEGREIKNKSEILALLKALFLPKRLSIIHCLGHQKGDSAEARGNRLADQAAREAAIKTPPDTSTLLIAGKRTADGSEFEKRTADGSEFESPKKKAKVE

SEQ ID NO: 2049 - protein, 2100 aa, synthetic construct
MPAAKRVKLDGGDKKYSIGLDIGTNSVGWAVITDEYKVPSKKFKVLGNTDRHSIKKNLIGALLFDSGETAEATRLKRTARRRYTRRKNRICYLQEIFSNEMAKVDDSFFHRLEESFLVEEDKKHERHPIFGNIVDEVAYHEKYPTIYHLRKKLVDSTDKADLRLIYLALAHMIKFRGHFLIEGDLNPDNSDVDKLFIQLVQTYNQLFEENPINASGVDAKAILSARLSKSRRLENLIAQLPGEKKNGLFGNLIALSLGLTPNFKSNFDLAEDAKLQLSKDTYDDDLDNLLAQIGDQYADLFLAAKNLSDAILLSDILRVNTEITKAPLSASMIKRYDEHHQDLTLLKALVRQQLPEKYKEIFFDQSKNGYAGYIDGGASQEEFYKFIKPILEKMDGTEELLVKLNREDLLRKQRTFDNGSIPHQIHLGELHAILRRQEDFYPFLKDNREKIEKILTFRIPYYVGPLARGNSRFAWMTRKSEETITPWNFEEVVDKGASAQSFIERMTNFDKNLPNEKVLPKHSLLYEYFTVYNELTKVKYVTEGMRKPAFLSGEQKKAIVDLLFKTNRKVTVKQLKEDYFKKIECFDSVEISGVEDRFNASLGTYHDLLKIIKDKDFLDNEENEDILEDIVLTLTLFEDREMIEERLKTYAHLFDDKVMKQLKRRRYTGWGRLSRKLINGIRDKQSGKTILDFLKSDGFANRNFMQLIHDDSLTFKEDIQKAQVSGQGDSLHEHIANLAGSPAIKKGILQTVKVVDELVKVMGRHKPENIVIEMARENQTTQKGQKNSRERMKRIEEGIKELGSQILKEHPVENTQLQNEKLYLYYLQNGRDMYVDQELDINRLSDYDVDHIVPQSFLKDDSIDNKVLTRSDKARGKSDNVPSEEVVKKMKNYWRQLLNAKLITQRKFDNLTKAERGGLSELDKAGFIKRQLVETRQITKHVAQILDSRMNTKYDENDKLIREVKVITLKSKLVSDFRKDFQFYKVREINNYHHAHDAYLNAVVGTALIKKYPKLESEFVYGDYKVYDVRKMIAKSEQEIGKATAKYFFYSNIMNFFKTEITLANGEIRKRPLIETNGETGEIVWDKGRDFATVRKVLSMPQVNIVKKTEVQTGGFSKESILPKRNSDKLIARKKDWDPKKYGGFDSPTVAYSVLVVAKVEKGKSKKLKSVKELLGITIMERSSFEKNPIDFLEAKGYKEVKKDLIIKLPKYSLFELENGRKRMLASAGELQKGNELALPSKYVNFLYLASHYEKLKGSPEDNEQKQLFVEQHKHYLDEIIEQISEFSKRVILADANLDKVLSAYNKHRDKPIREQAENIIHLFTLTNLGAPAAFKYFDTTIDRKRYTSTKEVLDATLIHQSITGLYETRIDLSQLGGDGGEAAAKGGGGSEAAAKGGLGIEDEYRLHETSTEPDVSLGSTWLSDFPQAWAETGGMGLAVRQAPLIIPLKATSTPVSIQQYPMSHEARLGIKPHIQRLLDQGILVPCQSPWNTPLLPVKKPGTNDYRPVQDLREVNKRVEDIHPTVPNPYNLLSGLPPSHQWYTVLDLKDAFFCLRLHPTSQPLFAFEWRDPGMGISGQLTWTRLPQGFKNSPTLFNEALHRDLADFRIQHPDLILLQYVDDILLAATSELDCQQGTRALLQTLGDLGYRASAKKAQICQKQVKYLGYLLREGQRWLTEARKETVMGQPVPKTPRQLREFLGKAGFCRLFIPGFAEMAAPLYPLTKPGTLFSWGPDQQKAYQEIKQALLTAPALGLPDLTKPFELFVDEKQGYAKGVLTQKLGPWRRPVAYLSKKLDPVAAGWPPCLRMVAAIAVLTKDAGKLTMGQPLVILAPHAVEALVKQPPDRWLSNARMTHYQAMLLDTDRVQFGPVVALNPATLLPLPEEGAPHDCLEILAETHGTRPDLTDQPIPDADHTWYTDGSSFLQEGQRKAGAAVTTETEVIWAGALPAGTSAQRAELIALTQALKMAEGKRLNVYTDSRYAFATAHIHGEIYRRRGWLTSEGREIKNKSEILALLKALFLPKRLSIIHCLGHQKGDSAEARGNRLADQAAREAAIKTPPDTSTLLIAGKRTADGSEFEKRTADGSEFESPKKKAKVE

SEQ ID NO: 2050 - protein, 2096 aa, synthetic construct
MPAAKRVKLDGGDKKYSIGLDIGTNSVGWAVITDEYKVPSKKFKVLGNTDRHSIKKNLIGALLFDSGETAEATRLKRTARRRYTRRKNRICYLQEIFSNEMAKVDDSFFHRLEESFLVEEDKKHERHPIFGNIVDEVAYHEKYPTIYHLRKKLVDSTDKADLRLIYLALAHMIKFRGHFLIEGDLNPDNSDVDKLFIQLVQTYNQLFEENPINASGVDAKAILSARLSKSRRLENLIAQLPGEKKNGLFGNLIALSLGLTPNFKSNFDLAEDAKLQLSKDTYDDDLDNLLAQIGDQYADLFLAAKNLSDAILLSDILRVNTEITKAPLSASMIKRYDEHHQDLTLLKALVRQQLPEKYKEIFFDQSKNGYAGYIDGGASQEEFYKFIKPILEKMDGTEELLVKLNREDLLRKQRTFDNGSIPHQIHLGELHAILRRQEDFYPFLKDNREKIEKILTFRIPYYVGPLARGNSRFAWMTRKSEETITPWNFEEVVDKGASAQSFIERMTNFDKNLPNEKVLPKHSLLYEYFTVYNELTKVKYVTEGMRKPAFLSGEQKKAIVDLLFKTNRKVTVKQLKEDYFKKIECFDSVEISGVEDRFNASLGTYHDLLKIIKDKDFLDNEENEDILEDIVLTLTLFEDREMIEERLKTYAHLFDDKVMKQLKRRRYTGWGRLSRKLINGIRDKQSGKTILDFLKSDGFANRNFMQLIHDDSLTFKEDIQKAQVSGQGDSLHEHIANLAGSPAIKKGILQTVKVVDELVKVMGRHKPENIVIEMARENQTTQKGQKNSRERMKRIEEGIKELGSQILKEHPVENTQLQNEKLYLYYLQNGRDMYVDQELDINRLSDYDVDHIVPQSFLKDDSIDNKVLTRSDKARGKSDNVPSEEVVKKMKNYWRQLLNAKLITQRKFDNLTKAERGGLSELDKAGFIKRQLVETRQITKHVAQILDSRMNTKYDENDKLIREVKVITLKSKLVSDFRKDFQFYKVREINNYHHAHDAYLNAVVGTALIKKYPKLESEFVYGDYKVYDVRKMIAKSEQEIGKATAKYFFYSNIMNFFKTEITLANGEIRKRPLIETNGETGEIVWDKGRDFATVRKVLSMPQVNIVKKTEVQTGGFSKESILPKRNSDKLIARKKDWDPKKYGGFDSPTVAYSVLVVAKVEKGKSKKLKSVKELLGITIMERSSFEKNPIDFLEAKGYKEVKKDLIIKLPKYSLFELENGRKRMLASAGELQKGNELALPSKYVNFLYLASHYEKLKGSPEDNEQKQLFVEQHKHYLDEIIEQISEFSKRVILADANLDKVLSAYNKHRDKPIREQAENIIHLFTLTNLGAPAAFKYFDTTIDRKRYTSTKEVLDATLIHQSITGLYETRIDLSQLGGDGGPAPGSSEAAAKGGLGIEDEYRLHETSTEPDVSLGSTWLSDFPQAWAETGGMGLAVRQAPLIIPLKATSTPVSIQQYPMSHEARLGIKPHIQRLLDQGILVPCQSPWNTPLLPVKKPGTNDYRPVQDLREVNKRVEDIHPTVPNPYNLLSGLPPSHQWYTVLDLKDAFFCLRLHPTSQPLFAFEWRDPGMGISGQLTWTRLPQGFKNSPTLFNEALHRDLADFRIQHPDLILLQYVDDILLAATSELDCQQGTRALLQTLGDLGYRASAKKAQICQKQVKYLGYLLREGQRWLTEARKETVMGQPVPKTPRQLREFLGKAGFCRLFIPGFAEMAAPLYPLTKPGTLFSWGPDQQKAYQEIKQALLTAPALGLPDLTKPFELFVDEKQGYAKGVLTQKLGPWRRPVAYLSKKLDPVAAGWPPCLRMVAAIAVLTKDAGKLTMGQPLVILAPHAVEALVKQPPDRWLSNARMTHYQAMLLDTDRVQFGPVVALNPATLLPLPEEGAPHDCLEILAETHGTRPDLTDQPIPDADHTWYTDGSSFLQEGQRKAGAAVTTETEVIWAGALPAGTSAQRAELIALTQALKMAEGKRLNVYTDSRYAFATAHIHGEIYRRRGWLTSEGREIKNKSEILALLKALFLPKRLSIIHCLGHQKGDSAEARGNRLADQAAREAAIKTPPDTSTLLIAGKRTADGSEFEKRTADGSEFESPKKKAKVE

SEQ ID NO: 2051 - protein, 2094 aa, synthetic construct
MPAAKRVKLDGGDKKYSIGLDIGTNSVGWAVITDEYKVPSKKFKVLGNTDRHSIKKNLIGALLFDSGETAEATRLKRTARRRYTRRKNRICYLQEIFSNEMAKVDDSFFHRLEESFLVEEDKKHERHPIFGNIVDEVAYHEKYPTIYHLRKKLVDSTDKADLRLIYLALAHMIKFRGHFLIEGDLNPDNSDVDKLFIQLVQTYNQLFEENPINASGVDAKAILSARLSKSRRLENLIAQLPGEKKNGLFGNLIALSLGLTPNFKSNFDLAEDAKLQLSKDTYDDDLDNLLAQIGDQYADLFLAAKNLSDAILLSDILRVNTEITKAPLSASMIKRYDEHHQDLTLLKALVRQQLPEKYKEIFFDQSKNGYAGYIDGGASQEEFYKFIKPILEKMDGTEELLVKLNREDLLRKQRTFDNGSIPHQIHLGELHAILRRQEDFYPFLKDNREKIEKILTFRIPYYVGPLARGNSRFAWMTRKSEETITPWNFEEVVDKGASAQSFIERMTNFDKNLPNEKVLPKHSLLYEYFTVYNELTKVKYVTEGMRKPAFLSGEQKKAIVDLLFKTNRKVTVKQLKEDYFKKIECFDSVEISGVEDRFNASLGTYHDLLKIIKDKDFLDNEENEDILEDIVLTLTLFEDREMIEERLKTYAHLFDDKVMKQLKRRRYTGWGRLSRKLINGIRDKQSGKTILDFLKSDGFANRNFMQLIHDDSLTFKEDIQKAQVSGQGDSLHEHIANLAGSPAIKKGILQTVKVVDELVKVMGRHKPENIVIEMARENQTTQKGQKNSRERMKRIEEGIKELGSQILKEHPVENTQLQNEKLYLYYLQNGRDMYVDQELDINRLSDYDVDHIVPQSFLKDDSIDNKVLTRSDKARGKSDNVPSEEVVKKMKNYWRQLLNAKLITQRKFDNLTKAERGGLSELDKAGFIKRQLVETRQITKHVAQILDSRMNTKYDENDKLIREVKVITLKSKLVSDFRKDFQFYKVREINNYHHAHDAYLNAVVGTALIKKYPKLESEFVYGDYKVYDVRKMIAKSEQEIGKATAKYFFYSNIMNFFKTEITLANGEIRKRPLIETNGETGEIVWDKGRDFATVRKVLSMPQVNIVKKTEVQTGGFSKESILPKRNSDKLIARKKDWDPKKYGGFDSPTVAYSVLVVAKVEKGKSKKLKSVKELLGITIMERSSFEKNPIDFLEAKGYKEVKKDLIIKLPKYSLFELENGRKRMLASAGELQKGNELALPSKYVNFLYLASHYEKLKGSPEDNEQKQLFVEQHKHYLDEIIEQISEFSKRVILADANLDKVLSAYNKHRDKPIREQAENIIHLFTLTNLGAPAAFKYFDTTIDRKRYTSTKEVLDATLIHQSITGLYETRIDLSQLGGDGGGGSPAPGSSGGLGIEDEYRLHETSTEPDVSLGSTWLSDFPQAWAETGGMGLAVRQAPLIIPLKATSTPVSIQQYPMSHEARLGIKPHIQRLLDQGILVPCQSPWNTPLLPVKKPGTNDYRPVQDLREVNKRVEDIHPTVPNPYNLLSGLPPSHQWYTVLDLKDAFFCLRLHPTSQPLFAFEWRDPGMGISGQLTWTRLPQGFKNSPTLFNEALHRDLADFRIQHPDLILLQYVDDILLAATSELDCQQGTRALLQTLGDLGYRASAKKAQICQKQVKYLGYLLREGQRWLTEARKETVMGQPVPKTPRQLREFLGKAGFCRLFIPGFAEMAAPLYPLTKPGTLFSWGPDQQKAYQEIKQALLTAPALGLPDLTKPFELFVDEKQGYAKGVLTQKLGPWRRPVAYLSKKLDPVAAGWPPCLRMVAAIAVLTKDAGKLTMGQPLVILAPHAVEALVKQPPDRWLSNARMTHYQAMLLDTDRVQFGPVVALNPATLLPLPEEGAPHDCLEILAETHGTRPDLTDQPIPDADHTWYTDGSSFLQEGQRKAGAAVTTETEVIWAGALPAGTSAQRAELIALTQALKMAEGKRLNVYTDSRYAFATAHIHGEIYRRRGWLTSEGREIKNKSEILALLKALFLPKRLSIIHCLGHQKGDSAEARGNRLADQAAREAAIKTPPDTSTLLIAGKRTADGSEFEKRTADGSEFESPKKKAKVE

SEQ ID NO: 2052 - protein, 2096 aa, synthetic construct
MPAAKRVKLDGGDKKYSIGLDIGTNSVGWAVITDEYKVPSKKFKVLGNTDRHSIKKNLIGALLFDSGETAEATRLKRTARRRYTRRKNRICYLQEIFSNEMAKVDDSFFHRLEESFLVEEDKKHERHPIFGNIVDEVAYHEKYPTIYHLRKKLVDSTDKADLRLIYLALAHMIKFRGHFLIEGDLNPDNSDVDKLFIQLVQTYNQLFEENPINASGVDAKAILSARLSKSRRLENLIAQLPGEKKNGLFGNLIALSLGLTPNFKSNFDLAEDAKLQLSKDTYDDDLDNLLAQIGDQYADLFLAAKNLSDAILLSDILRVNTEITKAPLSASMIKRYDEHHQDLTLLKALVRQQLPEKYKEIFFDQSKNGYAGYIDGGASQEEFYKFIKPILEKMDGTEELLVKLNREDLLRKQRTFDNGSIPHQIHLGELHAILRRQEDFYPFLKDNREKIEKILTFRIPYYVGPLARGNSRFAWMTRKSEETITPWNFEEVVDKGASAQSFIERMTNFDKNLPNEKVLPKHSLLYEYFTVYNELTKVKYVTEGMRKPAFLSGEQKKAIVDLLFKTNRKVTVKQLKEDYFKKIECFDSVEISGVEDRFNASLGTYHDLLKIIKDKDFLDNEENEDILEDIVLTLTLFEDREMIEERLKTYAHLFDDKVMKQLKRRRYTGWGRLSRKLINGIRDKQSGKTILDFLKSDGFANRNFMQLIHDDSLTFKEDIQKAQVSGQGDSLHEHIANLAGSPAIKKGILQTVKVVDELVKVMGRHKPENIVIEMARENQTTQKGQKNSRERMKRIEEGIKELGSQILKEHPVENTQLQNEKLYLYYLQNGRDMYVDQELDINRLSDYDVDHIVPQSFLKDDSIDNKVLTRSDKARGKSDNVPSEEVVKKMKNYWRQLLNAKLITQRKFDNLTKAERGGLSELDKAGFIKRQLVETRQITKHVAQILDSRMNTKYDENDKLIREVKVITLKSKLVSDFRKDFQFYKVREINNYHHAHDAYLNAVVGTALIKKYPKLESEFVYGDYKVYDVRKMIAKSEQEIGKATAKYFFYSNIMNFFKTEITLANGEIRKRPLIETNGETGEIVWDKGRDFATVRKVLSMPQVNIVKKTEVQTGGFSKESILPKRNSDKLIARKKDWDPKKYGGFDSPTVAYSVLVVAKVEKGKSKKLKSVKELLGITIMERSSFEKNPIDFLEAKGYKEVKKDLIIKLPKYSLFELENGRKRMLASAGELQKGNELALPSKYVNFLYLASHYEKLKGSPEDNEQKQLFVEQHKHYLDEIIEQISEFSKRVILADANLDKVLSAYNKHRDKPIREQAENIIHLFTLTNLGAPAAFKYFDTTIDRKRYTSTKEVLDATLIHQSITGLYETRIDLSQLGGDGGEAAAKGSSPAPGGLGIEDEYRLHETSTEPDVSLGSTWLSDFPQAWAETGGMGLAVRQAPLIIPLKATSTPVSIQQYPMSHEARLGIKPHIQRLLDQGILVPCQSPWNTPLLPVKKPGTNDYRPVQDLREVNKRVEDIHPTVPNPYNLLSGLPPSHQWYTVLDLKDAFFCLRLHPTSQPLFAFEWRDPGMGISGQLTWTRLPQGFKNSPTLFNEALHRDLADFRIQHPDLILLQYVDDILLAATSELDCQQGTRALLQTLGDLGYRASAKKAQICQKQVKYLGYLLREGQRWLTEARKETVMGQPVPKTPRQLREFLGKAGFCRLFIPGFAEMAAPLYPLTKPGTLFSWGPDQQKAYQEIKQALLTAPALGLPDLTKPFELFVDEKQGYAKGVLTQKLGPWRRPVAYLSKKLDPVAAGWPPCLRMVAAIAVLTKDAGKLTMGQPLVILAPHAVEALVKQPPDRWLSNARMTHYQAMLLDTDRVQFGPVVALNPATLLPLPEEGAPHDCLEILAETHGTRPDLTDQPIPDADHTWYTDGSSFLQEGQRKAGAAVTTETEVIWAGALPAGTSAQRAELIALTQALKMAEGKRLNVYTDSRYAFATAHIHGEIYRRRGWLTSEGREIKNKSEILALLKALFLPKRLSIIHCLGHQKGDSAEARGNRLADQAAREAAIKTPPDTSTLLIAGKRTADGSEFEKRTADGSEFESPKKKAKVE

SEQ ID NO: 2053 - protein, 2088 aa, synthetic construct
MPAAKRVKLDGGDKKYSIGLDIGTNSVGWAVITDEYKVPSKKFKVLGNTDRHSIKKNLIGALLFDSGETAEATRLKRTARRRYTRRKNRICYLQEIFSNEMAKVDDSFFHRLEESFLVEEDKKHERHPIFGNIVDEVAYHEKYPTIYHLRKKLVDSTDKADLRLIYLALAHMIKFRGHFLIEGDLNPDNSDVDKLFIQLVQTYNQLFEENPINASGVDAKAILSARLSKSRRLENLIAQLPGEKKNGLFGNLIALSLGLTPNFKSNFDLAEDAKLQLSKDTYDDDLDNLLAQIGDQYADLFLAAKNLSDAILLSDILRVNTEITKAPLSASMIKRYDEHHQDLTLLKALVRQQLPEKYKEIFFDQSKNGYAGYIDGGASQEEFYKFIKPILEKMDGTEELLVKLNREDLLRKQRTFDNGSIPHQIHLGELHAILRRQEDFYPFLKDNREKIEKILTFRIPYYVGPLARGNSRFAWMTRKSEETITPWNFEEVVDKGASAQSFIERMTNFDKNLPNEKVLPKHSLLYEYFTVYNELTKVKYVTEGMRKPAFLSGEQKKAIVDLLFKTNRKVTVKQLKEDYFKKIECFDSVEISGVEDRFNASLGTYHDLLKIIKDKDFLDNEENEDILEDIVLTLTLFEDREMIEERLKTYAHLFDDKVMKQLKRRRYTGWGRLSRKLINGIRDKQSGKTILDFLKSDGFANRNFMQLIHDDSLTFKEDIQKAQVSGQGDSLHEHIANLAGSPAIKKGILQTVKVVDELVKVMGRHKPENIVIEMARENQTTQKGQKNSRERMKRIEEGIKELGSQILKEHPVENTQLQNEKLYLYYLQNGRDMYVDQELDINRLSDYDVDHIVPQSFLKDDSIDNKVLTRSDKARGKSDNVPSEEVVKKMKNYWRQLLNAKLITQRKFDNLTKAERGGLSELDKAGFIKRQLVETRQITKHVAQILDSRMNTKYDENDKLIREVKVITLKSKLVSDFRKDFQFYKVREINNYHHAHDAYLNAVVGTALIKKYPKLESEFVYGDYKVYDVRKMIAKSEQEIGKATAKYFFYSNIMNFFKTEITLANGEIRKRPLIETNGETGEIVWDKGRDFATVRKVLSMPQVNIVKKTEVQTGGFSKESILPKRNSDKLIARKKDWDPKKYGGFDSPTVAYSVLVVAKVEKGKSKKLKSVKELLGITIMERSSFEKNPIDFLEAKGYKEVKKDLIIKLPKYSLFELENGRKRMLASAGELQKGNELALPSKYVNFLYLASHYEKLKGSPEDNEQKQLFVEQHKHYLDEIIEQISEFSKRVILADANLDKVLSAYNKHRDKPIREQAENIIHLFTLTNLGAPAAFKYFDTTIDRKRYTSTKEVLDATLIHQSITGLYETRIDLSQLGGDGGGSSGGLGIEDEYRLHETSTEPDVSLGSTWLSDFPQAWAETGGMGLAVRQAPLIIPLKATSTPVSIQQYPMSHEARLGIKPHIQRLLDQGILVPCQSPWNTPLLPVKKPGTNDYRPVQDLREVNKRVEDIHPTVPNPYNLLSGLPPSHQWYTVLDLKDAFFCLRLHPTSQPLFAFEWRDPGMGISGQLTWTRLPQGFKNSPTLFNEALHRDLADFRIQHPDLILLQYVDDILLAATSELDCQQGTRALLQTLGDLGYRASAKKAQICQKQVKYLGYLLREGQRWLTEARKETVMGQPVPKTPRQLREFLGKAGFCRLFIPGFAEMAAPLYPLTKPGTLFSWGPDQQKAYQEIKQALLTAPALGLPDLTKPFELFVDEKQGYAKGVLTQKLGPWRRPVAYLSKKLDPVAAGWPPCLRMVAAIAVLTKDAGKLTMGQPLVILAPHAVEALVKQPPDRWLSNARMTHYQAMLLDTDRVQFGPVVALNPATLLPLPEEGAPHDCLEILAETHGTRPDLTDQPIPDADHTWYTDGSSFLQEGQRKAGAAVTTETEVIWAGALPAGTSAQRAELIALTQALKMAEGKRLNVYTDSRYAFATAHIHGEIYRRRGWLTSEGREIKNKSEILALLKALFLPKRLSIIHCLGHQKGDSAEARGNRLADQAAREAAIKTPPDTSTLLIAGKRTADGSEFEKRTADGSEFESPKKKAKVE

SEQ ID NO: 2054 - protein, 2096 aa, synthetic construct
MPAAKRVKLDGGDKKYSIGLDIGTNSVGWAVITDEYKVPSKKFKVLGNTDRHSIKKNLIGALLFDSGETAEATRLKRTARRRYTRRKNRICYLQEIFSNEMAKVDDSFFHRLEESFLVEEDKKHERHPIFGNIVDEVAYHEKYPTIYHLRKKLVDSTDKADLRLIYLALAHMIKFRGHFLIEGDLNPDNSDVDKLFIQLVQTYNQLFEENPINASGVDAKAILSARLSKSRRLENLIAQLPGEKKNGLFGNLIALSLGLTPNFKSNFDLAEDAKLQLSKDTYDDDLDNLLAQIGDQYADLFLAAKNLSDAILLSDILRVNTEITKAPLSASMIKRYDEHHQDLTLLKALVRQQLPEKYKEIFFDQSKNGYAGYIDGGASQEEFYKFIKPILEKMDGTEELLVKLNREDLLRKQRTFDNGSIPHQIHLGELHAILRRQEDFYPFLKDNREKIEKILTFRIPYYVGPLARGNSRFAWMTRKSEETITPWNFEEVVDKGASAQSFIERMTNFDKNLPNEKVLPKHSLLYEYFTVYNELTKVKYVTEGMRKPAFLSGEQKKAIVDLLFKTNRKVTVKQLKEDYFKKIECFDSVEISGVEDRFNASLGTYHDLLKIIKDKDFLDNEENEDILEDIVLTLTLFEDREMIEERLKTYAHLFDDKVMKQLKRRRYTGWGRLSRKLINGIRDKQSGKTILDFLKSDGFANRNFMQLIHDDSLTFKEDIQKAQVSGQGDSLHEHIANLAGSPAIKKGILQTVKVVDELVKVMGRHKPENIVIEMARENQTTQKGQKNSRERMKRIEEGIKELGSQILKEHPVENTQLQNEKLYLYYLQNGRDMYVDQELDINRLSDYDVDHIVPQSFLKDDSIDNKVLTRSDKARGKSDNVPSEEVVKKMKNYWRQLLNAKLITQRKFDNLTKAERGGLSELDKAGFIKRQLVETRQITKHVAQILDSRMNTKYDENDKLIREVKVITLKSKLVSDFRKDFQFYKVREINNYHHAHDAYLNAVVGTALIKKYPKLESEFVYGDYKVYDVRKMIAKSEQEIGKATAKYFFYSNIMNFFKTEITLANGEIRKRPLIETNGETGEIVWDKGRDFATVRKVLSMPQVNIVKKTEVQTGGFSKESILPKRNSDKLIARKKDWDPKKYGGFDSPTVAYSVLVVAKVEKGKSKKLKSVKELLGITIMERSSFEKNPIDFLEAKGYKEVKKDLIIKLPKYSLFELENGRKRMLASAGELQKGNELALPSKYVNFLYLASHYEKLKGSPEDNEQKQLFVEQHKHYLDEIIEQISEFSKRVILADANLDKVLSAYNKHRDKPIREQAENIIHLFTLTNLGAPAAFKYFDTTIDRKRYTSTKEVLDATLIHQSITGLYETRIDLSQLGGDGGEAAAKGGGPAPGGLGIEDEYRLHETSTEPDVSLGSTWLSDFPQAWAETGGMGLAVRQAPLIIPLKATSTPVSIQQYPMSHEARLGIKPHIQRLLDQGILVPCQSPWNTPLLPVKKPGTNDYRPVQDLREVNKRVEDIHPTVPNPYNLLSGLPPSHQWYTVLDLKDAFFCLRLHPTSQPLFAFEWRDPGMGISGQLTWTRLPQGFKNSPTLFNEALHRDLADFRIQHPDLILLQYVDDILLAATSELDCQQGTRALLQTLGDLGYRASAKKAQICQKQVKYLGYLLREGQRWLTEARKETVMGQPVPKTPRQLREFLGKAGFCRLFIPGFAEMAAPLYPLTKPGTLFSWGPDQQKAYQEIKQALLTAPALGLPDLTKPFELFVDEKQGYAKGVLTQKLGPWRRPVAYLSKKLDPVAAGWPPCLRMVAAIAVLTKDAGKLTMGQPLVILAPHAVEALVKQPPDRWLSNARMTHYQAMLLDTDRVQFGPVVALNPATLLPLPEEGAPHDCLEILAETHGTRPDLTDQPIPDADHTWYTDGSSFLQEGQRKAGAAVTTETEVIWAGALPAGTSAQRAELIALTQALKMAEGKRLNVYTDSRYAFATAHIHGEIYRRRGWLTSEGREIKNKSEILALLKALFLPKRLSIIHCLGHQKGDSAEARGNRLADQAAREAAIKTPPDTSTLLIAGKRTADGSEFEKRTADGSEFESPKKKAKVE

SEQ ID NO: 2055 - protein, 2096 aa, synthetic construct
MPAAKRVKLDGGDKKYSIGLDIGTNSVGWAVITDEYKVPSKKFKVLGNTDRHSIKKNLIGALLFDSGETAEATRLKRTARRRYTRRKNRICYLQEIFSNEMAKVDDSFFHRLEESFLVEEDKKHERHPIFGNIVDEVAYHEKYPTIYHLRKKLVDSTDKADLRLIYLALAHMIKFRGHFLIEGDLNPDNSDVDKLFIQLVQTYNQLFEENPINASGVDAKAILSARLSKSRRLENLIAQLPGEKKNGLFGNLIALSLGLTPNFKSNFDLAEDAKLQLSKDTYDDDLDNLLAQIGDQYADLFLAAKNLSDAILLSDILRVNTEITKAPLSASMIKRYDEHHQDLTLLKALVRQQLPEKYKEIFFDQSKNGYAGYIDGGASQEEFYKFIKPILEKMDGTEELLVKLNREDLLRKQRTFDNGSIPHQIHLGELHAILRRQEDFYPFLKDNREKIEKILTFRIPYYVGPLARGNSRFAWMTRKSEETITPWNFEEVVDKGASAQSFIERMTNFDKNLPNEKVLPKHSLLYEYFTVYNELTKVKYVTEGMRKPAFLSGEQKKAIVDLLFKTNRKVTVKQLKEDYFKKIECFDSVEISGVEDRFNASLGTYHDLLKIIKDKDFLDNEENEDILEDIVLTLTLFEDREMIEERLKTYAHLFDDKVMKQLKRRRYTGWGRLSRKLINGIRDKQSGKTILDFLKSDGFANRNFMQLIHDDSLTFKEDIQKAQVSGQGDSLHEHIANLAGSPAIKKGILQTVKVVDELVKVMGRHKPENIVIEMARENQTTQKGQKNSRERMKRIEEGIKELGSQILKEHPVENTQLQNEKLYLYYLQNGRDMYVDQELDINRLSDYDVDHIVPQSFLKDDSIDNKVLTRSDKARGKSDNVPSEEVVKKMKNYWRQLLNAKLITQRKFDNLTKAERGGLSELDKAGFIKRQLVETRQITKHVAQILDSRMNTKYDENDKLIREVKVITLKSKLVSDFRKDFQFYKVREINNYHHAHDAYLNAVVGTALIKKYPKLESEFVYGDYKVYDVRKMIAKSEQEIGKATAKYFFYSNIMNFFKTEITLANGEIRKRPLIETNGETGEIVWDKGRDFATVRKVLSMPQVNIVKKTEVQTGGFSKESILPKRNSDKLIARKKDWDPKKYGGFDSPTVAYSVLVVAKVEKGKSKKLKSVKELLGITIMERSSFEKNPIDFLEAKGYKEVKKDLIIKLPKYSLFELENGRKRMLASAGELQKGNELALPSKYVNFLYLASHYEKLKGSPEDNEQKQLFVEQHKHYLDEIIEQISEFSKRVILADANLDKVLSAYNKHRDKPIREQAENIIHLFTLTNLGAPAAFKYFDTTIDRKRYTSTKEVLDATLIHQSITGLYETRIDLSQLGGDGGEAAAKGGSGSSGGLGIEDEYRLHETSTEPDVSLGSTWLSDFPQAWAETGGMGLAVRQAPLIIPLKATSTPVSIQQYPMSHEARLGIKPHIQRLLDQGILVPCQSPWNTPLLPVKKPGTNDYRPVQDLREVNKRVEDIHPTVPNPYNLLSGLPPSHQWYTVLDLKDAFFCLRLHPTSQPLFAFEWRDPGMGISGQLTWTRLPQGFKNSPTLFNEALHRDLADFRIQHPDLILLQYVDDILLAATSELDCQQGTRALLQTLGDLGYRASAKKAQICQKQVKYLGYLLREGQRWLTEARKETVMGQPVPKTPRQLREFLGKAGFCRLFIPGFAEMAAPLYPLTKPGTLFSWGPDQQKAYQEIKQALLTAPALGLPDLTKPFELFVDEKQGYAKGVLTQKLGPWRRPVAYLSKKLDPVAAGWPPCLRMVAAIAVLTKDAGKLTMGQPLVILAPHAVEALVKQPPDRWLSNARMTHYQAMLLDTDRVQFGPVVALNPATLLPLPEEGAPHDCLEILAETHGTRPDLTDQPIPDADHTWYTDGSSFLQEGQRKAGAAVTTETEVIWAGALPAGTSAQRAELIALTQALKMAEGKRLNVYTDSRYAFATAHIHGEIYRRRGWLTSEGREIKNKSEILALLKALFLPKRLSIIHCLGHQKGDSAEARGNRLADQAAREAAIKTPPDTSTLLIAGKRTADGSEFEKRTADGSEFESPKKKAKVE

SEQ ID NO: 2056 - protein, 2097 aa, synthetic construct
MPAAKRVKLDGGDKKYSIGLDIGTNSVGWAVITDEYKVPSKKFKVLGNTDRHSIKKNLIGALLFDSGETAEATRLKRTARRRYTRRKNRICYLQEIFSNEMAKVDDSFFHRLEESFLVEEDKKHERHPIFGNIVDEVAYHEKYPTIYHLRKKLVDSTDKADLRLIYLALAHMIKFRGHFLIEGDLNPDNSDVDKLFIQLVQTYNQLFEENPINASGVDAKAILSARLSKSRRLENLIAQLPGEKKNGLFGNLIALSLGLTPNFKSNFDLAEDAKLQLSKDTYDDDLDNLLAQIGDQYADLFLAAKNLSDAILLSDILRVNTEITKAPLSASMIKRYDEHHQDLTLLKALVRQQLPEKYKEIFFDQSKNGYAGYIDGGASQEEFYKFIKPILEKMDGTEELLVKLNREDLLRKQRTFDNGSIPHQIHLGELHAILRRQEDFYPFLKDNREKIEKILTFRIPYYVGPLARGNSRFAWMTRKSEETITPWNFEEVVDKGASAQSFIERMTNFDKNLPNEKVLPKHSLLYEYFTVYNELTKVKYVTEGMRKPAFLSGEQKKAIVDLLFKTNRKVTVKQLKEDYFKKIECFDSVEISGVEDRFNASLGTYHDLLKIIKDKDFLDNEENEDILEDIVLTLTLFEDREMIEERLKTYAHLFDDKVMKQLKRRRYTGWGRLSRKLINGIRDKQSGKTILDFLKSDGFANRNFMQLIHDDSLTFKEDIQKAQVSGQGDSLHEHIANLAGSPAIKKGILQTVKVVDELVKVMGRHKPENIVIEMARENQTTQKGQKNSRERMKRIEEGIKELGSQILKEHPVENTQLQNEKLYLYYLQNGRDMYVDQELDINRLSDYDVDHIVPQSFLKDDSIDNKVLTRSDKARGKSDNVPSEEVVKKMKNYWRQLLNAKLITQRKFDNLTKAERGGLSELDKAGFIKRQLVETRQITKHVAQILDSRMNTKYDENDKLIREVKVITLKSKLVSDFRKDFQFYKVREINNYHHAHDAYLNAVVGTALIKKYPKLESEFVYGDYKVYDVRKMIAKSEQEIGKATAKYFFYSNIMNFFKTEITLANGEIRKRPLIETNGETGEIVWDKGRDFATVRKVLSMPQVNIVKKTEVQTGGFSKESILPKRNSDKLIARKKDWDPKKYGGFDSPTVAYSVLVVAKVEKGKSKKLKSVKELLGITIMERSSFEKNPIDFLEAKGYKEVKKDLIIKLPKYSLFELENGRKRMLASAGELQKGNELALPSKYVNFLYLASHYEKLKGSPEDNEQKQLFVEQHKHYLDEIIEQISEFSKRVILADANLDKVLSAYNKHRDKPIREQAENIIHLFTLTNLGAPAAFKYFDTTIDRKRYTSTKEVLDATLIHQSITGLYETRIDLSQLGGDGGGSAGSAAGSGEFGGLGIEDEYRLHETSTEPDVSLGSTWLSDFPQAWAETGGMGLAVRQAPLIIPLKATSTPVSIQQYPMSHEARLGIKPHIQRLLDQGILVPCQSPWNTPLLPVKKPGTNDYRPVQDLREVNKRVEDIHPTVPNPYNLLSGLPPSHQWYTVLDLKDAFFCLRLHPTSQPLFAFEWRDPGMGISGQLTWTRLPQGFKNSPTLFNEALHRDLADFRIQHPDLILLQYVDDILLAATSELDCQQGTRALLQTLGDLGYRASAKKAQICQKQVKYLGYLLREGQRWLTEARKETVMGQPVPKTPRQLREFLGKAGFCRLFIPGFAEMAAPLYPLTKPGTLFSWGPDQQKAYQEIKQALLTAPALGLPDLTKPFELFVDEKQGYAKGVLTQKLGPWRRPVAYLSKKLDPVAAGWPPCLRMVAAIAVLTKDAGKLTMGQPLVILAPHAVEALVKQPPDRWLSNARMTHYQAMLLDTDRVQFGPVVALNPATLLPLPEEGAPHDCLEILAETHGTRPDLTDQPIPDADHTWYTDGSSFLQEGQRKAGAAVTTETEVIWAGALPAGTSAQRAELIALTQALKMAEGKRLNVYTDSRYAFATAHIHGEIYRRRGWLTSEGREIKNKSEILALLKALFLPKRLSIIHCLGHQKGDSAEARGNRLADQAAREAAIKTPPDTSTLLIAGKRTADGSEFEKRTADGSEFESPKKKAKVE

SEQ ID NO: 2057 - protein, 2091 aa, synthetic construct
MPAAKRVKLDGGDKKYSIGLDIGTNSVGWAVITDEYKVPSKKFKVLGNTDRHSIKKNLIGALLFDSGETAEATRLKRTARRRYTRRKNRICYLQEIFSNEMAKVDDSFFHRLEESFLVEEDKKHERHPIFGNIVDEVAYHEKYPTIYHLRKKLVDSTDKADLRLIYLALAHMIKFRGHFLIEGDLNPDNSDVDKLFIQLVQTYNQLFEENPINASGVDAKAILSARLSKSRRLENLIAQLPGEKKNGLFGNLIALSLGLTPNFKSNFDLAEDAKLQLSKDTYDDDLDNLLAQIGDQYADLFLAAKNLSDAILLSDILRVNTEITKAPLSASMIKRYDEHHQDLTLLKALVRQQLPEKYKEIFFDQSKNGYAGYIDGGASQEEFYKFIKPILEKMDGTEELLVKLNREDLLRKQRTFDNGSIPHQIHLGELHAILRRQEDFYPFLKDNREKIEKILTFRIPYYVGPLARGNSRFAWMTRKSEETITPWNFEEVVDKGASAQSFIERMTNFDKNLPNEKVLPKHSLLYEYFTVYNELTKVKYVTEGMRKPAFLSGEQKKAIVDLLFKTNRKVTVKQLKEDYFKKIECFDSVEISGVEDRFNASLGTYHDLLKIIKDKDFLDNEENEDILEDIVLTLTLFEDREMIEERLKTYAHLFDDKVMKQLKRRRYTGWGRLSRKLINGIRDKQSGKTILDFLKSDGFANRNFMQLIHDDSLTFKEDIQKAQVSGQGDSLHEHIANLAGSPAIKKGILQTVKVVDELVKVMGRHKPENIVIEMARENQTTQKGQKNSRERMKRIEEGIKELGSQILKEHPVENTQLQNEKLYLYYLQNGRDMYVDQELDINRLSDYDVDHIVPQSFLKDDSIDNKVLTRSDKARGKSDNVPSEEVVKKMKNYWRQLLNAKLITQRKFDNLTKAERGGLSELDKAGFIKRQLVETRQITKHVAQILDSRMNTKYDENDKLIREVKVITLKSKLVSDFRKDFQFYKVREINNYHHAHDAYLNAVVGTALIKKYPKLESEFVYGDYKVYDVRKMIAKSEQEIGKATAKYFFYSNIMNFFKTEITLANGEIRKRPLIETNGETGEIVWDKGRDFATVRKVLSMPQVNIVKKTEVQTGGFSKESILPKRNSDKLIARKKDWDPKKYGGFDSPTVAYSVLVVAKVEKGKSKKLKSVKELLGITIMERSSFEKNPIDFLEAKGYKEVKKDLIIKLPKYSLFELENGRKRMLASAGELQKGNELALPSKYVNFLYLASHYEKLKGSPEDNEQKQLFVEQHKHYLDEIIEQISEFSKRVILADANLDKVLSAYNKHRDKPIREQAENIIHLFTLTNLGAPAAFKYFDTTIDRKRYTSTKEVLDATLIHQSITGLYETRIDLSQLGGDGGPAPGSSGGLGIEDEYRLHETSTEPDVSLGSTWLSDFPQAWAETGGMGLAVRQAPLIIPLKATSTPVSIQQYPMSHEARLGIKPHIQRLLDQGILVPCQSPWNTPLLPVKKPGTNDYRPVQDLREVNKRVEDIHPTVPNPYNLLSGLPPSHQWYTVLDLKDAFFCLRLHPTSQPLFAFEWRDPGMGISGQLTWTRLPQGFKNSPTLFNEALHRDLADFRIQHPDLILLQYVDDILLAATSELDCQQGTRALLQTLGDLGYRASAKKAQICQKQVKYLGYLLREGQRWLTEARKETVMGQPVPKTPRQLREFLGKAGFCRLFIPGFAEMAAPLYPLTKPGTLFSWGPDQQKAYQEIKQALLTAPALGLPDLTKPFELFVDEKQGYAKGVLTQKLGPWRRPVAYLSKKLDPVAAGWPPCLRMVAAIAVLTKDAGKLTMGQPLVILAPHAVEALVKQPPDRWLSNARMTHYQAMLLDTDRVQFGPVVALNPATLLPLPEEGAPHDCLEILAETHGTRPDLTDQPIPDADHTWYTDGSSFLQEGQRKAGAAVTTETEVIWAGALPAGTSAQRAELIALTQALKMAEGKRLNVYTDSRYAFATAHIHGEIYRRRGWLTSEGREIKNKSEILALLKALFLPKRLSIIHCLGHQKGDSAEARGNRLADQAAREAAIKTPPDTSTLLIAGKRTADGSEFEKRTADGSEFESPKKKAKVE

SEQ ID NO: 2058 - protein, 2094 aa, synthetic construct
MPAAKRVKLDGGDKKYSIGLDIGTNSVGWAVITDEYKVPSKKFKVLGNTDRHSIKKNLIGALLFDSGETAEATRLKRTARRRYTRRKNRICYLQEIFSNEMAKVDDSFFHRLEESFLVEEDKKHERHPIFGNIVDEVAYHEKYPTIYHLRKKLVDSTDKADLRLIYLALAHMIKFRGHFLIEGDLNPDNSDVDKLFIQLVQTYNQLFEENPINASGVDAKAILSARLSKSRRLENLIAQLPGEKKNGLFGNLIALSLGLTPNFKSNFDLAEDAKLQLSKDTYDDDLDNLLAQIGDQYADLFLAAKNLSDAILLSDILRVNTEITKAPLSASMIKRYDEHHQDLTLLKALVRQQLPEKYKEIFFDQSKNGYAGYIDGGASQEEFYKFIKPILEKMDGTEELLVKLNREDLLRKQRTFDNGSIPHQIHLGELHAILRRQEDFYPFLKDNREKIEKILTFRIPYYVGPLARGNSRFAWMTRKSEETITPWNFEEVVDKGASAQSFIERMTNFDKNLPNEKVLPKHSLLYEYFTVYNELTKVKYVTEGMRKPAFLSGEQKKAIVDLLFKTNRKVTVKQLKEDYFKKIECFDSVEISGVEDRFNASLGTYHDLLKIIKDKDFLDNEENEDILEDIVLTLTLFEDREMIEERLKTYAHLFDDKVMKQLKRRRYTGWGRLSRKLINGIRDKQSGKTILDFLKSDGFANRNFMQLIHDDSLTFKEDIQKAQVSGQGDSLHEHIANLAGSPAIKKGILQTVKVVDELVKVMGRHKPENIVIEMARENQTTQKGQKNSRERMKRIEEGIKELGSQILKEHPVENTQLQNEKLYLYYLQNGRDMYVDQELDINRLSDYDVDHIVPQSFLKDDSIDNKVLTRSDKARGKSDNVPSEEVVKKMKNYWRQLLNAKLITQRKFDNLTKAERGGLSELDKAGFIKRQLVETRQITKHVAQILDSRMNTKYDENDKLIREVKVITLKSKLVSDFRKDFQFYKVREINNYHHAHDAYLNAVVGTALIKKYPKLESEFVYGDYKVYDVRKMIAKSEQEIGKATAKYFFYSNIMNFFKTEITLANGEIRKRPLIETNGETGEIVWDKGRDFATVRKVLSMPQVNIVKKTEVQTGGFSKESILPKRNSDKLIARKKDWDPKKYGGFDSPTVAYSVLVVAKVEKGKSKKLKSVKELLGITIMERSSFEKNPIDFLEAKGYKEVKKDLIIKLPKYSLFELENGRKRMLASAGELQKGNELALPSKYVNFLYLASHYEKLKGSPEDNEQKQLFVEQHKHYLDEIIEQISEFSKRVILADANLDKVLSAYNKHRDKPIREQAENIIHLFTLTNLGAPAAFKYFDTTIDRKRYTSTKEVLDATLIHQSITGLYETRIDLSQLGGDGGGGSPAPGGGGGLGIEDEYRLHETSTEPDVSLGSTWLSDFPQAWAETGGMGLAVRQAPLIIPLKATSTPVSIQQYPMSHEARLGIKPHIQRLLDQGILVPCQSPWNTPLLPVKKPGTNDYRPVQDLREVNKRVEDIHPTVPNPYNLLSGLPPSHQWYTVLDLKDAFFCLRLHPTSQPLFAFEWRDPGMGISGQLTWTRLPQGFKNSPTLFNEALHRDLADFRIQHPDLILLQYVDDILLAATSELDCQQGTRALLQTLGDLGYRASAKKAQICQKQVKYLGYLLREGQRWLTEARKETVMGQPVPKTPRQLREFLGKAGFCRLFIPGFAEMAAPLYPLTKPGTLFSWGPDQQKAYQEIKQALLTAPALGLPDLTKPFELFVDEKQGYAKGVLTQKLGPWRRPVAYLSKKLDPVAAGWPPCLRMVAAIAVLTKDAGKLTMGQPLVILAPHAVEALVKQPPDRWLSNARMTHYQAMLLDTDRVQFGPVVALNPATLLPLPEEGAPHDCLEILAETHGTRPDLTDQPIPDADHTWYTDGSSFLQEGQRKAGAAVTTETEVIWAGALPAGTSAQRAELIALTQALKMAEGKRLNVYTDSRYAFATAHIHGEIYRRRGWLTSEGREIKNKSEILALLKALFLPKRLSIIHCLGHQKGDSAEARGNRLADQAAREAAIKTPPDTSTLLIAGKRTADGSEFEKRTADGSEFESPKKKAKVE

SEQ ID NO: 2059 - protein, 2096 aa, synthetic construct
MPAAKRVKLDGGDKKYSIGLDIGTNSVGWAVITDEYKVPSKKFKVLGNTDRHSIKKNLIGALLFDSGETAEATRLKRTARRRYTRRKNRICYLQEIFSNEMAKVDDSFFHRLEESFLVEEDKKHERHPIFGNIVDEVAYHEKYPTIYHLRKKLVDSTDKADLRLIYLALAHMIKFRGHFLIEGDLNPDNSDVDKLFIQLVQTYNQLFEENPINASGVDAKAILSARLSKSRRLENLIAQLPGEKKNGLFGNLIALSLGLTPNFKSNFDLAEDAKLQLSKDTYDDDLDNLLAQIGDQYADLFLAAKNLSDAILLSDILRVNTEITKAPLSASMIKRYDEHHQDLTLLKALVRQQLPEKYKEIFFDQSKNGYAGYIDGGASQEEFYKFIKPILEKMDGTEELLVKLNREDLLRKQRTFDNGSIPHQIHLGELHAILRRQEDFYPFLKDNREKIEKILTFRIPYYVGPLARGNSRFAWMTRKSEETITPWNFEEVVDKGASAQSFIERMTNFDKNLPNEKVLPKHSLLYEYFTVYNELTKVKYVTEGMRKPAFLSGEQKKAIVDLLFKTNRKVTVKQLKEDYFKKIECFDSVEISGVEDRFNASLGTYHDLLKIIKDKDFLDNEENEDILEDIVLTLTLFEDREMIEERLKTYAHLFDDKVMKQLKRRRYTGWGRLSRKLINGIRDKQSGKTILDFLKSDGFANRNFMQLIHDDSLTFKEDIQKAQVSGQGDSLHEHIANLAGSPAIKKGILQTVKVVDELVKVMGRHKPENIVIEMARENQTTQKGQKNSRERMKRIEEGIKELGSQILKEHPVENTQLQNEKLYLYYLQNGRDMYVDQELDINRLSDYDVDHIVPQSFLKDDSIDNKVLTRSDKARGKSDNVPSEEVVKKMKNYWRQLLNAKLITQRKFDNLTKAERGGLSELDKAGFIKRQLVETRQITKHVAQILDSRMNTKYDENDKLIREVKVITLKSKLVSDFRKDFQFYKVREINNYHHAHDAYLNAVVGTALIKKYPKLESEFVYGDYKVYDVRKMIAKSEQEIGKATAKYFFYSNIMNFFKTEITLANGEIRKRPLIETNGETGEIVWDKGRDFATVRKVLSMPQVNIVKKTEVQTGGFSKESILPKRNSDKLIARKKDWDPKKYGGFDSPTVAYSVLVVAKVEKGKSKKLKSVKELLGITIMERSSFEKNPIDFLEAKGYKEVKKDLIIKLPKYSLFELENGRKRMLASAGELQKGNELALPSKYVNFLYLASHYEKLKGSPEDNEQKQLFVEQHKHYLDEIIEQISEFSKRVILADANLDKVLSAYNKHRDKPIREQAENIIHLFTLTNLGAPAAFKYFDTTIDRKRYTSTKEVLDATLIHQSITGLYETRIDLSQLGGDGGGGGGGSEAAAKGGLGIEDEYRLHETSTEPDVSLGSTWLSDFPQAWAETGGMGLAVRQAPLIIPLKATSTPVSIQQYPMSHEARLGIKPHIQRLLDQGILVPCQSPWNTPLLPVKKPGTNDYRPVQDLREVNKRVEDIHPTVPNPYNLLSGLPPSHQWYTVLDLKDAFFCLRLHPTSQPLFAFEWRDPGMGISGQLTWTRLPQGFKNSPTLFNEALHRDLADFRIQHPDLILLQYVDDILLAATSELDCQQGTRALLQTLGDLGYRASAKKAQICQKQVKYLGYLLREGQRWLTEARKETVMGQPVPKTPRQLREFLGKAGFCRLFIPGFAEMAAPLYPLTKPGTLFSWGPDQQKAYQEIKQALLTAPALGLPDLTKPFELFVDEKQGYAKGVLTQKLGPWRRPVAYLSKKLDPVAAGWPPCLRMVAAIAVLTKDAGKLTMGQPLVILAPHAVEALVKQPPDRWLSNARMTHYQAMLLDTDRVQFGPVVALNPATLLPLPEEGAPHDCLEILAETHGTRPDLTDQPIPDADHTWYTDGSSFLQEGQRKAGAAVTTETEVIWAGALPAGTSAQRAELIALTQALKMAEGKRLNVYTDSRYAFATAHIHGEIYRRRGWLTSEGREIKNKSEILALLKALFLPKRLSIIHCLGHQKGDSAEARGNRLADQAAREAAIKTPPDTSTLLIAGKRTADGSEFEKRTADGSEFESPKKKAKVE

SEQ ID NO: 2060 - protein, 2094 aa, synthetic construct
MPAAKRVKLDGGDKKYSIGLDIGTNSVGWAVITDEYKVPSKKFKVLGNTDRHSIKKNLIGALLFDSGETAEATRLKRTARRRYTRRKNRICYLQEIFSNEMAKVDDSFFHRLEESFLVEEDKKHERHPIFGNIVDEVAYHEKYPTIYHLRKKLVDSTDKADLRLIYLALAHMIKFRGHFLIEGDLNPDNSDVDKLFIQLVQTYNQLFEENPINASGVDAKAILSARLSKSRRLENLIAQLPGEKKNGLFGNLIALSLGLTPNFKSNFDLAEDAKLQLSKDTYDDDLDNLLAQIGDQYADLFLAAKNLSDAILLSDILRVNTEITKAPLSASMIKRYDEHHQDLTLLKALVRQQLPEKYKEIFFDQSKNGYAGYIDGGASQEEFYKFIKPILEKMDGTEELLVKLNREDLLRKQRTFDNGSIPHQIHLGELHAILRRQEDFYPFLKDNREKIEKILTFRIPYYVGPLARGNSRFAWMTRKSEETITPWNFEEVVDKGASAQSFIERMTNFDKNLPNEKVLPKHSLLYEYFTVYNELTKVKYVTEGMRKPAFLSGEQKKAIVDLLFKTNRKVTVKQLKEDYFKKIECFDSVEISGVEDRFNASLGTYHDLLKIIKDKDFLDNEENEDILEDIVLTLTLFEDREMIEERLKTYAHLFDDKVMKQLKRRRYTGWGRLSRKLINGIRDKQSGKTILDFLKSDGFANRNFMQLIHDDSLTFKEDIQKAQVSGQGDSLHEHIANLAGSPAIKKGILQTVKVVDELVKVMGRHKPENIVIEMARENQTTQKGQKNSRERMKRIEEGIKELGSQILKEHPVENTQLQNEKLYLYYLQNGRDMYVDQELDINRLSDYDVDHIVPQSFLKDDSIDNKVLTRSDKARGKSDNVPSEEVVKKMKNYWRQLLNAKLITQRKFDNLTKAERGGLSELDKAGFIKRQLVETRQITKHVAQILDSRMNTKYDENDKLIREVKVITLKSKLVSDFRKDFQFYKVREINNYHHAHDAYLNAVVGTALIKKYPKLESEFVYGDYKVYDVRKMIAKSEQEIGKATAKYFFYSNIMNFFKTEITLANGEIRKRPLIETNGETGEIVWDKGRDFATVRKVLSMPQVNIVKKTEVQTGGFSKESILPKRNSDKLIARKKDWDPKKYGGFDSPTVAYSVLVVAKVEKGKSKKLKSVKELLGITIMERSSFEKNPIDFLEAKGYKEVKKDLIIKLPKYSLFELENGRKRMLASAGELQKGNELALPSKYVNFLYLASHYEKLKGSPEDNEQKQLFVEQHKHYLDEIIEQISEFSKRVILADANLDKVLSAYNKHRDKPIREQAENIIHLFTLTNLGAPAAFKYFDTTIDRKRYTSTKEVLDATLIHQSITGLYETRIDLSQLGGDGGGSSPAPGGGGGLGIEDEYRLHETSTEPDVSLGSTWLSDFPQAWAETGGMGLAVRQAPLIIPLKATSTPVSIQQYPMSHEARLGIKPHIQRLLDQGILVPCQSPWNTPLLPVKKPGTNDYRPVQDLREVNKRVEDIHPTVPNPYNLLSGLPPSHQWYTVLDLKDAFFCLRLHPTSQPLFAFEWRDPGMGISGQLTWTRLPQGFKNSPTLFNEALHRDLADFRIQHPDLILLQYVDDILLAATSELDCQQGTRALLQTLGDLGYRASAKKAQICQKQVKYLGYLLREGQRWLTEARKETVMGQPVPKTPRQLREFLGKAGFCRLFIPGFAEMAAPLYPLTKPGTLFSWGPDQQKAYQEIKQALLTAPALGLPDLTKPFELFVDEKQGYAKGVLTQKLGPWRRPVAYLSKKLDPVAAGWPPCLRMVAAIAVLTKDAGKLTMGQPLVILAPHAVEALVKQPPDRWLSNARMTHYQAMLLDTDRVQFGPVVALNPATLLPLPEEGAPHDCLEILAETHGTRPDLTDQPIPDADHTWYTDGSSFLQEGQRKAGAAVTTETEVIWAGALPAGTSAQRAELIALTQALKMAEGKRLNVYTDSRYAFATAHIHGEIYRRRGWLTSEGREIKNKSEILALLKALFLPKRLSIIHCLGHQKGDSAEARGNRLADQAAREAAIKTPPDTSTLLIAGKRTADGSEFEKRTADGSEFESPKKKAKVE

SEQ ID NO: 2061 - protein, 2094 aa, synthetic construct
MPAAKRVKLDGGDKKYSIGLDIGTNSVGWAVITDEYKVPSKKFKVLGNTDRHSIKKNLIGALLFDSGETAEATRLKRTARRRYTRRKNRICYLQEIFSNEMAKVDDSFFHRLEESFLVEEDKKHERHPIFGNIVDEVAYHEKYPTIYHLRKKLVDSTDKADLRLIYLALAHMIKFRGHFLIEGDLNPDNSDVDKLFIQLVQTYNQLFEENPINASGVDAKAILSARLSKSRRLENLIAQLPGEKKNGLFGNLIALSLGLTPNFKSNFDLAEDAKLQLSKDTYDDDLDNLLAQIGDQYADLFLAAKNLSDAILLSDILRVNTEITKAPLSASMIKRYDEHHQDLTLLKALVRQQLPEKYKEIFFDQSKNGYAGYIDGGASQEEFYKFIKPILEKMDGTEELLVKLNREDLLRKQRTFDNGSIPHQIHLGELHAILRRQEDFYPFLKDNREKIEKILTFRIPYYVGPLARGNSRFAWMTRKSEETITPWNFEEVVDKGASAQSFIERMTNFDKNLPNEKVLPKHSLLYEYFTVYNELTKVKYVTEGMRKPAFLSGEQKKAIVDLLFKTNRKVTVKQLKEDYFKKIECFDSVEISGVEDRFNASLGTYHDLLKIIKDKDFLDNEENEDILEDIVLTLTLFEDREMIEERLKTYAHLFDDKVMKQLKRRRYTGWGRLSRKLINGIRDKQSGKTILDFLKSDGFANRNFMQLIHDDSLTFKEDIQKAQVSGQGDSLHEHIANLAGSPAIKKGILQTVKVVDELVKVMGRHKPENIVIEMARENQTTQKGQKNSRERMKRIEEGIKELGSQILKEHPVENTQLQNEKLYLYYLQNGRDMYVDQELDINRLSDYDVDHIVPQSFLKDDSIDNKVLTRSDKARGKSDNVPSEEVVKKMKNYWRQLLNAKLITQRKFDNLTKAERGGLSELDKAGFIKRQLVETRQITKHVAQILDSRMNTKYDENDKLIREVKVITLKSKLVSDFRKDFQFYKVREINNYHHAHDAYLNAVVGTALIKKYPKLESEFVYGDYKVYDVRKMIAKSEQEIGKATAKYFFYSNIMNFFKTEITLANGEIRKRPLIETNGETGEIVWDKGRDFATVRKVLSMPQVNIVKKTEVQTGGFSKESILPKRNSDKLIARKKDWDPKKYGGFDSPTVAYSVLVVAKVEKGKSKKLKSVKELLGITIMERSSFEKNPIDFLEAKGYKEVKKDLIIKLPKYSLFELENGRKRMLASAGELQKGNELALPSKYVNFLYLASHYEKLKGSPEDNEQKQLFVEQHKHYLDEIIEQISEFSKRVILADANLDKVLSAYNKHRDKPIREQAENIIHLFTLTNLGAPAAFKYFDTTIDRKRYTSTKEVLDATLIHQSITGLYETRIDLSQLGGDGGGGSGGGPAPGGLGIEDEYRLHETSTEPDVSLGSTWLSDFPQAWAETGGMGLAVRQAPLIIPLKATSTPVSIQQYPMSHEARLGIKPHIQRLLDQGILVPCQSPWNTPLLPVKKPGTNDYRPVQDLREVNKRVEDIHPTVPNPYNLLSGLPPSHQWYTVLDLKDAFFCLRLHPTSQPLFAFEWRDPGMGISGQLTWTRLPQGFKNSPTLFNEALHRDLADFRIQHPDLILLQYVDDILLAATSELDCQQGTRALLQTLGDLGYRASAKKAQICQKQVKYLGYLLREGQRWLTEARKETVMGQPVPKTPRQLREFLGKAGFCRLFIPGFAEMAAPLYPLTKPGTLFSWGPDQQKAYQEIKQALLTAPALGLPDLTKPFELFVDEKQGYAKGVLTQKLGPWRRPVAYLSKKLDPVAAGWPPCLRMVAAIAVLTKDAGKLTMGQPLVILAPHAVEALVKQPPDRWLSNARMTHYQAMLLDTDRVQFGPVVALNPATLLPLPEEGAPHDCLEILAETHGTRPDLTDQPIPDADHTWYTDGSSFLQEGQRKAGAAVTTETEVIWAGALPAGTSAQRAELIALTQALKMAEGKRLNVYTDSRYAFATAHIHGEIYRRRGWLTSEGREIKNKSEILALLKALFLPKRLSIIHCLGHQKGDSAEARGNRLADQAAREAAIKTPPDTSTLLIAGKRTADGSEFEKRTADGSEFESPKKKAKVE

SEQ ID NO: 2062 - protein, 2096 aa, synthetic construct
MPAAKRVKLDGGDKKYSIGLDIGTNSVGWAVITDEYKVPSKKFKVLGNTDRHSIKKNLIGALLFDSGETAEATRLKRTARRRYTRRKNRICYLQEIFSNEMAKVDDSFFHRLEESFLVEEDKKHERHPIFGNIVDEVAYHEKYPTIYHLRKKLVDSTDKADLRLIYLALAHMIKFRGHFLIEGDLNPDNSDVDKLFIQLVQTYNQLFEENPINASGVDAKAILSARLSKSRRLENLIAQLPGEKKNGLFGNLIALSLGLTPNFKSNFDLAEDAKLQLSKDTYDDDLDNLLAQIGDQYADLFLAAKNLSDAILLSDILRVNTEITKAPLSASMIKRYDEHHQDLTLLKALVRQQLPEKYKEIFFDQSKNGYAGYIDGGASQEEFYKFIKPILEKMDGTEELLVKLNREDLLRKQRTFDNGSIPHQIHLGELHAILRRQEDFYPFLKDNREKIEKILTFRIPYYVGPLARGNSRFAWMTRKSEETITPWNFEEVVDKGASAQSFIERMTNFDKNLPNEKVLPKHSLLYEYFTVYNELTKVKYVTEGMRKPAFLSGEQKKAIVDLLFKTNRKVTVKQLKEDYFKKIECFDSVEISGVEDRFNASLGTYHDLLKIIKDKDFLDNEENEDILEDIVLTLTLFEDREMIEERLKTYAHLFDDKVMKQLKRRRYTGWGRLSRKLINGIRDKQSGKTILDFLKSDGFANRNFMQLIHDDSLTFKEDIQKAQVSGQGDSLHEHIANLAGSPAIKKGILQTVKVVDELVKVMGRHKPENIVIEMARENQTTQKGQKNSRERMKRIEEGIKELGSQILKEHPVENTQLQNEKLYLYYLQNGRDMYVDQELDINRLSDYDVDHIVPQSFLKDDSIDNKVLTRSDKARGKSDNVPSEEVVKKMKNYWRQLLNAKLITQRKFDNLTKAERGGLSELDKAGFIKRQLVETRQITKHVAQILDSRMNTKYDENDKLIREVKVITLKSKLVSDFRKDFQFYKVREINNYHHAHDAYLNAVVGTALIKKYPKLESEFVYGDYKVYDVRKMIAKSEQEIGKATAKYFFYSNIMNFFKTEITLANGEIRKRPLIETNGETGEIVWDKGRDFATVRKVLSMPQVNIVKKTEVQTGGFSKESILPKRNSDKLIARKKDWDPKKYGGFDSPTVAYSVLVVAKVEKGKSKKLKSVKELLGITIMERSSFEKNPIDFLEAKGYKEVKKDLIIKLPKYSLFELENGRKRMLASAGELQKGNELALPSKYVNFLYLASHYEKLKGSPEDNEQKQLFVEQHKHYLDEIIEQISEFSKRVILADANLDKVLSAYNKHRDKPIREQAENIIHLFTLTNLGAPAAFKYFDTTIDRKRYTSTKEVLDATLIHQSITGLYETRIDLSQLGGDGGGSSPAPEAAAKGGTLGIEDEYRLHETSTEPDVSLGSTWLSDFPQAWAETGGMGLAVRQAPLIIPLKATSTPVSIQQYPMSHEARLGIKPHIQRLLDQGILVPCQSPWNTPLLPVKKPGTNDYRPVQDLREVNKRVEDIHPTVPNPYNLLSGLPPSHQWYTVLDLKDAFFCLRLHPTSQPLFAFEWRDPGMGISGQLTWTRLPQGFKNSPTLFDEALHRDLADFRIQHPDLILLQYVDDILLAATSELDCQQGTRALLQTLGDLGYRASAKKAQICQKQVKYLGYLLREGQRWLTEARKETVMGQPVPKTPRQLREFLGTAGFCRLWIPGFAEMAAPLYPLTKTGTLFSWGPDQQKAYQEIKQALLTAPALGLPDLTKPFELFVDEKQGYAKGVLTQKLGPWRRPVAYLSKKLDPVAAGWPPCLRMVAAIAVLTKDAGKLTMGQPLVILAPHAVEALVKQPPDRWLSNARMTHYQAMLLDTDRVQFGPVVALNPATLLPLPEEGAPHDCLEILAETHGTRPDLTDQPIPDADHTWYTDGSSFLQEGQRKAGAAVTTETEVIWAGALPAGTSAQRAELIALTQALKMAEGKRLNVYTDSRYAFATAHIHGEIYRRRGLLTSEGREIKNKSEILALLKALFLPKRLSIIHCLGHQKGDSAEARGNRLADQAAREAAIKTPPDTSTLLAGKRTADGSEFEKRTADGSEFESPKKKAKVE

SEQ ID NO: 2063 - protein, 2105 aa, synthetic construct
MPAAKRVKLDGGDKKYSIGLDIGTNSVGWAVITDEYKVPSKKFKVLGNTDRHSIKKNLIGALLFDSGETAEATRLKRTARRRYTRRKNRICYLQEIFSNEMAKVDDSFFHRLEESFLVEEDKKHERHPIFGNIVDEVAYHEKYPTIYHLRKKLVDSTDKADLRLIYLALAHMIKFRGHFLIEGDLNPDNSDVDKLFIQLVQTYNQLFEENPINASGVDAKAILSARLSKSRRLENLIAQLPGEKKNGLFGNLIALSLGLTPNFKSNFDLAEDAKLQLSKDTYDDDLDNLLAQIGDQYADLFLAAKNLSDAILLSDILRVNTEITKAPLSASMIKRYDEHHQDLTLLKALVRQQLPEKYKEIFFDQSKNGYAGYIDGGASQEEFYKFIKPILEKMDGTEELLVKLNREDLLRKQRTFDNGSIPHQIHLGELHAILRRQEDFYPFLKDNREKIEKILTFRIPYYVGPLARGNSRFAWMTRKSEETITPWNFEEVVDKGASAQSFIERMTNFDKNLPNEKVLPKHSLLYEYFTVYNELTKVKYVTEGMRKPAFLSGEQKKAIVDLLFKTNRKVTVKQLKEDYFKKIECFDSVEISGVEDRFNASLGTYHDLLKIIKDKDFLDNEENEDILEDIVLTLTLFEDREMIEERLKTYAHLFDDKVMKQLKRRRYTGWGRLSRKLINGIRDKQSGKTILDFLKSDGFANRNFMQLIHDDSLTFKEDIQKAQVSGQGDSLHEHIANLAGSPAIKKGILQTVKVVDELVKVMGRHKPENIVIEMARENQTTQKGQKNSRERMKRIEEGIKELGSQILKEHPVENTQLQNEKLYLYYLQNGRDMYVDQELDINRLSDYDVDHIVPQSFLKDDSIDNKVLTRSDKARGKSDNVPSEEVVKKMKNYWRQLLNAKLITQRKFDNLTKAERGGLSELDKAGFIKRQLVETRQITKHVAQILDSRMNTKYDENDKLIREVKVITLKSKLVSDFRKDFQFYKVREINNYHHAHDAYLNAVVGTALIKKYPKLESEFVYGDYKVYDVRKMIAKSEQEIGKATAKYFFYSNIMNFFKTEITLANGEIRKRPLIETNGETGEIVWDKGRDFATVRKVLSMPQVNIVKKTEVQTGGFSKESILPKRNSDKLIARKKDWDPKKYGGFDSPTVAYSVLVVAKVEKGKSKKLKSVKELLGITIMERSSFEKNPIDFLEAKGYKEVKKDLIIKLPKYSLFELENGRKRMLASAGELQKGNELALPSKYVNFLYLASHYEKLKGSPEDNEQKQLFVEQHKHYLDEIIEQISEFSKRVILADANLDKVLSAYNKHRDKPIREQAENIIHLFTLTNLGAPAAFKYFDTTIDRKRYTSTKEVLDATLIHQSITGLYETRIDLSQLGGDGGGGGGSGGGGSGGGGSGGGGSGGTLGIEDEYRLHETSTEPDVSLGSTWLSDFPQAWAETGGMGLAVRQAPLIIPLKATSTPVSIQQYPMSHEARLGIKPHIQRLLDQGILVPCQSPWNTPLLPVKKPGTNDYRPVQDLREVNKRVEDIHPTVPNPYNLLSGLPPSHQWYTVLDLKDAFFCLRLHPTSQPLFAFEWRDPGMGISGQLTWTRLPQGFKNSPTLFDEALHRDLADFRIQHPDLILLQYVDDILLAATSELDCQQGTRALLQTLGDLGYRASAKKAQICQKQVKYLGYLLREGQRWLTEARKETVMGQPVPKTPRQLREFLGTAGFCRLWIPGFAEMAAPLYPLTKTGTLFSWGPDQQKAYQEIKQALLTAPALGLPDLTKPFELFVDEKQGYAKGVLTQKLGPWRRPVAYLSKKLDPVAAGWPPCLRMVAAIAVLTKDAGKLTMGQPLVILAPHAVEALVKQPPDRWLSNARMTHYQAMLLDTDRVQFGPVVALNPATLLPLPEEGAPHDCLEILAETHGTRPDLTDQPIPDADHTWYTDGSSFLQEGQRKAGAAVTTETEVIWAGALPAGTSAQRAELIALTQALKMAEGKRLNVYTDSRYAFATAHIHGEIYRRRGLLTSEGREIKNKSEILALLKALFLPKRLSIIHCLGHQKGDSAEARGNRLADQAAREAAIKTPPDTSTLLAGKRTADGSEFEKRTADGSEFESPKKKAKVE

SEQ ID NO: 2064 - protein, 2095 aa, synthetic construct
MPAAKRVKLDGGDKKYSIGLDIGTNSVGWAVITDEYKVPSKKFKVLGNTDRHSIKKNLIGALLFDSGETAEATRLKRTARRRYTRRKNRICYLQEIFSNEMAKVDDSFFHRLEESFLVEEDKKHERHPIFGNIVDEVAYHEKYPTIYHLRKKLVDSTDKADLRLIYLALAHMIKFRGHFLIEGDLNPDNSDVDKLFIQLVQTYNQLFEENPINASGVDAKAILSARLSKSRRLENLIAQLPGEKKNGLFGNLIALSLGLTPNFKSNFDLAEDAKLQLSKDTYDDDLDNLLAQIGDQYADLFLAAKNLSDAILLSDILRVNTEITKAPLSASMIKRYDEHHQDLTLLKALVRQQLPEKYKEIFFDQSKNGYAGYIDGGASQEEFYKFIKPILEKMDGTEELLVKLNREDLLRKQRTFDNGSIPHQIHLGELHAILRRQEDFYPFLKDNREKIEKILTFRIPYYVGPLARGNSRFAWMTRKSEETITPWNFEEVVDKGASAQSFIERMTNFDKNLPNEKVLPKHSLLYEYFTVYNELTKVKYVTEGMRKPAFLSGEQKKAIVDLLFKTNRKVTVKQLKEDYFKKIECFDSVEISGVEDRFNASLGTYHDLLKIIKDKDFLDNEENEDILEDIVLTLTLFEDREMIEERLKTYAHLFDDKVMKQLKRRRYTGWGRLSRKLINGIRDKQSGKTILDFLKSDGFANRNFMQLIHDDSLTFKEDIQKAQVSGQGDSLHEHIANLAGSPAIKKGILQTVKVVDELVKVMGRHKPENIVIEMARENQTTQKGQKNSRERMKRIEEGIKELGSQILKEHPVENTQLQNEKLYLYYLQNGRDMYVDQELDINRLSDYDVDHIVPQSFLKDDSIDNKVLTRSDKARGKSDNVPSEEVVKKMKNYWRQLLNAKLITQRKFDNLTKAERGGLSELDKAGFIKRQLVETRQITKHVAQILDSRMNTKYDENDKLIREVKVITLKSKLVSDFRKDFQFYKVREINNYHHAHDAYLNAVVGTALIKKYPKLESEFVYGDYKVYDVRKMIAKSEQEIGKATAKYFFYSNIMNFFKTEITLANGEIRKRPLIETNGETGEIVWDKGRDFATVRKVLSMPQVNIVKKTEVQTGGFSKESILPKRNSDKLIARKKDWDPKKYGGFDSPTVAYSVLVVAKVEKGKSKKLKSVKELLGITIMERSSFEKNPIDFLEAKGYKEVKKDLIIKLPKYSLFELENGRKRMLASAGELQKGNELALPSKYVNFLYLASHYEKLKGSPEDNEQKQLFVEQHKHYLDEIIEQISEFSKRVILADANLDKVLSAYNKHRDKPIREQAENIIHLFTLTNLGAPAAFKYFDTTIDRKRYTSTKEVLDATLIHQSITGLYETRIDLSQLGGDGGEAAAKEAAAKGGTLGIEDEYRLHETSTEPDVSLGSTWLSDFPQAWAETGGMGLAVRQAPLIIPLKATSTPVSIQQYPMSHEARLGIKPHIQRLLDQGILVPCQSPWNTPLLPVKKPGTNDYRPVQDLREVNKRVEDIHPTVPNPYNLLSGLPPSHQWYTVLDLKDAFFCLRLHPTSQPLFAFEWRDPGMGISGQLTWTRLPQGFKNSPTLFDEALHRDLADFRIQHPDLILLQYVDDILLAATSELDCQQGTRALLQTLGDLGYRASAKKAQICQKQVKYLGYLLREGQRWLTEARKETVMGQPVPKTPRQLREFLGTAGFCRLWIPGFAEMAAPLYPLTKTGTLFSWGPDQQKAYQEIKQALLTAPALGLPDLTKPFELFVDEKQGYAKGVLTQKLGPWRRPVAYLSKKLDPVAAGWPPCLRMVAAIAVLTKDAGKLTMGQPLVILAPHAVEALVKQPPDRWLSNARMTHYQAMLLDTDRVQFGPVVALNPATLLPLPEEGAPHDCLEILAETHGTRPDLTDQPIPDADHTWYTDGSSFLQEGQRKAGAAVTTETEVIWAGALPAGTSAQRAELIALTQALKMAEGKRLNVYTDSRYAFATAHIHGEIYRRRGLLTSEGREIKNKSEILALLKALFLPKRLSIIHCLGHQKGDSAEARGNRLADQAAREAAIKTPPDTSTLLAGKRTADGSEFEKRTADGSEFESPKKKAKVE

SEQ ID NO: 2065 - protein, 2096 aa, synthetic construct
MPAAKRVKLDGGDKKYSIGLDIGTNSVGWAVITDEYKVPSKKFKVLGNTDRHSIKKNLIGALLFDSGETAEATRLKRTARRRYTRRKNRICYLQEIFSNEMAKVDDSFFHRLEESFLVEEDKKHERHPIFGNIVDEVAYHEKYPTIYHLRKKLVDSTDKADLRLIYLALAHMIKFRGHFLIEGDLNPDNSDVDKLFIQLVQTYNQLFEENPINASGVDAKAILSARLSKSRRLENLIAQLPGEKKNGLFGNLIALSLGLTPNFKSNFDLAEDAKLQLSKDTYDDDLDNLLAQIGDQYADLFLAAKNLSDAILLSDILRVNTEITKAPLSASMIKRYDEHHQDLTLLKALVRQQLPEKYKEIFFDQSKNGYAGYIDGGASQEEFYKFIKPILEKMDGTEELLVKLNREDLLRKQRTFDNGSIPHQIHLGELHAILRRQEDFYPFLKDNREKIEKILTFRIPYYVGPLARGNSRFAWMTRKSEETITPWNFEEVVDKGASAQSFIERMTNFDKNLPNEKVLPKHSLLYEYFTVYNELTKVKYVTEGMRKPAFLSGEQKKAIVDLLFKTNRKVTVKQLKEDYFKKIECFDSVEISGVEDRFNASLGTYHDLLKIIKDKDFLDNEENEDILEDIVLTLTLFEDREMIEERLKTYAHLFDDKVMKQLKRRRYTGWGRLSRKLINGIRDKQSGKTILDFLKSDGFANRNFMQLIHDDSLTFKEDIQKAQVSGQGDSLHEHIANLAGSPAIKKGILQTVKVVDELVKVMGRHKPENIVIEMARENQTTQKGQKNSRERMKRIEEGIKELGSQILKEHPVENTQLQNEKLYLYYLQNGRDMYVDQELDINRLSDYDVDHIVPQSFLKDDSIDNKVLTRSDKARGKSDNVPSEEVVKKMKNYWRQLLNAKLITQRKFDNLTKAERGGLSELDKAGFIKRQLVETRQITKHVAQILDSRMNTKYDENDKLIREVKVITLKSKLVSDFRKDFQFYKVREINNYHHAHDAYLNAVVGTALIKKYPKLESEFVYGDYKVYDVRKMIAKSEQEIGKATAKYFFYSNIMNFFKTEITLANGEIRKRPLIETNGETGEIVWDKGRDFATVRKVLSMPQVNIVKKTEVQTGGFSKESILPKRNSDKLIARKKDWDPKKYGGFDSPTVAYSVLVVAKVEKGKSKKLKSVKELLGITIMERSSFEKNPIDFLEAKGYKEVKKDLIIKLPKYSLFELENGRKRMLASAGELQKGNELALPSKYVNFLYLASHYEKLKGSPEDNEQKQLFVEQHKHYLDEIIEQISEFSKRVILADANLDKVLSAYNKHRDKPIREQAENIIHLFTLTNLGAPAAFKYFDTTIDRKRYTSTKEVLDATLIHQSITGLYETRIDLSQLGGDGGPAPGSSEAAAKGGTLGIEDEYRLHETSTEPDVSLGSTWLSDFPQAWAETGGMGLAVRQAPLIIPLKATSTPVSIQQYPMSHEARLGIKPHIQRLLDQGILVPCQSPWNTPLLPVKKPGTNDYRPVQDLREVNKRVEDIHPTVPNPYNLLSGLPPSHQWYTVLDLKDAFFCLRLHPTSQPLFAFEWRDPGMGISGQLTWTRLPQGFKNSPTLFDEALHRDLADFRIQHPDLILLQYVDDILLAATSELDCQQGTRALLQTLGDLGYRASAKKAQICQKQVKYLGYLLREGQRWLTEARKETVMGQPVPKTPRQLREFLGTAGFCRLWIPGFAEMAAPLYPLTKTGTLFSWGPDQQKAYQEIKQALLTAPALGLPDLTKPFELFVDEKQGYAKGVLTQKLGPWRRPVAYLSKKLDPVAAGWPPCLRMVAAIAVLTKDAGKLTMGQPLVILAPHAVEALVKQPPDRWLSNARMTHYQAMLLDTDRVQFGPVVALNPATLLPLPEEGAPHDCLEILAETHGTRPDLTDQPIPDADHTWYTDGSSFLQEGQRKAGAAVTTETEVIWAGALPAGTSAQRAELIALTQALKMAEGKRLNVYTDSRYAFATAHIHGEIYRRRGLLTSEGREIKNKSEILALLKALFLPKRLSIIHCLGHQKGDSAEARGNRLADQAAREAAIKTPPDTSTLLAGKRTADGSEFEKRTADGSEFESPKKKAKVE

SEQ ID NO: 2066 - protein, 2115 aa, synthetic construct
MPAAKRVKLDGGDKKYSIGLDIGTNSVGWAVITDEYKVPSKKFKVLGNTDRHSIKKNLIGALLFDSGETAEATRLKRTARRRYTRRKNRICYLQEIFSNEMAKVDDSFFHRLEESFLVEEDKKHERHPIFGNIVDEVAYHEKYPTIYHLRKKLVDSTDKADLRLIYLALAHMIKFRGHFLIEGDLNPDNSDVDKLFIQLVQTYNQLFEENPINASGVDAKAILSARLSKSRRLENLIAQLPGEKKNGLFGNLIALSLGLTPNFKSNFDLAEDAKLQLSKDTYDDDLDNLLAQIGDQYADLFLAAKNLSDAILLSDILRVNTEITKAPLSASMIKRYDEHHQDLTLLKALVRQQLPEKYKEIFFDQSKNGYAGYIDGGASQEEFYKFIKPILEKMDGTEELLVKLNREDLLRKQRTFDNGSIPHQIHLGELHAILRRQEDFYPFLKDNREKIEKILTFRIPYYVGPLARGNSRFAWMTRKSEETITPWNFEEVVDKGASAQSFIERMTNFDKNLPNEKVLPKHSLLYEYFTVYNELTKVKYVTEGMRKPAFLSGEQKKAIVDLLFKTNRKVTVKQLKEDYFKKIECFDSVEISGVEDRFNASLGTYHDLLKIIKDKDFLDNEENEDILEDIVLTLTLFEDREMIEERLKTYAHLFDDKVMKQLKRRRYTGWGRLSRKLINGIRDKQSGKTILDFLKSDGFANRNFMQLIHDDSLTFKEDIQKAQVSGQGDSLHEHIANLAGSPAIKKGILQTVKVVDELVKVMGRHKPENIVIEMARENQTTQKGQKNSRERMKRIEEGIKELGSQILKEHPVENTQLQNEKLYLYYLQNGRDMYVDQELDINRLSDYDVDHIVPQSFLKDDSIDNKVLTRSDKARGKSDNVPSEEVVKKMKNYWRQLLNAKLITQRKFDNLTKAERGGLSELDKAGFIKRQLVETRQITKHVAQILDSRMNTKYDENDKLIREVKVITLKSKLVSDFRKDFQFYKVREINNYHHAHDAYLNAVVGTALIKKYPKLESEFVYGDYKVYDVRKMIAKSEQEIGKATAKYFFYSNIMNFFKTEITLANGEIRKRPLIETNGETGEIVWDKGRDFATVRKVLSMPQVNIVKKTEVQTGGFSKESILPKRNSDKLIARKKDWDPKKYGGFDSPTVAYSVLVVAKVEKGKSKKLKSVKELLGITIMERSSFEKNPIDFLEAKGYKEVKKDLIIKLPKYSLFELENGRKRMLASAGELQKGNELALPSKYVNFLYLASHYEKLKGSPEDNEQKQLFVEQHKHYLDEIIEQISEFSKRVILADANLDKVLSAYNKHRDKPIREQAENIIHLFTLTNLGAPAAFKYFDTTIDRKRYTSTKEVLDATLIHQSITGLYETRIDLSQLGGDGGGGGGSGGGGSGGGGSGGGGSGGGGSGGGGSGGTLGIEDEYRLHETSTEPDVSLGSTWLSDFPQAWAETGGMGLAVRQAPLIIPLKATSTPVSIQQYPMSHEARLGIKPHIQRLLDQGILVPCQSPWNTPLLPVKKPGTNDYRPVQDLREVNKRVEDIHPTVPNPYNLLSGLPPSHQWYTVLDLKDAFFCLRLHPTSQPLFAFEWRDPGMGISGQLTWTRLPQGFKNSPTLFDEALHRDLADFRIQHPDLILLQYVDDILLAATSELDCQQGTRALLQTLGDLGYRASAKKAQICQKQVKYLGYLLREGQRWLTEARKETVMGQPVPKTPRQLREFLGTAGFCRLWIPGFAEMAAPLYPLTKTGTLFSWGPDQQKAYQEIKQALLTAPALGLPDLTKPFELFVDEKQGYAKGVLTQKLGPWRRPVAYLSKKLDPVAAGWPPCLRMVAAIAVLTKDAGKLTMGQPLVILAPHAVEALVKQPPDRWLSNARMTHYQAMLLDTDRVQFGPVVALNPATLLPLPEEGAPHDCLEILAETHGTRPDLTDQPIPDADHTWYTDGSSFLQEGQRKAGAAVTTETEVIWAGALPAGTSAQRAELIALTQALKMAEGKRLNVYTDSRYAFATAHIHGEIYRRRGLLTSEGREIKNKSEILALLKALFLPKRLSIIHCLGHQKGDSAEARGNRLADQAAREAAIKTPPDTSTLLAGKRTADGSEFEKRTADGSEFESPKKKAKVE

SEQ ID NO: 2067 - protein, 2093 aa, synthetic construct
MPAAKRVKLDGGDKKYSIGLDIGTNSVGWAVITDEYKVPSKKFKVLGNTDRHSIKKNLIGALLFDSGETAEATRLKRTARRRYTRRKNRICYLQEIFSNEMAKVDDSFFHRLEESFLVEEDKKHERHPIFGNIVDEVAYHEKYPTIYHLRKKLVDSTDKADLRLIYLALAHMIKFRGHFLIEGDLNPDNSDVDKLFIQLVQTYNQLFEENPINASGVDAKAILSARLSKSRRLENLIAQLPGEKKNGLFGNLIALSLGLTPNFKSNFDLAEDAKLQLSKDTYDDDLDNLLAQIGDQYADLFLAAKNLSDAILLSDILRVNTEITKAPLSASMIKRYDEHHQDLTLLKALVRQQLPEKYKEIFFDQSKNGYAGYIDGGASQEEFYKFIKPILEKMDGTEELLVKLNREDLLRKQRTFDNGSIPHQIHLGELHAILRRQEDFYPFLKDNREKIEKILTFRIPYYVGPLARGNSRFAWMTRKSEETITPWNFEEVVDKGASAQSFIERMTNFDKNLPNEKVLPKHSLLYEYFTVYNELTKVKYVTEGMRKPAFLSGEQKKAIVDLLFKTNRKVTVKQLKEDYFKKIECFDSVEISGVEDRFNASLGTYHDLLKIIKDKDFLDNEENEDILEDIVLTLTLFEDREMIEERLKTYAHLFDDKVMKQLKRRRYTGWGRLSRKLINGIRDKQSGKTILDFLKSDGFANRNFMQLIHDDSLTFKEDIQKAQVSGQGDSLHEHIANLAGSPAIKKGILQTVKVVDELVKVMGRHKPENIVIEMARENQTTQKGQKNSRERMKRIEEGIKELGSQILKEHPVENTQLQNEKLYLYYLQNGRDMYVDQELDINRLSDYDVDHIVPQSFLKDDSIDNKVLTRSDKARGKSDNVPSEEVVKKMKNYWRQLLNAKLITQRKFDNLTKAERGGLSELDKAGFIKRQLVETRQITKHVAQILDSRMNTKYDENDKLIREVKVITLKSKLVSDFRKDFQFYKVREINNYHHAHDAYLNAVVGTALIKKYPKLESEFVYGDYKVYDVRKMIAKSEQEIGKATAKYFFYSNIMNFFKTEITLANGEIRKRPLIETNGETGEIVWDKGRDFATVRKVLSMPQVNIVKKTEVQTGGFSKESILPKRNSDKLIARKKDWDPKKYGGFDSPTVAYSVLVVAKVEKGKSKKLKSVKELLGITIMERSSFEKNPIDFLEAKGYKEVKKDLIIKLPKYSLFELENGRKRMLASAGELQKGNELALPSKYVNFLYLASHYEKLKGSPEDNEQKQLFVEQHKHYLDEIIEQISEFSKRVILADANLDKVLSAYNKHRDKPIREQAENIIHLFTLTNLGAPAAFKYFDTTIDRKRYTSTKEVLDATLIHQSITGLYETRIDLSQLGGDGGEAAAKPAPGGTLGIEDEYRLHETSTEPDVSLGSTWLSDFPQAWAETGGMGLAVRQAPLIIPLKATSTPVSIQQYPMSHEARLGIKPHIQRLLDQGILVPCQSPWNTPLLPVKKPGTNDYRPVQDLREVNKRVEDIHPTVPNPYNLLSGLPPSHQWYTVLDLKDAFFCLRLHPTSQPLFAFEWRDPGMGISGQLTWTRLPQGFKNSPTLFDEALHRDLADFRIQHPDLILLQYVDDILLAATSELDCQQGTRALLQTLGDLGYRASAKKAQICQKQVKYLGYLLREGQRWLTEARKETVMGQPVPKTPRQLREFLGTAGFCRLWIPGFAEMAAPLYPLTKTGTLFSWGPDQQKAYQEIKQALLTAPALGLPDLTKPFELFVDEKQGYAKGVLTQKLGPWRRPVAYLSKKLDPVAAGWPPCLRMVAAIAVLTKDAGKLTMGQPLVILAPHAVEALVKQPPDRWLSNARMTHYQAMLLDTDRVQFGPVVALNPATLLPLPEEGAPHDCLEILAETHGTRPDLTDQPIPDADHTWYTDGSSFLQEGQRKAGAAVTTETEVIWAGALPAGTSAQRAELIALTQALKMAEGKRLNVYTDSRYAFATAHIHGEIYRRRGLLTSEGREIKNKSEILALLKALFLPKRLSIIHCLGHQKGDSAEARGNRLADQAAREAAIKTPPDTSTLLAGKRTADGSEFEKRTADGSEFESPKKKAKVE

SEQ ID NO: 2068 - protein, 2096 aa, synthetic construct
MPAAKRVKLDGGDKKYSIGLDIGTNSVGWAVITDEYKVPSKKFKVLGNTDRHSIKKNLIGALLFDSGETAEATRLKRTARRRYTRRKNRICYLQEIFSNEMAKVDDSFFHRLEESFLVEEDKKHERHPIFGNIVDEVAYHEKYPTIYHLRKKLVDSTDKADLRLIYLALAHMIKFRGHFLIEGDLNPDNSDVDKLFIQLVQTYNQLFEENPINASGVDAKAILSARLSKSRRLENLIAQLPGEKKNGLFGNLIALSLGLTPNFKSNFDLAEDAKLQLSKDTYDDDLDNLLAQIGDQYADLFLAAKNLSDAILLSDILRVNTEITKAPLSASMIKRYDEHHQDLTLLKALVRQQLPEKYKEIFFDQSKNGYAGYIDGGASQEEFYKFIKPILEKMDGTEELLVKLNREDLLRKQRTFDNGSIPHQIHLGELHAILRRQEDFYPFLKDNREKIEKILTFRIPYYVGPLARGNSRFAWMTRKSEETITPWNFEEVVDKGASAQSFIERMTNFDKNLPNEKVLPKHSLLYEYFTVYNELTKVKYVTEGMRKPAFLSGEQKKAIVDLLFKTNRKVTVKQLKEDYFKKIECFDSVEISGVEDRFNASLGTYHDLLKIIKDKDFLDNEENEDILEDIVLTLTLFEDREMIEERLKTYAHLFDDKVMKQLKRRRYTGWGRLSRKLINGIRDKQSGKTILDFLKSDGFANRNFMQLIHDDSLTFKEDIQKAQVSGQGDSLHEHIANLAGSPAIKKGILQTVKVVDELVKVMGRHKPENIVIEMARENQTTQKGQKNSRERMKRIEEGIKELGSQILKEHPVENTQLQNEKLYLYYLQNGRDMYVDQELDINRLSDYDVDHIVPQSFLKDDSIDNKVLTRSDKARGKSDNVPSEEVVKKMKNYWRQLLNAKLITQRKFDNLTKAERGGLSELDKAGFIKRQLVETRQITKHVAQILDSRMNTKYDENDKLIREVKVITLKSKLVSDFRKDFQFYKVREINNYHHAHDAYLNAVVGTALIKKYPKLESEFVYGDYKVYDVRKMIAKSEQEIGKATAKYFFYSNIMNFFKTEITLANGEIRKRPLIETNGETGEIVWDKGRDFATVRKVLSMPQVNIVKKTEVQTGGFSKESILPKRNSDKLIARKKDWDPKKYGGFDSPTVAYSVLVVAKVEKGKSKKLKSVKELLGITIMERSSFEKNPIDFLEAKGYKEVKKDLIIKLPKYSLFELENGRKRMLASAGELQKGNELALPSKYVNFLYLASHYEKLKGSPEDNEQKQLFVEQHKHYLDEIIEQISEFSKRVILADANLDKVLSAYNKHRDKPIREQAENIIHLFTLTNLGAPAAFKYFDTTIDRKRYTSTKEVLDATLIHQSITGLYETRIDLSQLGGDGGGGGGGSEAAAKGGTLGIEDEYRLHETSTEPDVSLGSTWLSDFPQAWAETGGMGLAVRQAPLIIPLKATSTPVSIQQYPMSHEARLGIKPHIQRLLDQGILVPCQSPWNTPLLPVKKPGTNDYRPVQDLREVNKRVEDIHPTVPNPYNLLSGLPPSHQWYTVLDLKDAFFCLRLHPTSQPLFAFEWRDPGMGISGQLTWTRLPQGFKNSPTLFDEALHRDLADFRIQHPDLILLQYVDDILLAATSELDCQQGTRALLQTLGDLGYRASAKKAQICQKQVKYLGYLLREGQRWLTEARKETVMGQPVPKTPRQLREFLGTAGFCRLWIPGFAEMAAPLYPLTKTGTLFSWGPDQQKAYQEIKQALLTAPALGLPDLTKPFELFVDEKQGYAKGVLTQKLGPWRRPVAYLSKKLDPVAAGWPPCLRMVAAIAVLTKDAGKLTMGQPLVILAPHAVEALVKQPPDRWLSNARMTHYQAMLLDTDRVQFGPVVALNPATLLPLPEEGAPHDCLEILAETHGTRPDLTDQPIPDADHTWYTDGSSFLQEGQRKAGAAVTTETEVIWAGALPAGTSAQRAELIALTQALKMAEGKRLNVYTDSRYAFATAHIHGEIYRRRGLLTSEGREIKNKSEILALLKALFLPKRLSIIHCLGHQKGDSAEARGNRLADQAAREAAIKTPPDTSTLLAGKRTADGSEFEKRTADGSEFESPKKKAKVE

SEQ ID NO: 2069 - protein, 2096 aa, synthetic construct
MPAAKRVKLDGGDKKYSIGLDIGTNSVGWAVITDEYKVPSKKFKVLGNTDRHSIKKNLIGALLFDSGETAEATRLKRTARRRYTRRKNRICYLQEIFSNEMAKVDDSFFHRLEESFLVEEDKKHERHPIFGNIVDEVAYHEKYPTIYHLRKKLVDSTDKADLRLIYLALAHMIKFRGHFLIEGDLNPDNSDVDKLFIQLVQTYNQLFEENPINASGVDAKAILSARLSKSRRLENLIAQLPGEKKNGLFGNLIALSLGLTPNFKSNFDLAEDAKLQLSKDTYDDDLDNLLAQIGDQYADLFLAAKNLSDAILLSDILRVNTEITKAPLSASMIKRYDEHHQDLTLLKALVRQQLPEKYKEIFFDQSKNGYAGYIDGGASQEEFYKFIKPILEKMDGTEELLVKLNREDLLRKQRTFDNGSIPHQIHLGELHAILRRQEDFYPFLKDNREKIEKILTFRIPYYVGPLARGNSRFAWMTRKSEETITPWNFEEVVDKGASAQSFIERMTNFDKNLPNEKVLPKHSLLYEYFTVYNELTKVKYVTEGMRKPAFLSGEQKKAIVDLLFKTNRKVTVKQLKEDYFKKIECFDSVEISGVEDRFNASLGTYHDLLKIIKDKDFLDNEENEDILEDIVLTLTLFEDREMIEERLKTYAHLFDDKVMKQLKRRRYTGWGRLSRKLINGIRDKQSGKTILDFLKSDGFANRNFMQLIHDDSLTFKEDIQKAQVSGQGDSLHEHIANLAGSPAIKKGILQTVKVVDELVKVMGRHKPENIVIEMARENQTTQKGQKNSRERMKRIEEGIKELGSQILKEHPVENTQLQNEKLYLYYLQNGRDMYVDQELDINRLSDYDVDHIVPQSFLKDDSIDNKVLTRSDKARGKSDNVPSEEVVKKMKNYWRQLLNAKLITQRKFDNLTKAERGGLSELDKAGFIKRQLVETRQITKHVAQILDSRMNTKYDENDKLIREVKVITLKSKLVSDFRKDFQFYKVREINNYHHAHDAYLNAVVGTALIKKYPKLESEFVYGDYKVYDVRKMIAKSEQEIGKATAKYFFYSNIMNFFKTEITLANGEIRKRPLIETNGETGEIVWDKGRDFATVRKVLSMPQVNIVKKTEVQTGGFSKESILPKRNSDKLIARKKDWDPKKYGGFDSPTVAYSVLVVAKVEKGKSKKLKSVKELLGITIMERSSFEKNPIDFLEAKGYKEVKKDLIIKLPKYSLFELENGRKRMLASAGELQKGNELALPSKYVNFLYLASHYEKLKGSPEDNEQKQLFVEQHKHYLDEIIEQISEFSKRVILADANLDKVLSAYNKHRDKPIREQAENIIHLFTLTNLGAPAAFKYFDTTIDRKRYTSTKEVLDATLIHQSITGLYETRIDLSQLGGDGGGGSEAAAKPAPGGTLGIEDEYRLHETSTEPDVSLGSTWLSDFPQAWAETGGMGLAVRQAPLIIPLKATSTPVSIQQYPMSHEARLGIKPHIQRLLDQGILVPCQSPWNTPLLPVKKPGTNDYRPVQDLREVNKRVEDIHPTVPNPYNLLSGLPPSHQWYTVLDLKDAFFCLRLHPTSQPLFAFEWRDPGMGISGQLTWTRLPQGFKNSPTLFDEALHRDLADFRIQHPDLILLQYVDDILLAATSELDCQQGTRALLQTLGDLGYRASAKKAQICQKQVKYLGYLLREGQRWLTEARKETVMGQPVPKTPRQLREFLGTAGFCRLWIPGFAEMAAPLYPLTKTGTLFSWGPDQQKAYQEIKQALLTAPALGLPDLTKPFELFVDEKQGYAKGVLTQKLGPWRRPVAYLSKKLDPVAAGWPPCLRMVAAIAVLTKDAGKLTMGQPLVILAPHAVEALVKQPPDRWLSNARMTHYQAMLLDTDRVQFGPVVALNPATLLPLPEEGAPHDCLEILAETHGTRPDLTDQPIPDADHTWYTDGSSFLQEGQRKAGAAVTTETEVIWAGALPAGTSAQRAELIALTQALKMAEGKRLNVYTDSRYAFATAHIHGEIYRRRGLLTSEGREIKNKSEILALLKALFLPKRLSIIHCLGHQKGDSAEARGNRLADQAAREAAIKTPPDTSTLLAGKRTADGSEFEKRTADGSEFESPKKKAKVE

SEQ ID NO: 2070 - protein, 2105 aa, synthetic construct
MPAAKRVKLDGGDKKYSIGLDIGTNSVGWAVITDEYKVPSKKFKVLGNTDRHSIKKNLIGALLFDSGETAEATRLKRTARRRYTRRKNRICYLQEIFSNEMAKVDDSFFHRLEESFLVEEDKKHERHPIFGNIVDEVAYHEKYPTIYHLRKKLVDSTDKADLRLIYLALAHMIKFRGHFLIEGDLNPDNSDVDKLFIQLVQTYNQLFEENPINASGVDAKAILSARLSKSRRLENLIAQLPGEKKNGLFGNLIALSLGLTPNFKSNFDLAEDAKLQLSKDTYDDDLDNLLAQIGDQYADLFLAAKNLSDAILLSDILRVNTEITKAPLSASMIKRYDEHHQDLTLLKALVRQQLPEKYKEIFFDQSKNGYAGYIDGGASQEEFYKFIKPILEKMDGTEELLVKLNREDLLRKQRTFDNGSIPHQIHLGELHAILRRQEDFYPFLKDNREKIEKILTFRIPYYVGPLARGNSRFAWMTRKSEETITPWNFEEVVDKGASAQSFIERMTNFDKNLPNEKVLPKHSLLYEYFTVYNELTKVKYVTEGMRKPAFLSGEQKKAIVDLLFKTNRKVTVKQLKEDYFKKIECFDSVEISGVEDRFNASLGTYHDLLKIIKDKDFLDNEENEDILEDIVLTLTLFEDREMIEERLKTYAHLFDDKVMKQLKRRRYTGWGRLSRKLINGIRDKQSGKTILDFLKSDGFANRNFMQLIHDDSLTFKEDIQKAQVSGQGDSLHEHIANLAGSPAIKKGILQTVKVVDELVKVMGRHKPENIVIEMARENQTTQKGQKNSRERMKRIEEGIKELGSQILKEHPVENTQLQNEKLYLYYLQNGRDMYVDQELDINRLSDYDVDHIVPQSFLKDDSIDNKVLTRSDKARGKSDNVPSEEVVKKMKNYWRQLLNAKLITQRKFDNLTKAERGGLSELDKAGFIKRQLVETRQITKHVAQILDSRMNTKYDENDKLIREVKVITLKSKLVSDFRKDFQFYKVREINNYHHAHDAYLNAVVGTALIKKYPKLESEFVYGDYKVYDVRKMIAKSEQEIGKATAKYFFYSNIMNFFKTEITLANGEIRKRPLIETNGETGEIVWDKGRDFATVRKVLSMPQVNIVKKTEVQTGGFSKESILPKRNSDKLIARKKDWDPKKYGGFDSPTVAYSVLVVAKVEKGKSKKLKSVKELLGITIMERSSFEKNPIDFLEAKGYKEVKKDLIIKLPKYSLFELENGRKRMLASAGELQKGNELALPSKYVNFLYLASHYEKLKGSPEDNEQKQLFVEQHKHYLDEIIEQISEFSKRVILADANLDKVLSAYNKHRDKPIREQAENIIHLFTLTNLGAPAAFKYFDTTIDRKRYTSTKEVLDATLIHQSITGLYETRIDLSQLGGDGGEAAAKEAAAKEAAAKEAAAKGGTLGIEDEYRLHETSTEPDVSLGSTWLSDFPQAWAETGGMGLAVRQAPLIIPLKATSTPVSIQQYPMSHEARLGIKPHIQRLLDQGILVPCQSPWNTPLLPVKKPGTNDYRPVQDLREVNKRVEDIHPTVPNPYNLLSGLPPSHQWYTVLDLKDAFFCLRLHPTSQPLFAFEWRDPGMGISGQLTWTRLPQGFKNSPTLFNEALHRDLADFRIQHPDLILLQYVDDILLAATSELDCQQGTRALLQTLGDLGYRASAKKAQICQKQVKYLGYLLREGQRWLTEARKETVMGQPVPKTPRQLREFLGTAGFCRLWIPGFAEMAAPLYPLTKPGTLFSWGPDQQKAYQEIKQALLTAPALGLPDLTKPFELFVDEKQGYAKGVLTQKLGPWRRPVAYLSKKLDPVAAGWPPCLRMVAAIAVLTKDAGKLTMGQPLVILAPHAVEALVKQPPDRWLSNARMTHYQAMLLDTDRVQFGPVVALNPATLLPLPEEGAPHDCLEILAETHGTRPDLTDQPIPDADHTWYTDGSSFLQEGQRKAGAAVTTETEVIWAGALPAGTSAQRAELIALTQALKMAEGKRLNVYTDSRYAFATAHIHGEIYRRRGWLTSEGREIKNKSEILALLKALFLPKRLSIIHCLGHQKGDSAEARGNRLADQAAREAAIKTPPDTSTLLAGKRTADGSEFEKRTADGSEFESPKKKAKVE

SEQ ID NO: 2071 - protein, 2096 aa, synthetic construct
MPAAKRVKLDGGDKKYSIGLDIGTNSVGWAVITDEYKVPSKKFKVLGNTDRHSIKKNLIGALLFDSGETAEATRLKRTARRRYTRRKNRICYLQEIFSNEMAKVDDSFFHRLEESFLVEEDKKHERHPIFGNIVDEVAYHEKYPTIYHLRKKLVDSTDKADLRLIYLALAHMIKFRGHFLIEGDLNPDNSDVDKLFIQLVQTYNQLFEENPINASGVDAKAILSARLSKSRRLENLIAQLPGEKKNGLFGNLIALSLGLTPNFKSNFDLAEDAKLQLSKDTYDDDLDNLLAQIGDQYADLFLAAKNLSDAILLSDILRVNTEITKAPLSASMIKRYDEHHQDLTLLKALVRQQLPEKYKEIFFDQSKNGYAGYIDGGASQEEFYKFIKPILEKMDGTEELLVKLNREDLLRKQRTFDNGSIPHQIHLGELHAILRRQEDFYPFLKDNREKIEKILTFRIPYYVGPLARGNSRFAWMTRKSEETITPWNFEEVVDKGASAQSFIERMTNFDKNLPNEKVLPKHSLLYEYFTVYNELTKVKYVTEGMRKPAFLSGEQKKAIVDLLFKTNRKVTVKQLKEDYFKKIECFDSVEISGVEDRFNASLGTYHDLLKIIKDKDFLDNEENEDILEDIVLTLTLFEDREMIEERLKTYAHLFDDKVMKQLKRRRYTGWGRLSRKLINGIRDKQSGKTILDFLKSDGFANRNFMQLIHDDSLTFKEDIQKAQVSGQGDSLHEHIANLAGSPAIKKGILQTVKVVDELVKVMGRHKPENIVIEMARENQTTQKGQKNSRERMKRIEEGIKELGSQILKEHPVENTQLQNEKLYLYYLQNGRDMYVDQELDINRLSDYDVDHIVPQSFLKDDSIDNKVLTRSDKARGKSDNVPSEEVVKKMKNYWRQLLNAKLITQRKFDNLTKAERGGLSELDKAGFIKRQLVETRQITKHVAQILDSRMNTKYDENDKLIREVKVITLKSKLVSDFRKDFQFYKVREINNYHHAHDAYLNAVVGTALIKKYPKLESEFVYGDYKVYDVRKMIAKSEQEIGKATAKYFFYSNIMNFFKTEITLANGEIRKRPLIETNGETGEIVWDKGRDFATVRKVLSMPQVNIVKKTEVQTGGFSKESILPKRNSDKLIARKKDWDPKKYGGFDSPTVAYSVLVVAKVEKGKSKKLKSVKELLGITIMERSSFEKNPIDFLEAKGYKEVKKDLIIKLPKYSLFELENGRKRMLASAGELQKGNELALPSKYVNFLYLASHYEKLKGSPEDNEQKQLFVEQHKHYLDEIIEQISEFSKRVILADANLDKVLSAYNKHRDKPIREQAENIIHLFTLTNLGAPAAFKYFDTTIDRKRYTSTKEVLDATLIHQSITGLYETRIDLSQLGGDGGGGSEAAAKPAPGGTLGIEDEYRLHETSTEPDVSLGSTWLSDFPQAWAETGGMGLAVRQAPLIIPLKATSTPVSIQQYPMSHEARLGIKPHIQRLLDQGILVPCQSPWNTPLLPVKKPGTNDYRPVQDLREVNKRVEDIHPTVPNPYNLLSGLPPSHQWYTVLDLKDAFFCLRLHPTSQPLFAFEWRDPGMGISGQLTWTRLPQGFKNSPTLFNEALHRDLADFRIQHPDLILLQYVDDILLAATSELDCQQGTRALLQTLGDLGYRASAKKAQICQKQVKYLGYLLREGQRWLTEARKETVMGQPVPKTPRQLREFLGTAGFCRLWIPGFAEMAAPLYPLTKPGTLFSWGPDQQKAYQEIKQALLTAPALGLPDLTKPFELFVDEKQGYAKGVLTQKLGPWRRPVAYLSKKLDPVAAGWPPCLRMVAAIAVLTKDAGKLTMGQPLVILAPHAVEALVKQPPDRWLSNARMTHYQAMLLDTDRVQFGPVVALNPATLLPLPEEGAPHDCLEILAETHGTRPDLTDQPIPDADHTWYTDGSSFLQEGQRKAGAAVTTETEVIWAGALPAGTSAQRAELIALTQALKMAEGKRLNVYTDSRYAFATAHIHGEIYRRRGWLTSEGREIKNKSEILALLKALFLPKRLSIIHCLGHQKGDSAEARGNRLADQAAREAAIKTPPDTSTLLAGKRTADGSEFEKRTADGSEFESPKKKAKVE

SEQ ID NO: 2072 - protein, 2105 aa, synthetic construct
MPAAKRVKLDGGDKKYSIGLDIGTNSVGWAVITDEYKVPSKKFKVLGNTDRHSIKKNLIGALLFDSGETAEATRLKRTARRRYTRRKNRICYLQEIFSNEMAKVDDSFFHRLEESFLVEEDKKHERHPIFGNIVDEVAYHEKYPTIYHLRKKLVDSTDKADLRLIYLALAHMIKFRGHFLIEGDLNPDNSDVDKLFIQLVQTYNQLFEENPINASGVDAKAILSARLSKSRRLENLIAQLPGEKKNGLFGNLIALSLGLTPNFKSNFDLAEDAKLQLSKDTYDDDLDNLLAQIGDQYADLFLAAKNLSDAILLSDILRVNTEITKAPLSASMIKRYDEHHQDLTLLKALVRQQLPEKYKEIFFDQSKNGYAGYIDGGASQEEFYKFIKPILEKMDGTEELLVKLNREDLLRKQRTFDNGSIPHQIHLGELHAILRRQEDFYPFLKDNREKIEKILTFRIPYYVGPLARGNSRFAWMTRKSEETITPWNFEEVVDKGASAQSFIERMTNFDKNLPNEKVLPKHSLLYEYFTVYNELTKVKYVTEGMRKPAFLSGEQKKAIVDLLFKTNRKVTVKQLKEDYFKKIECFDSVEISGVEDRFNASLGTYHDLLKIIKDKDFLDNEENEDILEDIVLTLTLFEDREMIEERLKTYAHLFDDKVMKQLKRRRYTGWGRLSRKLINGIRDKQSGKTILDFLKSDGFANRNFMQLIHDDSLTFKEDIQKAQVSGQGDSLHEHIANLAGSPAIKKGILQTVKVVDELVKVMGRHKPENIVIEMARENQTTQKGQKNSRERMKRIEEGIKELGSQILKEHPVENTQLQNEKLYLYYLQNGRDMYVDQELDINRLSDYDVDHIVPQSFLKDDSIDNKVLTRSDKARGKSDNVPSEEVVKKMKNYWRQLLNAKLITQRKFDNLTKAERGGLSELDKAGFIKRQLVETRQITKHVAQILDSRMNTKYDENDKLIREVKVITLKSKLVSDFRKDFQFYKVREINNYHHAHDAYLNAVVGTALIKKYPKLESEFVYGDYKVYDVRKMIAKSEQEIGKATAKYFFYSNIMNFFKTEITLANGEIRKRPLIETNGETGEIVWDKGRDFATVRKVLSMPQVNIVKKTEVQTGGFSKESILPKRNSDKLIARKKDWDPKKYGGFDSPTVAYSVLVVAKVEKGKSKKLKSVKELLGITIMERSSFEKNPIDFLEAKGYKEVKKDLIIKLPKYSLFELENGRKRMLASAGELQKGNELALPSKYVNFLYLASHYEKLKGSPEDNEQKQLFVEQHKHYLDEIIEQISEFSKRVILADANLDKVLSAYNKHRDKPIREQAENIIHLFTLTNLGAPAAFKYFDTTIDRKRYTSTKEVLDATLIHQSITGLYETRIDLSQLGGDGGGGGGSGGGGSGGGGSGGGGSGGTLGIEDEYRLHETSTEPDVSLGSTWLSDFPQAWAETGGMGLAVRQAPLIIPLKATSTPVSIQQYPMSHEARLGIKPHIQRLLDQGILVPCQSPWNTPLLPVKKPGTNDYRPVQDLREVNKRVEDIHPTVPNPYNLLSGLPPSHQWYTVLDLKDAFFCLRLHPTSQPLFAFEWRDPGMGISGQLTWTRLPQGFKNSPTLFNEALHRDLADFRIQHPDLILLQYVDDILLAATSELDCQQGTRALLQTLGDLGYRASAKKAQICQKQVKYLGYLLREGQRWLTEARKETVMGQPVPKTPRQLREFLGTAGFCRLWIPGFAEMAAPLYPLTKPGTLFSWGPDQQKAYQEIKQALLTAPALGLPDLTKPFELFVDEKQGYAKGVLTQKLGPWRRPVAYLSKKLDPVAAGWPPCLRMVAAIAVLTKDAGKLTMGQPLVILAPHAVEALVKQPPDRWLSNARMTHYQAMLLDTDRVQFGPVVALNPATLLPLPEEGAPHDCLEILAETHGTRPDLTDQPIPDADHTWYTDGSSFLQEGQRKAGAAVTTETEVIWAGALPAGTSAQRAELIALTQALKMAEGKRLNVYTDSRYAFATAHIHGEIYRRRGWLTSEGREIKNKSEILALLKALFLPKRLSIIHCLGHQKGDSAEARGNRLADQAAREAAIKTPPDTSTLLAGKRTADGSEFEKRTADGSEFESPKKKAKVE

SEQ ID NO: 2073 - protein, 2093 aa, synthetic construct
MPAAKRVKLDGGDKKYSIGLDIGTNSVGWAVITDEYKVPSKKFKVLGNTDRHSIKKNLIGALLFDSGETAEATRLKRTARRRYTRRKNRICYLQEIFSNEMAKVDDSFFHRLEESFLVEEDKKHERHPIFGNIVDEVAYHEKYPTIYHLRKKLVDSTDKADLRLIYLALAHMIKFRGHFLIEGDLNPDNSDVDKLFIQLVQTYNQLFEENPINASGVDAKAILSARLSKSRRLENLIAQLPGEKKNGLFGNLIALSLGLTPNFKSNFDLAEDAKLQLSKDTYDDDLDNLLAQIGDQYADLFLAAKNLSDAILLSDILRVNTEITKAPLSASMIKRYDEHHQDLTLLKALVRQQLPEKYKEIFFDQSKNGYAGYIDGGASQEEFYKFIKPILEKMDGTEELLVKLNREDLLRKQRTFDNGSIPHQIHLGELHAILRRQEDFYPFLKDNREKIEKILTFRIPYYVGPLARGNSRFAWMTRKSEETITPWNFEEVVDKGASAQSFIERMTNFDKNLPNEKVLPKHSLLYEYFTVYNELTKVKYVTEGMRKPAFLSGEQKKAIVDLLFKTNRKVTVKQLKEDYFKKIECFDSVEISGVEDRFNASLGTYHDLLKIIKDKDFLDNEENEDILEDIVLTLTLFEDREMIEERLKTYAHLFDDKVMKQLKRRRYTGWGRLSRKLINGIRDKQSGKTILDFLKSDGFANRNFMQLIHDDSLTFKEDIQKAQVSGQGDSLHEHIANLAGSPAIKKGILQTVKVVDELVKVMGRHKPENIVIEMARENQTTQKGQKNSRERMKRIEEGIKELGSQILKEHPVENTQLQNEKLYLYYLQNGRDMYVDQELDINRLSDYDVDHIVPQSFLKDDSIDNKVLTRSDKARGKSDNVPSEEVVKKMKNYWRQLLNAKLITQRKFDNLTKAERGGLSELDKAGFIKRQLVETRQITKHVAQILDSRMNTKYDENDKLIREVKVITLKSKLVSDFRKDFQFYKVREINNYHHAHDAYLNAVVGTALIKKYPKLESEFVYGDYKVYDVRKMIAKSEQEIGKATAKYFFYSNIMNFFKTEITLANGEIRKRPLIETNGETGEIVWDKGRDFATVRKVLSMPQVNIVKKTEVQTGGFSKESILPKRNSDKLIARKKDWDPKKYGGFDSPTVAYSVLVVAKVEKGKSKKLKSVKELLGITIMERSSFEKNPIDFLEAKGYKEVKKDLIIKLPKYSLFELENGRKRMLASAGELQKGNELALPSKYVNFLYLASHYEKLKGSPEDNEQKQLFVEQHKHYLDEIIEQISEFSKRVILADANLDKVLSAYNKHRDKPIREQAENIIHLFTLTNLGAPAAFKYFDTTIDRKRYTSTKEVLDATLIHQSITGLYETRIDLSQLGGDGGGSSEAAAKGGTLGIEDEYRLHETSTEPDVSLGSTWLSDFPQAWAETGGMGLAVRQAPLIIPLKATSTPVSIQQYPMSHEARLGIKPHIQRLLDQGILVPCQSPWNTPLLPVKKPGTNDYRPVQDLREVNKRVEDIHPTVPNPYNLLSGLPPSHQWYTVLDLKDAFFCLRLHPTSQPLFAFEWRDPGMGISGQLTWTRLPQGFKNSPTLFNEALHRDLADFRIQHPDLILLQYVDDILLAATSELDCQQGTRALLQTLGDLGYRASAKKAQICQKQVKYLGYLLREGQRWLTEARKETVMGQPVPKTPRQLREFLGTAGFCRLWIPGFAEMAAPLYPLTKPGTLFSWGPDQQKAYQEIKQALLTAPALGLPDLTKPFELFVDEKQGYAKGVLTQKLGPWRRPVAYLSKKLDPVAAGWPPCLRMVAAIAVLTKDAGKLTMGQPLVILAPHAVEALVKQPPDRWLSNARMTHYQAMLLDTDRVQFGPVVALNPATLLPLPEEGAPHDCLEILAETHGTRPDLTDQPIPDADHTWYTDGSSFLQEGQRKAGAAVTTETEVIWAGALPAGTSAQRAELIALTQALKMAEGKRLNVYTDSRYAFATAHIHGEIYRRRGWLTSEGREIKNKSEILALLKALFLPKRLSIIHCLGHQKGDSAEARGNRLADQAAREAAIKTPPDTSTLLAGKRTADGSEFEKRTADGSEFESPKKKAKVE

SEQ ID NO: 2074 - protein, 2096 aa, synthetic construct
MPAAKRVKLDGGDKKYSIGLDIGTNSVGWAVITDEYKVPSKKFKVLGNTDRHSIKKNLIGALLFDSGETAEATRLKRTARRRYTRRKNRICYLQEIFSNEMAKVDDSFFHRLEESFLVEEDKKHERHPIFGNIVDEVAYHEKYPTIYHLRKKLVDSTDKADLRLIYLALAHMIKFRGHFLIEGDLNPDNSDVDKLFIQLVQTYNQLFEENPINASGVDAKAILSARLSKSRRLENLIAQLPGEKKNGLFGNLIALSLGLTPNFKSNFDLAEDAKLQLSKDTYDDDLDNLLAQIGDQYADLFLAAKNLSDAILLSDILRVNTEITKAPLSASMIKRYDEHHQDLTLLKALVRQQLPEKYKEIFFDQSKNGYAGYIDGGASQEEFYKFIKPILEKMDGTEELLVKLNREDLLRKQRTFDNGSIPHQIHLGELHAILRRQEDFYPFLKDNREKIEKILTFRIPYYVGPLARGNSRFAWMTRKSEETITPWNFEEVVDKGASAQSFIERMTNFDKNLPNEKVLPKHSLLYEYFTVYNELTKVKYVTEGMRKPAFLSGEQKKAIVDLLFKTNRKVTVKQLKEDYFKKIECFDSVEISGVEDRFNASLGTYHDLLKIIKDKDFLDNEENEDILEDIVLTLTLFEDREMIEERLKTYAHLFDDKVMKQLKRRRYTGWGRLSRKLINGIRDKQSGKTILDFLKSDGFANRNFMQLIHDDSLTFKEDIQKAQVSGQGDSLHEHIANLAGSPAIKKGILQTVKVVDELVKVMGRHKPENIVIEMARENQTTQKGQKNSRERMKRIEEGIKELGSQILKEHPVENTQLQNEKLYLYYLQNGRDMYVDQELDINRLSDYDVDHIVPQSFLKDDSIDNKVLTRSDKARGKSDNVPSEEVVKKMKNYWRQLLNAKLITQRKFDNLTKAERGGLSELDKAGFIKRQLVETRQITKHVAQILDSRMNTKYDENDKLIREVKVITLKSKLVSDFRKDFQFYKVREINNYHHAHDAYLNAVVGTALIKKYPKLESEFVYGDYKVYDVRKMIAKSEQEIGKATAKYFFYSNIMNFFKTEITLANGEIRKRPLIETNGETGEIVWDKGRDFATVRKVLSMPQVNIVKKTEVQTGGFSKESILPKRNSDKLIARKKDWDPKKYGGFDSPTVAYSVLVVAKVEKGKSKKLKSVKELLGITIMERSSFEKNPIDFLEAKGYKEVKKDLIIKLPKYSLFELENGRKRMLASAGELQKGNELALPSKYVNFLYLASHYEKLKGSPEDNEQKQLFVEQHKHYLDEIIEQISEFSKRVILADANLDKVLSAYNKHRDKPIREQAENIIHLFTLTNLGAPAAFKYFDTTIDRKRYTSTKEVLDATLIHQSITGLYETRIDLSQLGGDGGGGSEAAAKGGGGGTLGIEDEYRLHETSTEPDVSLGSTWLSDFPQAWAETGGMGLAVRQAPLIIPLKATSTPVSIQQYPMSHEARLGIKPHIQRLLDQGILVPCQSPWNTPLLPVKKPGTNDYRPVQDLREVNKRVEDIHPTVPNPYNLLSGLPPSHQWYTVLDLKDAFFCLRLHPTSQPLFAFEWRDPGMGISGQLTWTRLPQGFKNSPTLFNEALHRDLADFRIQHPDLILLQYVDDILLAATSELDCQQGTRALLQTLGDLGYRASAKKAQICQKQVKYLGYLLREGQRWLTEARKETVMGQPVPKTPRQLREFLGTAGFCRLWIPGFAEMAAPLYPLTKPGTLFSWGPDQQKAYQEIKQALLTAPALGLPDLTKPFELFVDEKQGYAKGVLTQKLGPWRRPVAYLSKKLDPVAAGWPPCLRMVAAIAVLTKDAGKLTMGQPLVILAPHAVEALVKQPPDRWLSNARMTHYQAMLLDTDRVQFGPVVALNPATLLPLPEEGAPHDCLEILAETHGTRPDLTDQPIPDADHTWYTDGSSFLQEGQRKAGAAVTTETEVIWAGALPAGTSAQRAELIALTQALKMAEGKRLNVYTDSRYAFATAHIHGEIYRRRGWLTSEGREIKNKSEILALLKALFLPKRLSIIHCLGHQKGDSAEARGNRLADQAAREAAIKTPPDTSTLLAGKRTADGSEFEKRTADGSEFESPKKKAKVE

SEQ ID NO: 2075 - protein, 2096 aa, synthetic construct
MPAAKRVKLDGGDKKYSIGLDIGTNSVGWAVITDEYKVPSKKFKVLGNTDRHSIKKNLIGALLFDSGETAEATRLKRTARRRYTRRKNRICYLQEIFSNEMAKVDDSFFHRLEESFLVEEDKKHERHPIFGNIVDEVAYHEKYPTIYHLRKKLVDSTDKADLRLIYLALAHMIKFRGHFLIEGDLNPDNSDVDKLFIQLVQTYNQLFEENPINASGVDAKAILSARLSKSRRLENLIAQLPGEKKNGLFGNLIALSLGLTPNFKSNFDLAEDAKLQLSKDTYDDDLDNLLAQIGDQYADLFLAAKNLSDAILLSDILRVNTEITKAPLSASMIKRYDEHHQDLTLLKALVRQQLPEKYKEIFFDQSKNGYAGYIDGGASQEEFYKFIKPILEKMDGTEELLVKLNREDLLRKQRTFDNGSIPHQIHLGELHAILRRQEDFYPFLKDNREKIEKILTFRIPYYVGPLARGNSRFAWMTRKSEETITPWNFEEVVDKGASAQSFIERMTNFDKNLPNEKVLPKHSLLYEYFTVYNELTKVKYVTEGMRKPAFLSGEQKKAIVDLLFKTNRKVTVKQLKEDYFKKIECFDSVEISGVEDRFNASLGTYHDLLKIIKDKDFLDNEENEDILEDIVLTLTLFEDREMIEERLKTYAHLFDDKVMKQLKRRRYTGWGRLSRKLINGIRDKQSGKTILDFLKSDGFANRNFMQLIHDDSLTFKEDIQKAQVSGQGDSLHEHIANLAGSPAIKKGILQTVKVVDELVKVMGRHKPENIVIEMARENQTTQKGQKNSRERMKRIEEGIKELGSQILKEHPVENTQLQNEKLYLYYLQNGRDMYVDQELDINRLSDYDVDHIVPQSFLKDDSIDNKVLTRSDKARGKSDNVPSEEVVKKMKNYWRQLLNAKLITQRKFDNLTKAERGGLSELDKAGFIKRQLVETRQITKHVAQILDSRMNTKYDENDKLIREVKVITLKSKLVSDFRKDFQFYKVREINNYHHAHDAYLNAVVGTALIKKYPKLESEFVYGDYKVYDVRKMIAKSEQEIGKATAKYFFYSNIMNFFKTEITLANGEIRKRPLIETNGETGEIVWDKGRDFATVRKVLSMPQVNIVKKTEVQTGGFSKESILPKRNSDKLIARKKDWDPKKYGGFDSPTVAYSVLVVAKVEKGKSKKLKSVKELLGITIMERSSFEKNPIDFLEAKGYKEVKKDLIIKLPKYSLFELENGRKRMLASAGELQKGNELALPSKYVNFLYLASHYEKLKGSPEDNEQKQLFVEQHKHYLDEIIEQISEFSKRVILADANLDKVLSAYNKHRDKPIREQAENIIHLFTLTNLGAPAAFKYFDTTIDRKRYTSTKEVLDATLIHQSITGLYETRIDLSQLGGDGGGSSEAAAKGGGGGTLGIEDEYRLHETSTEPDVSLGSTWLSDFPQAWAETGGMGLAVRQAPLIIPLKATSTPVSIQQYPMSHEARLGIKPHIQRLLDQGILVPCQSPWNTPLLPVKKPGTNDYRPVQDLREVNKRVEDIHPTVPNPYNLLSGLPPSHQWYTVLDLKDAFFCLRLHPTSQPLFAFEWRDPGMGISGQLTWTRLPQGFKNSPTLFNEALHRDLADFRIQHPDLILLQYVDDILLAATSELDCQQGTRALLQTLGDLGYRASAKKAQICQKQVKYLGYLLREGQRWLTEARKETVMGQPVPKTPRQLREFLGTAGFCRLWIPGFAEMAAPLYPLTKPGTLFSWGPDQQKAYQEIKQALLTAPALGLPDLTKPFELFVDEKQGYAKGVLTQKLGPWRRPVAYLSKKLDPVAAGWPPCLRMVAAIAVLTKDAGKLTMGQPLVILAPHAVEALVKQPPDRWLSNARMTHYQAMLLDTDRVQFGPVVALNPATLLPLPEEGAPHDCLEILAETHGTRPDLTDQPIPDADHTWYTDGSSFLQEGQRKAGAAVTTETEVIWAGALPAGTSAQRAELIALTQALKMAEGKRLNVYTDSRYAFATAHIHGEIYRRRGWLTSEGREIKNKSEILALLKALFLPKRLSIIHCLGHQKGDSAEARGNRLADQAAREAAIKTPPDTSTLLAGKRTADGSEFEKRTADGSEFESPKKKAKVE

SEQ ID NO: 2076 - protein, 2096 aa, synthetic construct
MPAAKRVKLDGGDKKYSIGLDIGTNSVGWAVITDEYKVPSKKFKVLGNTDRHSIKKNLIGALLFDSGETAEATRLKRTARRRYTRRKNRICYLQEIFSNEMAKVDDSFFHRLEESFLVEEDKKHERHPIFGNIVDEVAYHEKYPTIYHLRKKLVDSTDKADLRLIYLALAHMIKFRGHFLIEGDLNPDNSDVDKLFIQLVQTYNQLFEENPINASGVDAKAILSARLSKSRRLENLIAQLPGEKKNGLFGNLIALSLGLTPNFKSNFDLAEDAKLQLSKDTYDDDLDNLLAQIGDQYADLFLAAKNLSDAILLSDILRVNTEITKAPLSASMIKRYDEHHQDLTLLKALVRQQLPEKYKEIFFDQSKNGYAGYIDGGASQEEFYKFIKPILEKMDGTEELLVKLNREDLLRKQRTFDNGSIPHQIHLGELHAILRRQEDFYPFLKDNREKIEKILTFRIPYYVGPLARGNSRFAWMTRKSEETITPWNFEEVVDKGASAQSFIERMTNFDKNLPNEKVLPKHSLLYEYFTVYNELTKVKYVTEGMRKPAFLSGEQKKAIVDLLFKTNRKVTVKQLKEDYFKKIECFDSVEISGVEDRFNASLGTYHDLLKIIKDKDFLDNEENEDILEDIVLTLTLFEDREMIEERLKTYAHLFDDKVMKQLKRRRYTGWGRLSRKLINGIRDKQSGKTILDFLKSDGFANRNFMQLIHDDSLTFKEDIQKAQVSGQGDSLHEHIANLAGSPAIKKGILQTVKVVDELVKVMGRHKPENIVIEMARENQTTQKGQKNSRERMKRIEEGIKELGSQILKEHPVENTQLQNEKLYLYYLQNGRDMYVDQELDINRLSDYDVDHIVPQSFLKDDSIDNKVLTRSDKARGKSDNVPSEEVVKKMKNYWRQLLNAKLITQRKFDNLTKAERGGLSELDKAGFIKRQLVETRQITKHVAQILDSRMNTKYDENDKLIREVKVITLKSKLVSDFRKDFQFYKVREINNYHHAHDAYLNAVVGTALIKKYPKLESEFVYGDYKVYDVRKMIAKSEQEIGKATAKYFFYSNIMNFFKTEITLANGEIRKRPLIETNGETGEIVWDKGRDFATVRKVLSMPQVNIVKKTEVQTGGFSKESILPKRNSDKLIARKKDWDPKKYGGFDSPTVAYSVLVVAKVEKGKSKKLKSVKELLGITIMERSSFEKNPIDFLEAKGYKEVKKDLIIKLPKYSLFELENGRKRMLASAGELQKGNELALPSKYVNFLYLASHYEKLKGSPEDNEQKQLFVEQHKHYLDEIIEQISEFSKRVILADANLDKVLSAYNKHRDKPIREQAENIIHLFTLTNLGAPAAFKYFDTTIDRKRYTSTKEVLDATLIHQSITGLYETRIDLSQLGGDGGGSSGGSEAAAKGGTLGIEDEYRLHETSTEPDVSLGSTWLSDFPQAWAETGGMGLAVRQAPLIIPLKATSTPVSIQQYPMSHEARLGIKPHIQRLLDQGILVPCQSPWNTPLLPVKKPGTNDYRPVQDLREVNKRVEDIHPTVPNPYNLLSGLPPSHQWYTVLDLKDAFFCLRLHPTSQPLFAFEWRDPGMGISGQLTWTRLPQGFKNSPTLFNEALHRDLADFRIQHPDLILLQYVDDILLAATSELDCQQGTRALLQTLGDLGYRASAKKAQICQKQVKYLGYLLREGQRWLTEARKETVMGQPVPKTPRQLREFLGTAGFCRLWIPGFAEMAAPLYPLTKPGTLFSWGPDQQKAYQEIKQALLTAPALGLPDLTKPFELFVDEKQGYAKGVLTQKLGPWRRPVAYLSKKLDPVAAGWPPCLRMVAAIAVLTKDAGKLTMGQPLVILAPHAVEALVKQPPDRWLSNARMTHYQAMLLDTDRVQFGPVVALNPATLLPLPEEGAPHDCLEILAETHGTRPDLTDQPIPDADHTWYTDGSSFLQEGQRKAGAAVTTETEVIWAGALPAGTSAQRAELIALTQALKMAEGKRLNVYTDSRYAFATAHIHGEIYRRRGWLTSEGREIKNKSEILALLKALFLPKRLSIIHCLGHQKGDSAEARGNRLADQAAREAAIKTPPDTSTLLAGKRTADGSEFEKRTADGSEFESPKKKAKVE

SEQ ID NO: 2077 - protein, 2090 aa, synthetic construct
MPAAKRVKLDGGDKKYSIGLDIGTNSVGWAVITDEYKVPSKKFKVLGNTDRHSIKKNLIGALLFDSGETAEATRLKRTARRRYTRRKNRICYLQEIFSNEMAKVDDSFFHRLEESFLVEEDKKHERHPIFGNIVDEVAYHEKYPTIYHLRKKLVDSTDKADLRLIYLALAHMIKFRGHFLIEGDLNPDNSDVDKLFIQLVQTYNQLFEENPINASGVDAKAILSARLSKSRRLENLIAQLPGEKKNGLFGNLIALSLGLTPNFKSNFDLAEDAKLQLSKDTYDDDLDNLLAQIGDQYADLFLAAKNLSDAILLSDILRVNTEITKAPLSASMIKRYDEHHQDLTLLKALVRQQLPEKYKEIFFDQSKNGYAGYIDGGASQEEFYKFIKPILEKMDGTEELLVKLNREDLLRKQRTFDNGSIPHQIHLGELHAILRRQEDFYPFLKDNREKIEKILTFRIPYYVGPLARGNSRFAWMTRKSEETITPWNFEEVVDKGASAQSFIERMTNFDKNLPNEKVLPKHSLLYEYFTVYNELTKVKYVTEGMRKPAFLSGEQKKAIVDLLFKTNRKVTVKQLKEDYFKKIECFDSVEISGVEDRFNASLGTYHDLLKIIKDKDFLDNEENEDILEDIVLTLTLFEDREMIEERLKTYAHLFDDKVMKQLKRRRYTGWGRLSRKLINGIRDKQSGKTILDFLKSDGFANRNFMQLIHDDSLTFKEDIQKAQVSGQGDSLHEHIANLAGSPAIKKGILQTVKVVDELVKVMGRHKPENIVIEMARENQTTQKGQKNSRERMKRIEEGIKELGSQILKEHPVENTQLQNEKLYLYYLQNGRDMYVDQELDINRLSDYDVDHIVPQSFLKDDSIDNKVLTRSDKARGKSDNVPSEEVVKKMKNYWRQLLNAKLITQRKFDNLTKAERGGLSELDKAGFIKRQLVETRQITKHVAQILDSRMNTKYDENDKLIREVKVITLKSKLVSDFRKDFQFYKVREINNYHHAHDAYLNAVVGTALIKKYPKLESEFVYGDYKVYDVRKMIAKSEQEIGKATAKYFFYSNIMNFFKTEITLANGEIRKRPLIETNGETGEIVWDKGRDFATVRKVLSMPQVNIVKKTEVQTGGFSKESILPKRNSDKLIARKKDWDPKKYGGFDSPTVAYSVLVVAKVEKGKSKKLKSVKELLGITIMERSSFEKNPIDFLEAKGYKEVKKDLIIKLPKYSLFELENGRKRMLASAGELQKGNELALPSKYVNFLYLASHYEKLKGSPEDNEQKQLFVEQHKHYLDEIIEQISEFSKRVILADANLDKVLSAYNKHRDKPIREQAENIIHLFTLTNLGAPAAFKYFDTTIDRKRYTSTKEVLDATLIHQSITGLYETRIDLSQLGGDGGPAPAPGGTLGIEDEYRLHETSTEPDVSLGSTWLSDFPQAWAETGGMGLAVRQAPLIIPLKATSTPVSIQQYPMSHEARLGIKPHIQRLLDQGILVPCQSPWNTPLLPVKKPGTNDYRPVQDLREVNKRVEDIHPTVPNPYNLLSGLPPSHQWYTVLDLKDAFFCLRLHPTSQPLFAFEWRDPGMGISGQLTWTRLPQGFKNSPTLFNEALHRDLADFRIQHPDLILLQYVDDILLAATSELDCQQGTRALLQTLGDLGYRASAKKAQICQKQVKYLGYLLREGQRWLTEARKETVMGQPVPKTPRQLREFLGTAGFCRLWIPGFAEMAAPLYPLTKPGTLFSWGPDQQKAYQEIKQALLTAPALGLPDLTKPFELFVDEKQGYAKGVLTQKLGPWRRPVAYLSKKLDPVAAGWPPCLRMVAAIAVLTKDAGKLTMGQPLVILAPHAVEALVKQPPDRWLSNARMTHYQAMLLDTDRVQFGPVVALNPATLLPLPEEGAPHDCLEILAETHGTRPDLTDQPIPDADHTWYTDGSSFLQEGQRKAGAAVTTETEVIWAGALPAGTSAQRAELIALTQALKMAEGKRLNVYTDSRYAFATAHIHGEIYRRRGWLTSEGREIKNKSEILALLKALFLPKRLSIIHCLGHQKGDSAEARGNRLADQAAREAAIKTPPDTSTLLAGKRTADGSEFEKRTADGSEFESPKKKAKVE

SEQ ID NO: 2078 - protein, 2091 aa, synthetic construct
MPAAKRVKLDGGDKKYSIGLDIGTNSVGWAVITDEYKVPSKKFKVLGNTDRHSIKKNLIGALLFDSGETAEATRLKRTARRRYTRRKNRICYLQEIFSNEMAKVDDSFFHRLEESFLVEEDKKHERHPIFGNIVDEVAYHEKYPTIYHLRKKLVDSTDKADLRLIYLALAHMIKFRGHFLIEGDLNPDNSDVDKLFIQLVQTYNQLFEENPINASGVDAKAILSARLSKSRRLENLIAQLPGEKKNGLFGNLIALSLGLTPNFKSNFDLAEDAKLQLSKDTYDDDLDNLLAQIGDQYADLFLAAKNLSDAILLSDILRVNTEITKAPLSASMIKRYDEHHQDLTLLKALVRQQLPEKYKEIFFDQSKNGYAGYIDGGASQEEFYKFIKPILEKMDGTEELLVKLNREDLLRKQRTFDNGSIPHQIHLGELHAILRRQEDFYPFLKDNREKIEKILTFRIPYYVGPLARGNSRFAWMTRKSEETITPWNFEEVVDKGASAQSFIERMTNFDKNLPNEKVLPKHSLLYEYFTVYNELTKVKYVTEGMRKPAFLSGEQKKAIVDLLFKTNRKVTVKQLKEDYFKKIECFDSVEISGVEDRFNASLGTYHDLLKIIKDKDFLDNEENEDILEDIVLTLTLFEDREMIEERLKTYAHLFDDKVMKQLKRRRYTGWGRLSRKLINGIRDKQSGKTILDFLKSDGFANRNFMQLIHDDSLTFKEDIQKAQVSGQGDSLHEHIANLAGSPAIKKGILQTVKVVDELVKVMGRHKPENIVIEMARENQTTQKGQKNSRERMKRIEEGIKELGSQILKEHPVENTQLQNEKLYLYYLQNGRDMYVDQELDINRLSDYDVDHIVPQSFLKDDSIDNKVLTRSDKARGKSDNVPSEEVVKKMKNYWRQLLNAKLITQRKFDNLTKAERGGLSELDKAGFIKRQLVETRQITKHVAQILDSRMNTKYDENDKLIREVKVITLKSKLVSDFRKDFQFYKVREINNYHHAHDAYLNAVVGTALIKKYPKLESEFVYGDYKVYDVRKMIAKSEQEIGKATAKYFFYSNIMNFFKTEITLANGEIRKRPLIETNGETGEIVWDKGRDFATVRKVLSMPQVNIVKKTEVQTGGFSKESILPKRNSDKLIARKKDWDPKKYGGFDSPTVAYSVLVVAKVEKGKSKKLKSVKELLGITIMERSSFEKNPIDFLEAKGYKEVKKDLIIKLPKYSLFELENGRKRMLASAGELQKGNELALPSKYVNFLYLASHYEKLKGSPEDNEQKQLFVEQHKHYLDEIIEQISEFSKRVILADANLDKVLSAYNKHRDKPIREQAENIIHLFTLTNLGAPAAFKYFDTTIDRKRYTSTKEVLDATLIHQSITGLYETRIDLSQLGGDGGPAPGGSGGTLGIEDEYRLHETSTEPDVSLGSTWLSDFPQAWAETGGMGLAVRQAPLIIPLKATSTPVSIQQYPMSHEARLGIKPHIQRLLDQGILVPCQSPWNTPLLPVKKPGTNDYRPVQDLREVNKRVEDIHPTVPNPYNLLSGLPPSHQWYTVLDLKDAFFCLRLHPTSQPLFAFEWRDPGMGISGQLTWTRLPQGFKNSPTLFNEALHRDLADFRIQHPDLILLQYVDDILLAATSELDCQQGTRALLQTLGDLGYRASAKKAQICQKQVKYLGYLLREGQRWLTEARKETVMGQPVPKTPRQLREFLGTAGFCRLWIPGFAEMAAPLYPLTKPGTLFSWGPDQQKAYQEIKQALLTAPALGLPDLTKPFELFVDEKQGYAKGVLTQKLGPWRRPVAYLSKKLDPVAAGWPPCLRMVAAIAVLTKDAGKLTMGQPLVILAPHAVEALVKQPPDRWLSNARMTHYQAMLLDTDRVQFGPVVALNPATLLPLPEEGAPHDCLEILAETHGTRPDLTDQPIPDADHTWYTDGSSFLQEGQRKAGAAVTTETEVIWAGALPAGTSAQRAELIALTQALKMAEGKRLNVYTDSRYAFATAHIHGEIYRRRGWLTSEGREIKNKSEILALLKALFLPKRLSIIHCLGHQKGDSAEARGNRLADQAAREAAIKTPPDTSTLLAGKRTADGSEFEKRTADGSEFESPKKKAKVE

SEQ ID NO: 2079 - protein, 2094 aa, synthetic construct
MPAAKRVKLDGGDKKYSIGLDIGTNSVGWAVITDEYKVPSKKFKVLGNTDRHSIKKNLIGALLFDSGETAEATRLKRTARRRYTRRKNRICYLQEIFSNEMAKVDDSFFHRLEESFLVEEDKKHERHPIFGNIVDEVAYHEKYPTIYHLRKKLVDSTDKADLRLIYLALAHMIKFRGHFLIEGDLNPDNSDVDKLFIQLVQTYNQLFEENPINASGVDAKAILSARLSKSRRLENLIAQLPGEKKNGLFGNLIALSLGLTPNFKSNFDLAEDAKLQLSKDTYDDDLDNLLAQIGDQYADLFLAAKNLSDAILLSDILRVNTEITKAPLSASMIKRYDEHHQDLTLLKALVRQQLPEKYKEIFFDQSKNGYAGYIDGGASQEEFYKFIKPILEKMDGTEELLVKLNREDLLRKQRTFDNGSIPHQIHLGELHAILRRQEDFYPFLKDNREKIEKILTFRIPYYVGPLARGNSRFAWMTRKSEETITPWNFEEVVDKGASAQSFIERMTNFDKNLPNEKVLPKHSLLYEYFTVYNELTKVKYVTEGMRKPAFLSGEQKKAIVDLLFKTNRKVTVKQLKEDYFKKIECFDSVEISGVEDRFNASLGTYHDLLKIIKDKDFLDNEENEDILEDIVLTLTLFEDREMIEERLKTYAHLFDDKVMKQLKRRRYTGWGRLSRKLINGIRDKQSGKTILDFLKSDGFANRNFMQLIHDDSLTFKEDIQKAQVSGQGDSLHEHIANLAGSPAIKKGILQTVKVVDELVKVMGRHKPENIVIEMARENQTTQKGQKNSRERMKRIEEGIKELGSQILKEHPVENTQLQNEKLYLYYLQNGRDMYVDQELDINRLSDYDVDHIVPQSFLKDDSIDNKVLTRSDKARGKSDNVPSEEVVKKMKNYWRQLLNAKLITQRKFDNLTKAERGGLSELDKAGFIKRQLVETRQITKHVAQILDSRMNTKYDENDKLIREVKVITLKSKLVSDFRKDFQFYKVREINNYHHAHDAYLNAVVGTALIKKYPKLESEFVYGDYKVYDVRKMIAKSEQEIGKATAKYFFYSNIMNFFKTEITLANGEIRKRPLIETNGETGEIVWDKGRDFATVRKVLSMPQVNIVKKTEVQTGGFSKESILPKRNSDKLIARKKDWDPKKYGGFDSPTVAYSVLVVAKVEKGKSKKLKSVKELLGITIMERSSFEKNPIDFLEAKGYKEVKKDLIIKLPKYSLFELENGRKRMLASAGELQKGNELALPSKYVNFLYLASHYEKLKGSPEDNEQKQLFVEQHKHYLDEIIEQISEFSKRVILADANLDKVLSAYNKHRDKPIREQAENIIHLFTLTNLGAPAAFKYFDTTIDRKRYTSTKEVLDATLIHQSITGLYETRIDLSQLGGDGGPAPGSSGGGGGTLGIEDEYRLHETSTEPDVSLGSTWLSDFPQAWAETGGMGLAVRQAPLIIPLKATSTPVSIQQYPMSHEARLGIKPHIQRLLDQGILVPCQSPWNTPLLPVKKPGTNDYRPVQDLREVNKRVEDIHPTVPNPYNLLSGLPPSHQWYTVLDLKDAFFCLRLHPTSQPLFAFEWRDPGMGISGQLTWTRLPQGFKNSPTLFNEALHRDLADFRIQHPDLILLQYVDDILLAATSELDCQQGTRALLQTLGDLGYRASAKKAQICQKQVKYLGYLLREGQRWLTEARKETVMGQPVPKTPRQLREFLGTAGFCRLWIPGFAEMAAPLYPLTKPGTLFSWGPDQQKAYQEIKQALLTAPALGLPDLTKPFELFVDEKQGYAKGVLTQKLGPWRRPVAYLSKKLDPVAAGWPPCLRMVAAIAVLTKDAGKLTMGQPLVILAPHAVEALVKQPPDRWLSNARMTHYQAMLLDTDRVQFGPVVALNPATLLPLPEEGAPHDCLEILAETHGTRPDLTDQPIPDADHTWYTDGSSFLQEGQRKAGAAVTTETEVIWAGALPAGTSAQRAELIALTQALKMAEGKRLNVYTDSRYAFATAHIHGEIYRRRGWLTSEGREIKNKSEILALLKALFLPKRLSIIHCLGHQKGDSAEARGNRLADQAAREAAIKTPPDTSTLLAGKRTADGSEFEKRTADGSEFESPKKKAKVE

SEQ ID NO: 2080 - protein, 2094 aa, synthetic construct
MPAAKRVKLDGGDKKYSIGLDIGTNSVGWAVITDEYKVPSKKFKVLGNTDRHSIKKNLIGALLFDSGETAEATRLKRTARRRYTRRKNRICYLQEIFSNEMAKVDDSFFHRLEESFLVEEDKKHERHPIFGNIVDEVAYHEKYPTIYHLRKKLVDSTDKADLRLIYLALAHMIKFRGHFLIEGDLNPDNSDVDKLFIQLVQTYNQLFEENPINASGVDAKAILSARLSKSRRLENLIAQLPGEKKNGLFGNLIALSLGLTPNFKSNFDLAEDAKLQLSKDTYDDDLDNLLAQIGDQYADLFLAAKNLSDAILLSDILRVNTEITKAPLSASMIKRYDEHHQDLTLLKALVRQQLPEKYKEIFFDQSKNGYAGYIDGGASQEEFYKFIKPILEKMDGTEELLVKLNREDLLRKQRTFDNGSIPHQIHLGELHAILRRQEDFYPFLKDNREKIEKILTFRIPYYVGPLARGNSRFAWMTRKSEETITPWNFEEVVDKGASAQSFIERMTNFDKNLPNEKVLPKHSLLYEYFTVYNELTKVKYVTEGMRKPAFLSGEQKKAIVDLLFKTNRKVTVKQLKEDYFKKIECFDSVEISGVEDRFNASLGTYHDLLKIIKDKDFLDNEENEDILEDIVLTLTLFEDREMIEERLKTYAHLFDDKVMKQLKRRRYTGWGRLSRKLINGIRDKQSGKTILDFLKSDGFANRNFMQLIHDDSLTFKEDIQKAQVSGQGDSLHEHIANLAGSPAIKKGILQTVKVVDELVKVMGRHKPENIVIEMARENQTTQKGQKNSRERMKRIEEGIKELGSQILKEHPVENTQLQNEKLYLYYLQNGRDMYVDQELDINRLSDYDVDHIVPQSFLKDDSIDNKVLTRSDKARGKSDNVPSEEVVKKMKNYWRQLLNAKLITQRKFDNLTKAERGGLSELDKAGFIKRQLVETRQITKHVAQILDSRMNTKYDENDKLIREVKVITLKSKLVSDFRKDFQFYKVREINNYHHAHDAYLNAVVGTALIKKYPKLESEFVYGDYKVYDVRKMIAKSEQEIGKATAKYFFYSNIMNFFKTEITLANGEIRKRPLIETNGETGEIVWDKGRDFATVRKVLSMPQVNIVKKTEVQTGGFSKESILPKRNSDKLIARKKDWDPKKYGGFDSPTVAYSVLVVAKVEKGKSKKLKSVKELLGITIMERSSFEKNPIDFLEAKGYKEVKKDLIIKLPKYSLFELENGRKRMLASAGELQKGNELALPSKYVNFLYLASHYEKLKGSPEDNEQKQLFVEQHKHYLDEIIEQISEFSKRVILADANLDKVLSAYNKHRDKPIREQAENIIHLFTLTNLGAPAAFKYFDTTIDRKRYTSTKEVLDATLIHQSITGLYETRIDLSQLGGDGGGSSPAPGGSGGTLGIEDEYRLHETSTEPDVSLGSTWLSDFPQAWAETGGMGLAVRQAPLIIPLKATSTPVSIQQYPMSHEARLGIKPHIQRLLDQGILVPCQSPWNTPLLPVKKPGTNDYRPVQDLREVNKRVEDIHPTVPNPYNLLSGLPPSHQWYTVLDLKDAFFCLRLHPTSQPLFAFEWRDPGMGISGQLTWTRLPQGFKNSPTLFNEALHRDLADFRIQHPDLILLQYVDDILLAATSELDCQQGTRALLQTLGDLGYRASAKKAQICQKQVKYLGYLLREGQRWLTEARKETVMGQPVPKTPRQLREFLGTAGFCRLWIPGFAEMAAPLYPLTKPGTLFSWGPDQQKAYQEIKQALLTAPALGLPDLTKPFELFVDEKQGYAKGVLTQKLGPWRRPVAYLSKKLDPVAAGWPPCLRMVAAIAVLTKDAGKLTMGQPLVILAPHAVEALVKQPPDRWLSNARMTHYQAMLLDTDRVQFGPVVALNPATLLPLPEEGAPHDCLEILAETHGTRPDLTDQPIPDADHTWYTDGSSFLQEGQRKAGAAVTTETEVIWAGALPAGTSAQRAELIALTQALKMAEGKRLNVYTDSRYAFATAHIHGEIYRRRGWLTSEGREIKNKSEILALLKALFLPKRLSIIHCLGHQKGDSAEARGNRLADQAAREAAIKTPPDTSTLLAGKRTADGSEFEKRTADGSEFESPKKKAKVE

SEQ ID NO: 2081 - protein, 2093 aa, synthetic construct
MPAAKRVKLDGGDKKYSIGLDIGTNSVGWAVITDEYKVPSKKFKVLGNTDRHSIKKNLIGALLFDSGETAEATRLKRTARRRYTRRKNRICYLQEIFSNEMAKVDDSFFHRLEESFLVEEDKKHERHPIFGNIVDEVAYHEKYPTIYHLRKKLVDSTDKADLRLIYLALAHMIKFRGHFLIEGDLNPDNSDVDKLFIQLVQTYNQLFEENPINASGVDAKAILSARLSKSRRLENLIAQLPGEKKNGLFGNLIALSLGLTPNFKSNFDLAEDAKLQLSKDTYDDDLDNLLAQIGDQYADLFLAAKNLSDAILLSDILRVNTEITKAPLSASMIKRYDEHHQDLTLLKALVRQQLPEKYKEIFFDQSKNGYAGYIDGGASQEEFYKFIKPILEKMDGTEELLVKLNREDLLRKQRTFDNGSIPHQIHLGELHAILRRQEDFYPFLKDNREKIEKILTFRIPYYVGPLARGNSRFAWMTRKSEETITPWNFEEVVDKGASAQSFIERMTNFDKNLPNEKVLPKHSLLYEYFTVYNELTKVKYVTEGMRKPAFLSGEQKKAIVDLLFKTNRKVTVKQLKEDYFKKIECFDSVEISGVEDRFNASLGTYHDLLKIIKDKDFLDNEENEDILEDIVLTLTLFEDREMIEERLKTYAHLFDDKVMKQLKRRRYTGWGRLSRKLINGIRDKQSGKTILDFLKSDGFANRNFMQLIHDDSLTFKEDIQKAQVSGQGDSLHEHIANLAGSPAIKKGILQTVKVVDELVKVMGRHKPENIVIEMARENQTTQKGQKNSRERMKRIEEGIKELGSQILKEHPVENTQLQNEKLYLYYLQNGRDMYVDQELDINRLSDYDVDHIVPQSFLKDDSIDNKVLTRSDKARGKSDNVPSEEVVKKMKNYWRQLLNAKLITQRKFDNLTKAERGGLSELDKAGFIKRQLVETRQITKHVAQILDSRMNTKYDENDKLIREVKVITLKSKLVSDFRKDFQFYKVREINNYHHAHDAYLNAVVGTALIKKYPKLESEFVYGDYKVYDVRKMIAKSEQEIGKATAKYFFYSNIMNFFKTEITLANGEIRKRPLIETNGETGEIVWDKGRDFATVRKVLSMPQVNIVKKTEVQTGGFSKESILPKRNSDKLIARKKDWDPKKYGGFDSPTVAYSVLVVAKVEKGKSKKLKSVKELLGITIMERSSFEKNPIDFLEAKGYKEVKKDLIIKLPKYSLFELENGRKRMLASAGELQKGNELALPSKYVNFLYLASHYEKLKGSPEDNEQKQLFVEQHKHYLDEIIEQISEFSKRVILADANLDKVLSAYNKHRDKPIREQAENIIHLFTLTNLGAPAAFKYFDTTIDRKRYTSTKEVLDATLIHQSITGLYETRIDLSQLGGDGGEAAAKGGGGGTLGIEDEYRLHETSTEPDVSLGSTWLSDFPQAWAETGGMGLAVRQAPLIIPLKATSTPVSIQQYPMSHEARLGIKPHIQRLLDQGILVPCQSPWNTPLLPVKKPGTNDYRPVQDLREVNKRVEDIHPTVPNPYNLLSGLPPSHQWYTVLDLKDAFFCLRLHPTSQPLFAFEWRDPGMGISGQLTWTRLPQGFKNSPTLFNEALHRDLADFRIQHPDLILLQYVDDILLAATSELDCQQGTRALLQTLGDLGYRASAKKAQICQKQVKYLGYLLREGQRWLTEARKETVMGQPVPKTPRQLREFLGTAGFCRLWIPGFAEMAAPLYPLTKPGTLFSWGPDQQKAYQEIKQALLTAPALGLPDLTKPFELFVDEKQGYAKGVLTQKLGPWRRPVAYLSKKLDPVAAGWPPCLRMVAAIAVLTKDAGKLTMGQPLVILAPHAVEALVKQPPDRWLSNARMTHYQAMLLDTDRVQFGPVVALNPATLLPLPEEGAPHDCLEILAETHGTRPDLTDQPIPDADHTWYTDGSSFLQEGQRKAGAAVTTETEVIWAGALPAGTSAQRAELIALTQALKMAEGKRLNVYTDSRYAFATAHIHGEIYRRRGWLTSEGREIKNKSEILALLKALFLPKRLSIIHCLGHQKGDSAEARGNRLADQAAREAAIKTPPDTSTLLAGKRTADGSEFEKRTADGSEFESPKKKAKVE

SEQ ID NO: 2082 - protein, 2096 aa, synthetic construct
MPAAKRVKLDGGDKKYSIGLDIGTNSVGWAVITDEYKVPSKKFKVLGNTDRHSIKKNLIGALLFDSGETAEATRLKRTARRRYTRRKNRICYLQEIFSNEMAKVDDSFFHRLEESFLVEEDKKHERHPIFGNIVDEVAYHEKYPTIYHLRKKLVDSTDKADLRLIYLALAHMIKFRGHFLIEGDLNPDNSDVDKLFIQLVQTYNQLFEENPINASGVDAKAILSARLSKSRRLENLIAQLPGEKKNGLFGNLIALSLGLTPNFKSNFDLAEDAKLQLSKDTYDDDLDNLLAQIGDQYADLFLAAKNLSDAILLSDILRVNTEITKAPLSASMIKRYDEHHQDLTLLKALVRQQLPEKYKEIFFDQSKNGYAGYIDGGASQEEFYKFIKPILEKMDGTEELLVKLNREDLLRKQRTFDNGSIPHQIHLGELHAILRRQEDFYPFLKDNREKIEKILTFRIPYYVGPLARGNSRFAWMTRKSEETITPWNFEEVVDKGASAQSFIERMTNFDKNLPNEKVLPKHSLLYEYFTVYNELTKVKYVTEGMRKPAFLSGEQKKAIVDLLFKTNRKVTVKQLKEDYFKKIECFDSVEISGVEDRFNASLGTYHDLLKIIKDKDFLDNEENEDILEDIVLTLTLFEDREMIEERLKTYAHLFDDKVMKQLKRRRYTGWGRLSRKLINGIRDKQSGKTILDFLKSDGFANRNFMQLIHDDSLTFKEDIQKAQVSGQGDSLHEHIANLAGSPAIKKGILQTVKVVDELVKVMGRHKPENIVIEMARENQTTQKGQKNSRERMKRIEEGIKELGSQILKEHPVENTQLQNEKLYLYYLQNGRDMYVDQELDINRLSDYDVDHIVPQSFLKDDSIDNKVLTRSDKARGKSDNVPSEEVVKKMKNYWRQLLNAKLITQRKFDNLTKAERGGLSELDKAGFIKRQLVETRQITKHVAQILDSRMNTKYDENDKLIREVKVITLKSKLVSDFRKDFQFYKVREINNYHHAHDAYLNAVVGTALIKKYPKLESEFVYGDYKVYDVRKMIAKSEQEIGKATAKYFFYSNIMNFFKTEITLANGEIRKRPLIETNGETGEIVWDKGRDFATVRKVLSMPQVNIVKKTEVQTGGFSKESILPKRNSDKLIARKKDWDPKKYGGFDSPTVAYSVLVVAKVEKGKSKKLKSVKELLGITIMERSSFEKNPIDFLEAKGYKEVKKDLIIKLPKYSLFELENGRKRMLASAGELQKGNELALPSKYVNFLYLASHYEKLKGSPEDNEQKQLFVEQHKHYLDEIIEQISEFSKRVILADANLDKVLSAYNKHRDKPIREQAENIIHLFTLTNLGAPAAFKYFDTTIDRKRYTSTKEVLDATLIHQSITGLYETRIDLSQLGGDGGGGGGGSEAAAKGGTLGIEDEYRLHETSTEPDVSLGSTWLSDFPQAWAETGGMGLAVRQAPLIIPLKATSTPVSIQQYPMSHEARLGIKPHIQRLLDQGILVPCQSPWNTPLLPVKKPGTNDYRPVQDLREVNKRVEDIHPTVPNPYNLLSGLPPSHQWYTVLDLKDAFFCLRLHPTSQPLFAFEWRDPGMGISGQLTWTRLPQGFKNSPTLFNEALHRDLADFRIQHPDLILLQYVDDILLAATSELDCQQGTRALLQTLGDLGYRASAKKAQICQKQVKYLGYLLREGQRWLTEARKETVMGQPVPKTPRQLREFLGTAGFCRLWIPGFAEMAAPLYPLTKPGTLFSWGPDQQKAYQEIKQALLTAPALGLPDLTKPFELFVDEKQGYAKGVLTQKLGPWRRPVAYLSKKLDPVAAGWPPCLRMVAAIAVLTKDAGKLTMGQPLVILAPHAVEALVKQPPDRWLSNARMTHYQAMLLDTDRVQFGPVVALNPATLLPLPEEGAPHDCLEILAETHGTRPDLTDQPIPDADHTWYTDGSSFLQEGQRKAGAAVTTETEVIWAGALPAGTSAQRAELIALTQALKMAEGKRLNVYTDSRYAFATAHIHGEIYRRRGWLTSEGREIKNKSEILALLKALFLPKRLSIIHCLGHQKGDSAEARGNRLADQAAREAAIKTPPDTSTLLAGKRTADGSEFEKRTADGSEFESPKKKAKVE

SEQ ID NO: 2083 - protein, 2091 aa, synthetic construct
MPAAKRVKLDGGDKKYSIGLDIGTNSVGWAVITDEYKVPSKKFKVLGNTDRHSIKKNLIGALLFDSGETAEATRLKRTARRRYTRRKNRICYLQEIFSNEMAKVDDSFFHRLEESFLVEEDKKHERHPIFGNIVDEVAYHEKYPTIYHLRKKLVDSTDKADLRLIYLALAHMIKFRGHFLIEGDLNPDNSDVDKLFIQLVQTYNQLFEENPINASGVDAKAILSARLSKSRRLENLIAQLPGEKKNGLFGNLIALSLGLTPNFKSNFDLAEDAKLQLSKDTYDDDLDNLLAQIGDQYADLFLAAKNLSDAILLSDILRVNTEITKAPLSASMIKRYDEHHQDLTLLKALVRQQLPEKYKEIFFDQSKNGYAGYIDGGASQEEFYKFIKPILEKMDGTEELLVKLNREDLLRKQRTFDNGSIPHQIHLGELHAILRRQEDFYPFLKDNREKIEKILTFRIPYYVGPLARGNSRFAWMTRKSEETITPWNFEEVVDKGASAQSFIERMTNFDKNLPNEKVLPKHSLLYEYFTVYNELTKVKYVTEGMRKPAFLSGEQKKAIVDLLFKTNRKVTVKQLKEDYFKKIECFDSVEISGVEDRFNASLGTYHDLLKIIKDKDFLDNEENEDILEDIVLTLTLFEDREMIEERLKTYAHLFDDKVMKQLKRRRYTGWGRLSRKLINGIRDKQSGKTILDFLKSDGFANRNFMQLIHDDSLTFKEDIQKAQVSGQGDSLHEHIANLAGSPAIKKGILQTVKVVDELVKVMGRHKPENIVIEMARENQTTQKGQKNSRERMKRIEEGIKELGSQILKEHPVENTQLQNEKLYLYYLQNGRDMYVDQELDINRLSDYDVDHIVPQSFLKDDSIDNKVLTRSDKARGKSDNVPSEEVVKKMKNYWRQLLNAKLITQRKFDNLTKAERGGLSELDKAGFIKRQLVETRQITKHVAQILDSRMNTKYDENDKLIREVKVITLKSKLVSDFRKDFQFYKVREINNYHHAHDAYLNAVVGTALIKKYPKLESEFVYGDYKVYDVRKMIAKSEQEIGKATAKYFFYSNIMNFFKTEITLANGEIRKRPLIETNGETGEIVWDKGRDFATVRKVLSMPQVNIVKKTEVQTGGFSKESILPKRNSDKLIARKKDWDPKKYGGFDSPTVAYSVLVVAKVEKGKSKKLKSVKELLGITIMERSSFEKNPIDFLEAKGYKEVKKDLIIKLPKYSLFELENGRKRMLASAGELQKGNELALPSKYVNFLYLASHYEKLKGSPEDNEQKQLFVEQHKHYLDEIIEQISEFSKRVILADANLDKVLSAYNKHRDKPIREQAENIIHLFTLTNLGAPAAFKYFDTTIDRKRYTSTKEVLDATLIHQSITGLYETRIDLSQLGGDGGGGSPAPGGTLGIEDEYRLHETSTEPDVSLGSTWLSDFPQAWAETGGMGLAVRQAPLIIPLKATSTPVSIQQYPMSHEARLGIKPHIQRLLDQGILVPCQSPWNTPLLPVKKPGTNDYRPVQDLREVNKRVEDIHPTVPNPYNLLSGLPPSHQWYTVLDLKDAFFCLRLHPTSQPLFAFEWRDPGMGISGQLTWTRLPQGFKNSPTLFNEALHRDLADFRIQHPDLILLQYVDDILLAATSELDCQQGTRALLQTLGDLGYRASAKKAQICQKQVKYLGYLLREGQRWLTEARKETVMGQPVPKTPRQLREFLGTAGFCRLWIPGFAEMAAPLYPLTKPGTLFSWGPDQQKAYQEIKQALLTAPALGLPDLTKPFELFVDEKQGYAKGVLTQKLGPWRRPVAYLSKKLDPVAAGWPPCLRMVAAIAVLTKDAGKLTMGQPLVILAPHAVEALVKQPPDRWLSNARMTHYQAMLLDTDRVQFGPVVALNPATLLPLPEEGAPHDCLEILAETHGTRPDLTDQPIPDADHTWYTDGSSFLQEGQRKAGAAVTTETEVIWAGALPAGTSAQRAELIALTQALKMAEGKRLNVYTDSRYAFATAHIHGEIYRRRGWLTSEGREIKNKSEILALLKALFLPKRLSIIHCLGHQKGDSAEARGNRLADQAAREAAIKTPPDTSTLLAGKRTADGSEFEKRTADGSEFESPKKKAKVE

SEQ ID NO: 2084 - protein, 2110 aa, synthetic construct
MPAAKRVKLDGGDKKYSIGLDIGTNSVGWAVITDEYKVPSKKFKVLGNTDRHSIKKNLIGALLFDSGETAEATRLKRTARRRYTRRKNRICYLQEIFSNEMAKVDDSFFHRLEESFLVEEDKKHERHPIFGNIVDEVAYHEKYPTIYHLRKKLVDSTDKADLRLIYLALAHMIKFRGHFLIEGDLNPDNSDVDKLFIQLVQTYNQLFEENPINASGVDAKAILSARLSKSRRLENLIAQLPGEKKNGLFGNLIALSLGLTPNFKSNFDLAEDAKLQLSKDTYDDDLDNLLAQIGDQYADLFLAAKNLSDAILLSDILRVNTEITKAPLSASMIKRYDEHHQDLTLLKALVRQQLPEKYKEIFFDQSKNGYAGYIDGGASQEEFYKFIKPILEKMDGTEELLVKLNREDLLRKQRTFDNGSIPHQIHLGELHAILRRQEDFYPFLKDNREKIEKILTFRIPYYVGPLARGNSRFAWMTRKSEETITPWNFEEVVDKGASAQSFIERMTNFDKNLPNEKVLPKHSLLYEYFTVYNELTKVKYVTEGMRKPAFLSGEQKKAIVDLLFKTNRKVTVKQLKEDYFKKIECFDSVEISGVEDRFNASLGTYHDLLKIIKDKDFLDNEENEDILEDIVLTLTLFEDREMIEERLKTYAHLFDDKVMKQLKRRRYTGWGRLSRKLINGIRDKQSGKTILDFLKSDGFANRNFMQLIHDDSLTFKEDIQKAQVSGQGDSLHEHIANLAGSPAIKKGILQTVKVVDELVKVMGRHKPENIVIEMARENQTTQKGQKNSRERMKRIEEGIKELGSQILKEHPVENTQLQNEKLYLYYLQNGRDMYVDQELDINRLSDYDVDHIVPQSFLKDDSIDNKVLTRSDKARGKSDNVPSEEVVKKMKNYWRQLLNAKLITQRKFDNLTKAERGGLSELDKAGFIKRQLVETRQITKHVAQILDSRMNTKYDENDKLIREVKVITLKSKLVSDFRKDFQFYKVREINNYHHAHDAYLNAVVGTALIKKYPKLESEFVYGDYKVYDVRKMIAKSEQEIGKATAKYFFYSNIMNFFKTEITLANGEIRKRPLIETNGETGEIVWDKGRDFATVRKVLSMPQVNIVKKTEVQTGGFSKESILPKRNSDKLIARKKDWDPKKYGGFDSPTVAYSVLVVAKVEKGKSKKLKSVKELLGITIMERSSFEKNPIDFLEAKGYKEVKKDLIIKLPKYSLFELENGRKRMLASAGELQKGNELALPSKYVNFLYLASHYEKLKGSPEDNEQKQLFVEQHKHYLDEIIEQISEFSKRVILADANLDKVLSAYNKHRDKPIREQAENIIHLFTLTNLGAPAAFKYFDTTIDRKRYTSTKEVLDATLIHQSITGLYETRIDLSQLGGDGGGGGGSGGGGSGGGGSGGGGSGGGGSGGLGIEDEYRLHETSTEPDVSLGSTWLSDFPQAWAETGGMGLAVRQAPLIIPLKATSTPVSIQQYPMSHEARLGIKPHIQRLLDQGILVPCQSPWNTPLLPVKKPGTNDYRPVQDLREVNKRVEDIHPTVPNPYNLLSGLPPSHQWYTVLDLKDAFFCLRLHPTSQPLFAFEWRDPGMGISGQLTWTRLPQGFKNSPTLFNEALHRDLADFRIQHPDLILLQYVDDILLAATSELDCQQGTRALLQTLGDLGYRASAKKAQICQKQVKYLGYLLREGQRWLTEARKETVMGQPVPKTPRQLREFLGKAGFCRLFIPGFAEMAAPLYPLTKPGTLFSWGPDQQKAYQEIKQALLTAPALGLPDLTKPFELFVDEKQGYAKGVLTQKLGPWRRPVAYLSKKLDPVAAGWPPCLRMVAAIAVLTKDAGKLTMGQPLVILAPHAVEALVKQPPDRWLSNARMTHYQAMLLDTDRVQFGPVVALNPATLLPLPEEGAPHDCLEILAETHGTRPDLTDQPIPDADHTWYTDGSSFLQEGQRKAGAAVTTETEVIWAGALPAGTSAQRAELIALTQALKMAEGKRLNVYTDSRYAFATAHIHGEIYRRRGWLTSEGREIKNKSEILALLKALFLPKRLSIIHCLGHQKGDSAEARGNRLADQAAREAAIKTPPDTSTLLIAGKRTADGSEFEKRTADGSEFESPKKKAKVE

SEQ ID NO: 2085 - protein, 2105 aa, synthetic construct
MPAAKRVKLDGGDKKYSIGLDIGTNSVGWAVITDEYKVPSKKFKVLGNTDRHSIKKNLIGALLFDSGETAEATRLKRTARRRYTRRKNRICYLQEIFSNEMAKVDDSFFHRLEESFLVEEDKKHERHPIFGNIVDEVAYHEKYPTIYHLRKKLVDSTDKADLRLIYLALAHMIKFRGHFLIEGDLNPDNSDVDKLFIQLVQTYNQLFEENPINASGVDAKAILSARLSKSRRLENLIAQLPGEKKNGLFGNLIALSLGLTPNFKSNFDLAEDAKLQLSKDTYDDDLDNLLAQIGDQYADLFLAAKNLSDAILLSDILRVNTEITKAPLSASMIKRYDEHHQDLTLLKALVRQQLPEKYKEIFFDQSKNGYAGYIDGGASQEEFYKFIKPILEKMDGTEELLVKLNREDLLRKQRTFDNGSIPHQIHLGELHAILRRQEDFYPFLKDNREKIEKILTFRIPYYVGPLARGNSRFAWMTRKSEETITPWNFEEVVDKGASAQSFIERMTNFDKNLPNEKVLPKHSLLYEYFTVYNELTKVKYVTEGMRKPAFLSGEQKKAIVDLLFKTNRKVTVKQLKEDYFKKIECFDSVEISGVEDRFNASLGTYHDLLKIIKDKDFLDNEENEDILEDIVLTLTLFEDREMIEERLKTYAHLFDDKVMKQLKRRRYTGWGRLSRKLINGIRDKQSGKTILDFLKSDGFANRNFMQLIHDDSLTFKEDIQKAQVSGQGDSLHEHIANLAGSPAIKKGILQTVKVVDELVKVMGRHKPENIVIEMARENQTTQKGQKNSRERMKRIEEGIKELGSQILKEHPVENTQLQNEKLYLYYLQNGRDMYVDQELDINRLSDYDVDHIVPQSFLKDDSIDNKVLTRSDKARGKSDNVPSEEVVKKMKNYWRQLLNAKLITQRKFDNLTKAERGGLSELDKAGFIKRQLVETRQITKHVAQILDSRMNTKYDENDKLIREVKVITLKSKLVSDFRKDFQFYKVREINNYHHAHDAYLNAVVGTALIKKYPKLESEFVYGDYKVYDVRKMIAKSEQEIGKATAKYFFYSNIMNFFKTEITLANGEIRKRPLIETNGETGEIVWDKGRDFATVRKVLSMPQVNIVKKTEVQTGGFSKESILPKRNSDKLIARKKDWDPKKYGGFDSPTVAYSVLVVAKVEKGKSKKLKSVKELLGITIMERSSFEKNPIDFLEAKGYKEVKKDLIIKLPKYSLFELENGRKRMLASAGELQKGNELALPSKYVNFLYLASHYEKLKGSPEDNEQKQLFVEQHKHYLDEIIEQISEFSKRVILADANLDKVLSAYNKHRDKPIREQAENIIHLFTLTNLGAPAAFKYFDTTIDRKRYTSTKEVLDATLIHQSITGLYETRIDLSQLGGDGGGGGGSGGGGSGGGGSGGGGSGGLGIEDEYRLHETSTEPDVSLGSTWLSDFPQAWAETGGMGLAVRQAPLIIPLKATSTPVSIQQYPMSHEARLGIKPHIQRLLDQGILVPCQSPWNTPLLPVKKPGTNDYRPVQDLREVNKRVEDIHPTVPNPYNLLSGLPPSHQWYTVLDLKDAFFCLRLHPTSQPLFAFEWRDPGMGISGQLTWTRLPQGFKNSPTLFNEALHRDLADFRIQHPDLILLQYVDDILLAATSELDCQQGTRALLQTLGDLGYRASAKKAQICQKQVKYLGYLLREGQRWLTEARKETVMGQPVPKTPRQLREFLGKAGFCRLFIPGFAEMAAPLYPLTKPGTLFSWGPDQQKAYQEIKQALLTAPALGLPDLTKPFELFVDEKQGYAKGVLTQKLGPWRRPVAYLSKKLDPVAAGWPPCLRMVAAIAVLTKDAGKLTMGQPLVILAPHAVEALVKQPPDRWLSNARMTHYQAMLLDTDRVQFGPVVALNPATLLPLPEEGAPHDCLEILAETHGTRPDLTDQPIPDADHTWYTDGSSFLQEGQRKAGAAVTTETEVIWAGALPAGTSAQRAELIALTQALKMAEGKRLNVYTDSRYAFATAHIHGEIYRRRGWLTSEGREIKNKSEILALLKALFLPKRLSIIHCLGHQKGDSAEARGNRLADQAAREAAIKTPPDTSTLLIAGKRTADGSEFEKRTADGSEFESPKKKAKVE

SEQ ID NO: 2086 - protein, 2110 aa, synthetic construct
MPAAKRVKLDGGDKKYSIGLDIGTNSVGWAVITDEYKVPSKKFKVLGNTDRHSIKKNLIGALLFDSGETAEATRLKRTARRRYTRRKNRICYLQEIFSNEMAKVDDSFFHRLEESFLVEEDKKHERHPIFGNIVDEVAYHEKYPTIYHLRKKLVDSTDKADLRLIYLALAHMIKFRGHFLIEGDLNPDNSDVDKLFIQLVQTYNQLFEENPINASGVDAKAILSARLSKSRRLENLIAQLPGEKKNGLFGNLIALSLGLTPNFKSNFDLAEDAKLQLSKDTYDDDLDNLLAQIGDQYADLFLAAKNLSDAILLSDILRVNTEITKAPLSASMIKRYDEHHQDLTLLKALVRQQLPEKYKEIFFDQSKNGYAGYIDGGASQEEFYKFIKPILEKMDGTEELLVKLNREDLLRKQRTFDNGSIPHQIHLGELHAILRRQEDFYPFLKDNREKIEKILTFRIPYYVGPLARGNSRFAWMTRKSEETITPWNFEEVVDKGASAQSFIERMTNFDKNLPNEKVLPKHSLLYEYFTVYNELTKVKYVTEGMRKPAFLSGEQKKAIVDLLFKTNRKVTVKQLKEDYFKKIECFDSVEISGVEDRFNASLGTYHDLLKIIKDKDFLDNEENEDILEDIVLTLTLFEDREMIEERLKTYAHLFDDKVMKQLKRRRYTGWGRLSRKLINGIRDKQSGKTILDFLKSDGFANRNFMQLIHDDSLTFKEDIQKAQVSGQGDSLHEHIANLAGSPAIKKGILQTVKVVDELVKVMGRHKPENIVIEMARENQTTQKGQKNSRERMKRIEEGIKELGSQILKEHPVENTQLQNEKLYLYYLQNGRDMYVDQELDINRLSDYDVDHIVPQSFLKDDSIDNKVLTRSDKARGKSDNVPSEEVVKKMKNYWRQLLNAKLITQRKFDNLTKAERGGLSELDKAGFIKRQLVETRQITKHVAQILDSRMNTKYDENDKLIREVKVITLKSKLVSDFRKDFQFYKVREINNYHHAHDAYLNAVVGTALIKKYPKLESEFVYGDYKVYDVRKMIAKSEQEIGKATAKYFFYSNIMNFFKTEITLANGEIRKRPLIETNGETGEIVWDKGRDFATVRKVLSMPQVNIVKKTEVQTGGFSKESILPKRNSDKLIARKKDWDPKKYGGFDSPTVAYSVLVVAKVEKGKSKKLKSVKELLGITIMERSSFEKNPIDFLEAKGYKEVKKDLIIKLPKYSLFELENGRKRMLASAGELQKGNELALPSKYVNFLYLASHYEKLKGSPEDNEQKQLFVEQHKHYLDEIIEQISEFSKRVILADANLDKVLSAYNKHRDKPIREQAENIIHLFTLTNLGAPAAFKYFDTTIDRKRYTSTKEVLDATLIHQSITGLYETRIDLSQLGGDGGEAAAKEAAAKEAAAKEAAAKEAAAKGGLGIEDEYRLHETSTEPDVSLGSTWLSDFPQAWAETGGMGLAVRQAPLIIPLKATSTPVSIQQYPMSHEARLGIKPHIQRLLDQGILVPCQSPWNTPLLPVKKPGTNDYRPVQDLREVNKRVEDIHPTVPNPYNLLSGLPPSHQWYTVLDLKDAFFCLRLHPTSQPLFAFEWRDPGMGISGQLTWTRLPQGFKNSPTLFNEALHRDLADFRIQHPDLILLQYVDDILLAATSELDCQQGTRALLQTLGDLGYRASAKKAQICQKQVKYLGYLLREGQRWLTEARKETVMGQPVPKTPRQLREFLGKAGFCRLFIPGFAEMAAPLYPLTKPGTLFSWGPDQQKAYQEIKQALLTAPALGLPDLTKPFELFVDEKQGYAKGVLTQKLGPWRRPVAYLSKKLDPVAAGWPPCLRMVAAIAVLTKDAGKLTMGQPLVILAPHAVEALVKQPPDRWLSNARMTHYQAMLLDTDRVQFGPVVALNPATLLPLPEEGAPHDCLEILAETHGTRPDLTDQPIPDADHTWYTDGSSFLQEGQRKAGAAVTTETEVIWAGALPAGTSAQRAELIALTQALKMAEGKRLNVYTDSRYAFATAHIHGEIYRRRGWLTSEGREIKNKSEILALLKALFLPKRLSIIHCLGHQKGDSAEARGNRLADQAAREAAIKTPPDTSTLLIAGKRTADGSEFEKRTADGSEFESPKKKAKVE

SEQ ID NO: 2087 - protein, 2098 aa, synthetic construct
MPAAKRVKLDGGDKKYSIGLDIGTNSVGWAVITDEYKVPSKKFKVLGNTDRHSIKKNLIGALLFDSGETAEATRLKRTARRRYTRRKNRICYLQEIFSNEMAKVDDSFFHRLEESFLVEEDKKHERHPIFGNIVDEVAYHEKYPTIYHLRKKLVDSTDKADLRLIYLALAHMIKFRGHFLIEGDLNPDNSDVDKLFIQLVQTYNQLFEENPINASGVDAKAILSARLSKSRRLENLIAQLPGEKKNGLFGNLIALSLGLTPNFKSNFDLAEDAKLQLSKDTYDDDLDNLLAQIGDQYADLFLAAKNLSDAILLSDILRVNTEITKAPLSASMIKRYDEHHQDLTLLKALVRQQLPEKYKEIFFDQSKNGYAGYIDGGASQEEFYKFIKPILEKMDGTEELLVKLNREDLLRKQRTFDNGSIPHQIHLGELHAILRRQEDFYPFLKDNREKIEKILTFRIPYYVGPLARGNSRFAWMTRKSEETITPWNFEEVVDKGASAQSFIERMTNFDKNLPNEKVLPKHSLLYEYFTVYNELTKVKYVTEGMRKPAFLSGEQKKAIVDLLFKTNRKVTVKQLKEDYFKKIECFDSVEISGVEDRFNASLGTYHDLLKIIKDKDFLDNEENEDILEDIVLTLTLFEDREMIEERLKTYAHLFDDKVMKQLKRRRYTGWGRLSRKLINGIRDKQSGKTILDFLKSDGFANRNFMQLIHDDSLTFKEDIQKAQVSGQGDSLHEHIANLAGSPAIKKGILQTVKVVDELVKVMGRHKPENIVIEMARENQTTQKGQKNSRERMKRIEEGIKELGSQILKEHPVENTQLQNEKLYLYYLQNGRDMYVDQELDINRLSDYDVDHIVPQSFLKDDSIDNKVLTRSDKARGKSDNVPSEEVVKKMKNYWRQLLNAKLITQRKFDNLTKAERGGLSELDKAGFIKRQLVETRQITKHVAQILDSRMNTKYDENDKLIREVKVITLKSKLVSDFRKDFQFYKVREINNYHHAHDAYLNAVVGTALIKKYPKLESEFVYGDYKVYDVRKMIAKSEQEIGKATAKYFFYSNIMNFFKTEITLANGEIRKRPLIETNGETGEIVWDKGRDFATVRKVLSMPQVNIVKKTEVQTGGFSKESILPKRNSDKLIARKKDWDPKKYGGFDSPTVAYSVLVVAKVEKGKSKKLKSVKELLGITIMERSSFEKNPIDFLEAKGYKEVKKDLIIKLPKYSLFELENGRKRMLASAGELQKGNELALPSKYVNFLYLASHYEKLKGSPEDNEQKQLFVEQHKHYLDEIIEQISEFSKRVILADANLDKVLSAYNKHRDKPIREQAENIIHLFTLTNLGAPAAFKYFDTTIDRKRYTSTKEVLDATLIHQSITGLYETRIDLSQLGGDGGPAPAPAPAPAPAPGGLGIEDEYRLHETSTEPDVSLGSTWLSDFPQAWAETGGMGLAVRQAPLIIPLKATSTPVSIQQYPMSHEARLGIKPHIQRLLDQGILVPCQSPWNTPLLPVKKPGTNDYRPVQDLREVNKRVEDIHPTVPNPYNLLSGLPPSHQWYTVLDLKDAFFCLRLHPTSQPLFAFEWRDPGMGISGQLTWTRLPQGFKNSPTLFNEALHRDLADFRIQHPDLILLQYVDDILLAATSELDCQQGTRALLQTLGDLGYRASAKKAQICQKQVKYLGYLLREGQRWLTEARKETVMGQPVPKTPRQLREFLGKAGFCRLFIPGFAEMAAPLYPLTKPGTLFSWGPDQQKAYQEIKQALLTAPALGLPDLTKPFELFVDEKQGYAKGVLTQKLGPWRRPVAYLSKKLDPVAAGWPPCLRMVAAIAVLTKDAGKLTMGQPLVILAPHAVEALVKQPPDRWLSNARMTHYQAMLLDTDRVQFGPVVALNPATLLPLPEEGAPHDCLEILAETHGTRPDLTDQPIPDADHTWYTDGSSFLQEGQRKAGAAVTTETEVIWAGALPAGTSAQRAELIALTQALKMAEGKRLNVYTDSRYAFATAHIHGEIYRRRGWLTSEGREIKNKSEILALLKALFLPKRLSIIHCLGHQKGDSAEARGNRLADQAAREAAIKTPPDTSTLLIAGKRTADGSEFEKRTADGSEFESPKKKAKVE

SEQ ID NO: 2088 - protein, 2131 aa, synthetic construct
MPAAKRVKLDGGDKKYSIGLDIGTNSVGWAVITDEYKVPSKKFKVLGNTDRHSIKKNLIGALLFDSGETAEATRLKRTARRRYTRRKNRICYLQEIFSNEMAKVDDSFFHRLEESFLVEEDKKHERHPIFGNIVDEVAYHEKYPTIYHLRKKLVDSTDKADLRLIYLALAHMIKFRGHFLIEGDLNPDNSDVDKLFIQLVQTYNQLFEENPINASGVDAKAILSARLSKSRRLENLIAQLPGEKKNGLFGNLIALSLGLTPNFKSNFDLAEDAKLQLSKDTYDDDLDNLLAQIGDQYADLFLAAKNLSDAILLSDILRVNTEITKAPLSASMIKRYDEHHQDLTLLKALVRQQLPEKYKEIFFDQSKNGYAGYIDGGASQEEFYKFIKPILEKMDGTEELLVKLNREDLLRKQRTFDNGSIPHQIHLGELHAILRRQEDFYPFLKDNREKIEKILTFRIPYYVGPLARGNSRFAWMTRKSEETITPWNFEEVVDKGASAQSFIERMTNFDKNLPNEKVLPKHSLLYEYFTVYNELTKVKYVTEGMRKPAFLSGEQKKAIVDLLFKTNRKVTVKQLKEDYFKKIECFDSVEISGVEDRFNASLGTYHDLLKIIKDKDFLDNEENEDILEDIVLTLTLFEDREMIEERLKTYAHLFDDKVMKQLKRRRYTGWGRLSRKLINGIRDKQSGKTILDFLKSDGFANRNFMQLIHDDSLTFKEDIQKAQVSGQGDSLHEHIANLAGSPAIKKGILQTVKVVDELVKVMGRHKPENIVIEMARENQTTQKGQKNSRERMKRIEEGIKELGSQILKEHPVENTQLQNEKLYLYYLQNGRDMYVDQELDINRLSDYDVDHIVPQSFLKDDSIDNKVLTRSDKARGKSDNVPSEEVVKKMKNYWRQLLNAKLITQRKFDNLTKAERGGLSELDKAGFIKRQLVETRQITKHVAQILDSRMNTKYDENDKLIREVKVITLKSKLVSDFRKDFQFYKVREINNYHHAHDAYLNAVVGTALIKKYPKLESEFVYGDYKVYDVRKMIAKSEQEIGKATAKYFFYSNIMNFFKTEITLANGEIRKRPLIETNGETGEIVWDKGRDFATVRKVLSMPQVNIVKKTEVQTGGFSKESILPKRNSDKLIARKKDWDPKKYGGFDSPTVAYSVLVVAKVEKGKSKKLKSVKELLGITIMERSSFEKNPIDFLEAKGYKEVKKDLIIKLPKYSLFELENGRKRMLASAGELQKGNELALPSKYVNFLYLASHYEKLKGSPEDNEQKQLFVEQHKHYLDEIIEQISEFSKRVILADANLDKVLSAYNKHRDKPIREQAENIIHLFTLTNLGAPAAFKYFDTTIDRKRYTSTKEVLDATLIHQSITGLYETRIDLSQLGGDGGAEAAAKEAAAKEAAAKEAAAKALEAEAAAKEAAAKEAAAKEAAAKAGGLGIEDEYRLHETSTEPDVSLGSTWLSDFPQAWAETGGMGLAVRQAPLIIPLKATSTPVSIQQYPMSHEARLGIKPHIQRLLDQGILVPCQSPWNTPLLPVKKPGTNDYRPVQDLREVNKRVEDIHPTVPNPYNLLSGLPPSHQWYTVLDLKDAFFCLRLHPTSQPLFAFEWRDPGMGISGQLTWTRLPQGFKNSPTLFNEALHRDLADFRIQHPDLILLQYVDDILLAATSELDCQQGTRALLQTLGDLGYRASAKKAQICQKQVKYLGYLLREGQRWLTEARKETVMGQPVPKTPRQLREFLGKAGFCRLFIPGFAEMAAPLYPLTKPGTLFSWGPDQQKAYQEIKQALLTAPALGLPDLTKPFELFVDEKQGYAKGVLTQKLGPWRRPVAYLSKKLDPVAAGWPPCLRMVAAIAVLTKDAGKLTMGQPLVILAPHAVEALVKQPPDRWLSNARMTHYQAMLLDTDRVQFGPVVALNPATLLPLPEEGAPHDCLEILAETHGTRPDLTDQPIPDADHTWYTDGSSFLQEGQRKAGAAVTTETEVIWAGALPAGTSAQRAELIALTQALKMAEGKRLNVYTDSRYAFATAHIHGEIYRRRGWLTSEGREIKNKSEILALLKALFLPKRLSIIHCLGHQKGDSAEARGNRLADQAAREAAIKTPPDTSTLLIAGKRTADGSEFEKRTADGSEFESPKKKAKVE

SEQ ID NO: 2089 - protein, 2096 aa, synthetic construct; identical to SEQ ID NO: 2050

SEQ ID NO: 2090 - protein, 2100 aa, synthetic construct; identical to SEQ ID NO: 2049

SEQ ID NO: 2091 - protein, 2094 aa, synthetic construct
MPAAKRVKLDGGDKKYSIGLDIGTNSVGWAVITDEYKVPSKKFKVLGNTDRHSIKKNLIGALLFDSGETAEATRLKRTARRRYTRRKNRICYLQEIFSNEMAKVDDSFFHRLEESFLVEEDKKHERHPIFGNIVDEVAYHEKYPTIYHLRKKLVDSTDKADLRLIYLALAHMIKFRGHFLIEGDLNPDNSDVDKLFIQLVQTYNQLFEENPINASGVDAKAILSARLSKSRRLENLIAQLPGEKKNGLFGNLIALSLGLTPNFKSNFDLAEDAKLQLSKDTYDDDLDNLLAQIGDQYADLFLAAKNLSDAILLSDILRVNTEITKAPLSASMIKRYDEHHQDLTLLKALVRQQLPEKYKEIFFDQSKNGYAGYIDGGASQEEFYKFIKPILEKMDGTEELLVKLNREDLLRKQRTFDNGSIPHQIHLGELHAILRRQEDFYPFLKDNREKIEKILTFRIPYYVGPLARGNSRFAWMTRKSEETITPWNFEEVVDKGASAQSFIERMTNFDKNLPNEKVLPKHSLLYEYFTVYNELTKVKYVTEGMRKPAFLSGEQKKAIVDLLFKTNRKVTVKQLKEDYFKKIECFDSVEISGVEDRFNASLGTYHDLLKIIKDKDFLDNEENEDILEDIVLTLTLFEDREMIEERLKTYAHLFDDKVMKQLKRRRYTGWGRLSRKLINGIRDKQSGKTILDFLKSDGFANRNFMQLIHDDSLTFKEDIQKAQVSGQGDSLHEHIANLAGSPAIKKGILQTVKVVDELVKVMGRHKPENIVIEMARENQTTQKGQKNSRERMKRIEEGIKELGSQILKEHPVENTQLQNEKLYLYYLQNGRDMYVDQELDINRLSDYDVDHIVPQSFLKDDSIDNKVLTRSDKARGKSDNVPSEEVVKKMKNYWRQLLNAKLITQRKFDNLTKAERGGLSELDKAGFIKRQLVETRQITKHVAQILDSRMNTKYDENDKLIREVKVITLKSKLVSDFRKDFQFYKVREINNYHHAHDAYLNAVVGTALIKKYPKLESEFVYGDYKVYDVRKMIAKSEQEIGKATAKYFFYSNIMNFFKTEITLANGEIRKRPLIETNGETGEIVWDKGRDFATVRKVLSMPQVNIVKKTEVQTGGFSKESILPKRNSDKLIARKKDWDPKKYGGFDSPTVAYSVLVVAKVEKGKSKKLKSVKELLGITIMERSSFEKNPIDFLEAKGYKEVKKDLIIKLPKYSLFELENGRKRMLASAGELQKGNELALPSKYVNFLYLASHYEKLKGSPEDNEQKQLFVEQHKHYLDEIIEQISEFSKRVILADANLDKVLSAYNKHRDKPIREQAENIIHLFTLTNLGAPAAFKYFDTTIDRKRYTSTKEVLDATLIHQSITGLYETRIDLSQLGGDGGPAPGSSGGGGGLGIEDEYRLHETSTEPDVSLGSTWLSDFPQAWAETGGMGLAVRQAPLIIPLKATSTPVSIQQYPMSHEARLGIKPHIQRLLDQGILVPCQSPWNTPLLPVKKPGTNDYRPVQDLREVNKRVEDIHPTVPNPYNLLSGLPPSHQWYTVLDLKDAFFCLRLHPTSQPLFAFEWRDPGMGISGQLTWTRLPQGFKNSPTLFNEALHRDLADFRIQHPDLILLQYVDDILLAATSELDCQQGTRALLQTLGDLGYRASAKKAQICQKQVKYLGYLLREGQRWLTEARKETVMGQPVPKTPRQLREFLGKAGFCRLFIPGFAEMAAPLYPLTKPGTLFSWGPDQQKAYQEIKQALLTAPALGLPDLTKPFELFVDEKQGYAKGVLTQKLGPWRRPVAYLSKKLDPVAAGWPPCLRMVAAIAVLTKDAGKLTMGQPLVILAPHAVEALVKQPPDRWLSNARMTHYQAMLLDTDRVQFGPVVALNPATLLPLPEEGAPHDCLEILAETHGTRPDLTDQPIPDADHTWYTDGSSFLQEGQRKAGAAVTTETEVIWAGALPAGTSAQRAELIALTQALKMAEGKRLNVYTDSRYAFATAHIHGEIYRRRGWLTSEGREIKNKSEILALLKALFLPKRLSIIHCLGHQKGDSAEARGNRLADQAAREAAIKTPPDTSTLLIAGKRTADGSEFEKRTADGSEFESPKKKAKVE

SEQ ID NO: 2092 - protein, 2105 aa, synthetic construct
MPAAKRVKLDGGDKKYSIGLDIGTNSVGWAVITDEYKVPSKKFKVLGNTDRHSIKKNLIGALLFDSGETAEATRLKRTARRRYTRRKNRICYLQEIFSNEMAKVDDSFFHRLEESFLVEEDKKHERHPIFGNIVDEVAYHEKYPTIYHLRKKLVDSTDKADLRLIYLALAHMIKFRGHFLIEGDLNPDNSDVDKLFIQLVQTYNQLFEENPINASGVDAKAILSARLSKSRRLENLIAQLPGEKKNGLFGNLIALSLGLTPNFKSNFDLAEDAKLQLSKDTYDDDLDNLLAQIGDQYADLFLAAKNLSDAILLSDILRVNTEITKAPLSASMIKRYDEHHQDLTLLKALVRQQLPEKYKEIFFDQSKNGYAGYIDGGASQEEFYKFIKPILEKMDGTEELLVKLNREDLLRKQRTFDNGSIPHQIHLGELHAILRRQEDFYPFLKDNREKIEKILTFRIPYYVGPLARGNSRFAWMTRKSEETITPWNFEEVVDKGASAQSFIERMTNFDKNLPNEKVLPKHSLLYEYFTVYNELTKVKYVTEGMRKPAFLSGEQKKAIVDLLFKTNRKVTVKQLKEDYFKKIECFDSVEISGVEDRFNASLGTYHDLLKIIKDKDFLDNEENEDILEDIVLTLTLFEDREMIEERLKTYAHLFDDKVMKQLKRRRYTGWGRLSRKLINGIRDKQSGKTILDFLKSDGFANRNFMQLIHDDSLTFKEDIQKAQVSGQGDSLHEHIANLAGSPAIKKGILQTVKVVDELVKVMGRHKPENIVIEMARENQTTQKGQKNSRERMKRIEEGIKELGSQILKEHPVENTQLQNEKLYLYYLQNGRDMYVDQELDINRLSDYDVDHIVPQSFLKDDSIDNKVLTRSDKARGKSDNVPSEEVVKKMKNYWRQLLNAKLITQRKFDNLTKAERGGLSELDKAGFIKRQLVETRQITKHVAQILDSRMNTKYDENDKLIREVKVITLKSKLVSDFRKDFQFYKVREINNYHHAHDAYLNAVVGTALIKKYPKLESEFVYGDYKVYDVRKMIAKSEQEIGKATAKYFFYSNIMNFFKTEITLANGEIRKRPLIETNGETGEIVWDKGRDFATVRKVLSMPQVNIVKKTEVQTGGFSKESILPKRNSDKLIARKKDWDPKKYGGFDSPTVAYSVLVVAKVEKGKSKKLKSVKELLGITIMERSSFEKNPIDFLEAKGYKEVKKDLIIKLPKYSLFELENGRKRMLASAGELQKGNELALPSKYVNFLYLASHYEKLKGSPEDNEQKQLFVEQHKHYLDEIIEQISEFSKRVILADANLDKVLSAYNKHRDKPIREQAENIIHLFTLTNLGAPAAFKYFDTTIDRKRYTSTKEVLDATLIHQSITGLYETRIDLSQLGGDGGEAAAKEAAAKEAAAKEAAAKGGLGIEDEYRLHETSTEPDVSLGSTWLSDFPQAWAETGGMGLAVRQAPLIIPLKATSTPVSIQQYPMSHEARLGIKPHIQRLLDQGILVPCQSPWNTPLLPVKKPGTNDYRPVQDLREVNKRVEDIHPTVPNPYNLLSGLPPSHQWYTVLDLKDAFFCLRLHPTSQPLFAFEWRDPGMGISGQLTWTRLPQGFKNSPTLFNEALHRDLADFRIQHPDLILLQYVDDILLAATSELDCQQGTRALLQTLGDLGYRASAKKAQICQKQVKYLGYLLREGQRWLTEARKETVMGQPVPKTPRQLREFLGKAGFCRLFIPGFAEMAAPLYPLTKPGTLFSWGPDQQKAYQEIKQALLTAPALGLPDLTKPFELFVDEKQGYAKGVLTQKLGPWRRPVAYLSKKLDPVAAGWPPCLRMVAAIAVLTKDAGKLTMGQPLVILAPHAVEALVKQPPDRWLSNARMTHYQAMLLDTDRVQFGPVVALNPATLLPLPEEGAPHDCLEILAETHGTRPDLTDQPIPDADHTWYTDGSSFLQEGQRKAGAAVTTETEVIWAGALPAGTSAQRAELIALTQALKMAEGKRLNVYTDSRYAFATAHIHGEIYRRRGWLTSEGREIKNKSEILALLKALFLPKRLSIIHCLGHQKGDSAEARGNRLADQAAREAAIKTPPDTSTLLIAGKRTADGSEFEKRTADGSEFESPKKKAKVE

SEQ ID NO: 2093 - protein, 2096 aa, synthetic construct; identical to SEQ ID NO: 2048

SEQ ID NO: 2094 - protein, 2115 aa, synthetic construct
MPAAKRVKLDGGDKKYSIGLDIGTNSVGWAVITDEYKVPSKKFKVLGNTDRHSIKKNLIGALLFDSGETAEATRLKRTARRRYTRRKNRICYLQEIFSNEMAKVDDSFFHRLEESFLVEEDKKHERHPIFGNIVDEVAYHEKYPTIYHLRKKLVDSTDKADLRLIYLALAHMIKFRGHFLIEGDLNPDNSDVDKLFIQLVQTYNQLFEENPINASGVDAKAILSARLSKSRRLENLIAQLPGEKKNGLFGNLIALSLGLTPNFKSNFDLAEDAKLQLSKDTYDDDLDNLLAQIGDQYADLFLAAKNLSDAILLSDILRVNTEITKAPLSASMIKRYDEHHQDLTLLKALVRQQLPEKYKEIFFDQSKNGYAGYIDGGASQEEFYKFIKPILEKMDGTEELLVKLNREDLLRKQRTFDNGSIPHQIHLGELHAILRRQEDFYPFLKDNREKIEKILTFRIPYYVGPLARGNSRFAWMTRKSEETITPWNFEEVVDKGASAQSFIERMTNFDKNLPNEKVLPKHSLLYEYFTVYNELTKVKYVTEGMRKPAFLSGEQKKAIVDLLFKTNRKVTVKQLKEDYFKKIECFDSVEISGVEDRFNASLGTYHDLLKIIKDKDFLDNEENEDILEDIVLTLTLFEDREMIEERLKTYAHLFDDKVMKQLKRRRYTGWGRLSRKLINGIRDKQSGKTILDFLKSDGFANRNFMQLIHDDSLTFKEDIQKAQVSGQGDSLHEHIANLAGSPAIKKGILQTVKVVDELVKVMGRHKPENIVIEMARENQTTQKGQKNSRERMKRIEEGIKELGSQILKEHPVENTQLQNEKLYLYYLQNGRDMYVDQELDINRLSDYDVDHIVPQSFLKDDSIDNKVLTRSDKARGKSDNVPSEEVVKKMKNYWRQLLNAKLITQRKFDNLTKAERGGLSELDKAGFIKRQLVETRQITKHVAQILDSRMNTKYDENDKLIREVKVITLKSKLVSDFRKDFQFYKVREINNYHHAHDAYLNAVVGTALIKKYPKLESEFVYGDYKVYDVRKMIAKSEQEIGKATAKYFFYSNIMNFFKTEITLANGEIRKRPLIETNGETGEIVWDKGRDFATVRKVLSMPQVNIVKKTEVQTGGFSKESILPKRNSDKLIARKKDWDPKKYGGFDSPTVAYSVLVVAKVEKGKSKKLKSVKELLGITIMERSSFEKNPIDFLEAKGYKEVKKDLIIKLPKYSLFELENGRKRMLASAGELQKGNELALPSKYVNFLYLASHYEKLKGSPEDNEQKQLFVEQHKHYLDEIIEQISEFSKRVILADANLDKVLSAYNKHRDKPIREQAENIIHLFTLTNLGAPAAFKYFDTTIDRKRYTSTKEVLDATLIHQSITGLYETRIDLSQLGGDGGGGGGSGGGGSGGGGSGGGGSGGGGSGGGGSGGLGIEDEYRLHETSTEPDVSLGSTWLSDFPQAWAETGGMGLAVRQAPLIIPLKATSTPVSIQQYPMSHEARLGIKPHIQRLLDQGILVPCQSPWNTPLLPVKKPGTNDYRPVQDLREVNKRVEDIHPTVPNPYNLLSGLPPSHQWYTVLDLKDAFFCLRLHPTSQPLFAFEWRDPGMGISGQLTWTRLPQGFKNSPTLFNEALHRDLADFRIQHPDLILLQYVDDILLAATSELDCQQGTRALLQTLGDLGYRASAKKAQICQKQVKYLGYLLREGQRWLTEARKETVMGQPVPKTPRQLREFLGKAGFCRLFIPGFAEMAAPLYPLTKPGTLFSWGPDQQKAYQEIKQALLTAPALGLPDLTKPFELFVDEKQGYAKGVLTQKLGPWRRPVAYLSKKLDPVAAGWPPCLRMVAAIAVLTKDAGKLTMGQPLVILAPHAVEALVKQPPDRWLSNARMTHYQAMLLDTDRVQFGPVVALNPATLLPLPEEGAPHDCLEILAETHGTRPDLTDQPIPDADHTWYTDGSSFLQEGQRKAGAAVTTETEVIWAGALPAGTSAQRAELIALTQALKMAEGKRLNVYTDSRYAFATAHIHGEIYRRRGWLTSEGREIKNKSEILALLKALFLPKRLSIIHCLGHQKGDSAEARGNRLADQAAREAAIKTPPDTSTLLIAGKRTADGSEFEKRTADGSEFESPKKKAKVE

SEQ ID NO: 2095 - protein, 2096 aa, synthetic construct
MPAAKRVKLDGGDKKYSIGLDIGTNSVGWAVITDEYKVPSKKFKVLGNTDRHSIKKNLIGALLFDSGETAEATRLKRTARRRYTRRKNRICYLQEIFSNEMAKVDDSFFHRLEESFLVEEDKKHERHPIFGNIVDEVAYHEKYPTIYHLRKKLVDSTDKADLRLIYLALAHMIKFRGHFLIEGDLNPDNSDVDKLFIQLVQTYNQLFEENPINASGVDAKAILSARLSKSRRLENLIAQLPGEKKNGLFGNLIALSLGLTPNFKSNFDLAEDAKLQLSKDTYDDDLDNLLAQIGDQYADLFLAAKNLSDAILLSDILRVNTEITKAPLSASMIKRYDEHHQDLTLLKALVRQQLPEKYKEIFFDQSKNGYAGYIDGGASQEEFYKFIKPILEKMDGTEELLVKLNREDLLRKQRTFDNGSIPHQIHLGELHAILRRQEDFYPFLKDNREKIEKILTFRIPYYVGPLARGNSRFAWMTRKSEETITPWNFEEVVDKGASAQSFIERMTNFDKNLPNEKVLPKHSLLYEYFTVYNELTKVKYVTEGMRKPAFLSGEQKKAIVDLLFKTNRKVTVKQLKEDYFKKIECFDSVEISGVEDRFNASLGTYHDLLKIIKDKDFLDNEENEDILEDIVLTLTLFEDREMIEERLKTYAHLFDDKVMKQLKRRRYTGWGRLSRKLINGIRDKQSGKTILDFLKSDGFANRNFMQLIHDDSLTFKEDIQKAQVSGQGDSLHEHIANLAGSPAIKKGILQTVKVVDELVKVMGRHKPENIVIEMARENQTTQKGQKNSRERMKRIEEGIKELGSQILKEHPVENTQLQNEKLYLYYLQNGRDMYVDQELDINRLSDYDVDHIVPQSFLKDDSIDNKVLTRSDKARGKSDNVPSEEVVKKMKNYWRQLLNAKLITQRKFDNLTKAERGGLSELDKAGFIKRQLVETRQITKHVAQILDSRMNTKYDENDKLIREVKVITLKSKLVSDFRKDFQFYKVREINNYHHAHDAYLNAVVGTALIKKYPKLESEFVYGDYKVYDVRKMIAKSEQEIGKATAKYFFYSNIMNFFKTEITLANGEIRKRPLIETNGETGEIVWDKGRDFATVRKVLSMPQVNIVKKTEVQTGGFSKESILPKRNSDKLIARKKDWDPKKYGGFDSPTVAYSVLVVAKVEKGKSKKLKSVKELLGITIMERSSFEKNPIDFLEAKGYKEVKKDLIIKLPKYSLFELENGRKRMLASAGELQKGNELALPSKYVNFLYLASHYEKLKGSPEDNEQKQLFVEQHKHYLDEIIEQISEFSKRVILADANLDKVLSAYNKHRDKPIREQAENIIHLFTLTNLGAPAAFKYFDTTIDRKRYTSTKEVLDATLIHQSITGLYETRIDLSQLGGDGGPAPEAAAKGSSGGLGIEDEYRLHETSTEPDVSLGSTWLSDFPQAWAETGGMGLAVRQAPLIIPLKATSTPVSIQQYPMSHEARLGIKPHIQRLLDQGILVPCQSPWNTPLLPVKKPGTNDYRPVQDLREVNKRVEDIHPTVPNPYNLLSGLPPSHQWYTVLDLKDAFFCLRLHPTSQPLFAFEWRDPGMGISGQLTWTRLPQGFKNSPTLFNEALHRDLADFRIQHPDLILLQYVDDILLAATSELDCQQGTRALLQTLGDLGYRASAKKAQICQKQVKYLGYLLREGQRWLTEARKETVMGQPVPKTPRQLREFLGKAGFCRLFIPGFAEMAAPLYPLTKPGTLFSWGPDQQKAYQEIKQALLTAPALGLPDLTKPFELFVDEKQGYAKGVLTQKLGPWRRPVAYLSKKLDPVAAGWPPCLRMVAAIAVLTKDAGKLTMGQPLVILAPHAVEALVKQPPDRWLSNARMTHYQAMLLDTDRVQFGPVVALNPATLLPLPEEGAPHDCLEILAETHGTRPDLTDQPIPDADHTWYTDGSSFLQEGQRKAGAAVTTETEVIWAGALPAGTSAQRAELIALTQALKMAEGKRLNVYTDSRYAFATAHIHGEIYRRRGWLTSEGREIKNKSEILALLKALFLPKRLSIIHCLGHQKGDSAEARGNRLADQAAREAAIKTPPDTSTLLIAGKRTADGSEFEKRTADGSEFESPKKKAKVE

SEQ ID NO: 2096 - protein, 2090 aa, synthetic construct
MPAAKRVKLDGGDKKYSIGLDIGTNSVGWAVITDEYKVPSKKFKVLGNTDRHSIKKNLIGALLFDSGETAEATRLKRTARRRYTRRKNRICYLQEIFSNEMAKVDDSFFHRLEESFLVEEDKKHERHPIFGNIVDEVAYHEKYPTIYHLRKKLVDSTDKADLRLIYLALAHMIKFRGHFLIEGDLNPDNSDVDKLFIQLVQTYNQLFEENPINASGVDAKAILSARLSKSRRLENLIAQLPGEKKNGLFGNLIALSLGLTPNFKSNFDLAEDAKLQLSKDTYDDDLDNLLAQIGDQYADLFLAAKNLSDAILLSDILRVNTEITKAPLSASMIKRYDEHHQDLTLLKALVRQQLPEKYKEIFFDQSKNGYAGYIDGGASQEEFYKFIKPILEKMDGTEELLVKLNREDLLRKQRTFDNGSIPHQIHLGELHAILRRQEDFYPFLKDNREKIEKILTFRIPYYVGPLARGNSRFAWMTRKSEETITPWNFEEVVDKGASAQSFIERMTNFDKNLPNEKVLPKHSLLYEYFTVYNELTKVKYVTEGMRKPAFLSGEQKKAIVDLLFKTNRKVTVKQLKEDYFKKIECFDSVEISGVEDRFNASLGTYHDLLKIIKDKDFLDNEENEDILEDIVLTLTLFEDREMIEERLKTYAHLFDDKVMKQLKRRRYTGWGRLSRKLINGIRDKQSGKTILDFLKSDGFANRNFMQLIHDDSLTFKEDIQKAQVSGQGDSLHEHIANLAGSPAIKKGILQTVKVVDELVKVMGRHKPENIVIEMARENQTTQKGQKNSRERMKRIEEGIKELGSQILKEHPVENTQLQNEKLYLYYLQNGRDMYVDQELDINRLSDYDVDHIVPQSFLKDDSIDNKVLTRSDKARGKSDNVPSEEVVKKMKNYWRQLLNAKLITQRKFDNLTKAERGGLSELDKAGFIKRQLVETRQITKHVAQILDSRMNTKYDENDKLIREVKVITLKSKLVSDFRKDFQFYKVREINNYHHAHDAYLNAVVGTALIKKYPKLESEFVYGDYKVYDVRKMIAKSEQEIGKATAKYFFYSNIMNFFKTEITLANGEIRKRPLIETNGETGEIVWDKGRDFATVRKVLSMPQVNIVKKTEVQTGGFSKESILPKRNSDKLIARKKDWDPKKYGGFDSPTVAYSVLVVAKVEKGKSKKLKSVKELLGITIMERSSFEKNPIDFLEAKGYKEVKKDLIIKLPKYSLFELENGRKRMLASAGELQKGNELALPSKYVNFLYLASHYEKLKGSPEDNEQKQLFVEQHKHYLDEIIEQISEFSKRVILADANLDKVLSAYNKHRDKPIREQAENIIHLFTLTNLGAPAAFKYFDTTIDRKRYTSTKEVLDATLIHQSITGLYETRIDLSQLGGDGGEAAAKGGLGIEDEYRLHETSTEPDVSLGSTWLSDFPQAWAETGGMGLAVRQAPLIIPLKATSTPVSIQQYPMSHEARLGIKPHIQRLLDQGILVPCQSPWNTPLLPVKKPGTNDYRPVQDLREVNKRVEDIHPTVPNPYNLLSGLPPSHQWYTVLDLKDAFFCLRLHPTSQPLFAFEWRDPGMGISGQLTWTRLPQGFKNSPTLFNEALHRDLADFRIQHPDLILLQYVDDILLAATSELDCQQGTRALLQTLGDLGYRASAKKAQICQKQVKYLGYLLREGQRWLTEARKETVMGQPVPKTPRQLREFLGKAGFCRLFIPGFAEMAAPLYPLTKPGTLFSWGPDQQKAYQEIKQALLTAPALGLPDLTKPFELFVDEKQGYAKGVLTQKLGPWRRPVAYLSKKLDPVAAGWPPCLRMVAAIAVLTKDAGKLTMGQPLVILAPHAVEALVKQPPDRWLSNARMTHYQAMLLDTDRVQFGPVVALNPATLLPLPEEGAPHDCLEILAETHGTRPDLTDQPIPDADHTWYTDGSSFLQEGQRKAGAAVTTETEVIWAGALPAGTSAQRAELIALTQALKMAEGKRLNVYTDSRYAFATAHIHGEIYRRRGWLTSEGREIKNKSEILALLKALFLPKRLSIIHCLGHQKGDSAEARGNRLADQAAREAAIKTPPDTSTLLIAGKRTADGSEFEKRTADGSEFESPKKKAKVE

SEQ ID NO: 2097 - protein, 2096 aa, synthetic construct
MPAAKRVKLDGGDKKYSIGLDIGTNSVGWAVITDEYKVPSKKFKVLGNTDRHSIKKNLIGALLFDSGETAEATRLKRTARRRYTRRKNRICYLQEIFSNEMAKVDDSFFHRLEESFLVEEDKKHERHPIFGNIVDEVAYHEKYPTIYHLRKKLVDSTDKADLRLIYLALAHMIKFRGHFLIEGDLNPDNSDVDKLFIQLVQTYNQLFEENPINASGVDAKAILSARLSKSRRLENLIAQLPGEKKNGLFGNLIALSLGLTPNFKSNFDLAEDAKLQLSKDTYDDDLDNLLAQIGDQYADLFLAAKNLSDAILLSDILRVNTEITKAPLSASMIKRYDEHHQDLTLLKALVRQQLPEKYKEIFFDQSKNGYAGYIDGGASQEEFYKFIKPILEKMDGTEELLVKLNREDLLRKQRTFDNGSIPHQIHLGELHAILRRQEDFYPFLKDNREKIEKILTFRIPYYVGPLARGNSRFAWMTRKSEETITPWNFEEVVDKGASAQSFIERMTNFDKNLPNEKVLPKHSLLYEYFTVYNELTKVKYVTEGMRKPAFLSGEQKKAIVDLLFKTNRKVTVKQLKEDYFKKIECFDSVEISGVEDRFNASLGTYHDLLKIIKDKDFLDNEENEDILEDIVLTLTLFEDREMIEERLKTYAHLFDDKVMKQLKRRRYTGWGRLSRKLINGIRDKQSGKTILDFLKSDGFANRNFMQLIHDDSLTFKEDIQKAQVSGQGDSLHEHIANLAGSPAIKKGILQTVKVVDELVKVMGRHKPENIVIEMARENQTTQKGQKNSRERMKRIEEGIKELGSQILKEHPVENTQLQNEKLYLYYLQNGRDMYVDQELDINRLSDYDVDHIVPQSFLKDDSIDNKVLTRSDKARGKSDNVPSEEVVKKMKNYWRQLLNAKLITQRKFDNLTKAERGGLSELDKAGFIKRQLVETRQITKHVAQILDSRMNTKYDENDKLIREVKVITLKSKLVSDFRKDFQFYKVREINNYHHAHDAYLNAVVGTALIKKYPKLESEFVYGDYKVYDVRKMIAKSEQEIGKATAKYFFYSNIMNFFKTEITLANGEIRKRPLIETNGETGEIVWDKGRDFATVRKVLSMPQVNIVKKTEVQTGGFSKESILPKRNSDKLIARKKDWDPKKYGGFDSPTVAYSVLVVAKVEKGKSKKLKSVKELLGITIMERSSFEKNPIDFLEAKGYKEVKKDLIIKLPKYSLFELENGRKRMLASAGELQKGNELALPSKYVNFLYLASHYEKLKGSPEDNEQKQLFVEQHKHYLDEIIEQISEFSKRVILADANLDKVLSAYNKHRDKPIREQAENIIHLFTLTNLGAPAAFKYFDTTIDRKRYTSTKEVLDATLIHQSITGLYETRIDLSQLGGDGGPAPEAAAKGGSGGLGIEDEYRLHETSTEPDVSLGSTWLSDFPQAWAETGGMGLAVRQAPLIIPLKATSTPVSIQQYPMSHEARLGIKPHIQRLLDQGILVPCQSPWNTPLLPVKKPGTNDYRPVQDLREVNKRVEDIHPTVPNPYNLLSGLPPSHQWYTVLDLKDAFFCLRLHPTSQPLFAFEWRDPGMGISGQLTWTRLPQGFKNSPTLFNEALHRDLADFRIQHPDLILLQYVDDILLAATSELDCQQGTRALLQTLGDLGYRASAKKAQICQKQVKYLGYLLREGQRWLTEARKETVMGQPVPKTPRQLREFLGKAGFCRLFIPGFAEMAAPLYPLTKPGTLFSWGPDQQKAYQEIKQALLTAPALGLPDLTKPFELFVDEKQGYAKGVLTQKLGPWRRPVAYLSKKLDPVAAGWPPCLRMVAAIAVLTKDAGKLTMGQPLVILAPHAVEALVKQPPDRWLSNARMTHYQAMLLDTDRVQFGPVVALNPATLLPLPEEGAPHDCLEILAETHGTRPDLTDQPIPDADHTWYTDGSSFLQEGQRKAGAAVTTETEVIWAGALPAGTSAQRAELIALTQALKMAEGKRLNVYTDSRYAFATAHIHGEIYRRRGWLTSEGREIKNKSEILALLKALFLPKRLSIIHCLGHQKGDSAEARGNRLADQAAREAAIKTPPDTSTLLIAGKRTADGSEFEKRTADGSEFESPKKKAKVE

SEQ ID NO: 2098 - protein, 2115 aa, synthetic construct
MPAAKRVKLDGGDKKYSIGLDIGTNSVGWAVITDEYKVPSKKFKVLGNTDRHSIKKNLIGALLFDSGETAEATRLKRTARRRYTRRKNRICYLQEIFSNEMAKVDDSFFHRLEESFLVEEDKKHERHPIFGNIVDEVAYHEKYPTIYHLRKKLVDSTDKADLRLIYLALAHMIKFRGHFLIEGDLNPDNSDVDKLFIQLVQTYNQLFEENPINASGVDAKAILSARLSKSRRLENLIAQLPGEKKNGLFGNLIALSLGLTPNFKSNFDLAEDAKLQLSKDTYDDDLDNLLAQIGDQYADLFLAAKNLSDAILLSDILRVNTEITKAPLSASMIKRYDEHHQDLTLLKALVRQQLPEKYKEIFFDQSKNGYAGYIDGGASQEEFYKFIKPILEKMDGTEELLVKLNREDLLRKQRTFDNGSIPHQIHLGELHAILRRQEDFYPFLKDNREKIEKILTFRIPYYVGPLARGNSRFAWMTRKSEETITPWNFEEVVDKGASAQSFIERMTNFDKNLPNEKVLPKHSLLYEYFTVYNELTKVKYVTEGMRKPAFLSGEQKKAIVDLLFKTNRKVTVKQLKEDYFKKIECFDSVEISGVEDRFNASLGTYHDLLKIIKDKDFLDNEENEDILEDIVLTLTLFEDREMIEERLKTYAHLFDDKVMKQLKRRRYTGWGRLSRKLINGIRDKQSGKTILDFLKSDGFANRNFMQLIHDDSLTFKEDIQKAQVSGQGDSLHEHIANLAGSPAIKKGILQTVKVVDELVKVMGRHKPENIVIEMARENQTTQKGQKNSRERMKRIEEGIKELGSQILKEHPVENTQLQNEKLYLYYLQNGRDMYVDQELDINRLSDYDVDHIVPQSFLKDDSIDNKVLTRSDKARGKSDNVPSEEVVKKMKNYWRQLLNAKLITQRKFDNLTKAERGGLSELDKAGFIKRQLVETRQITKHVAQILDSRMNTKYDENDKLIREVKVITLKSKLVSDFRKDFQFYKVREINNYHHAHDAYLNAVVGTALIKKYPKLESEFVYGDYKVYDVRKMIAKSEQEIGKATAKYFFYSNIMNFFKTEITLANGEIRKRPLIETNGETGEIVWDKGRDFATVRKVLSMPQVNIVKKTEVQTGGFSKESILPKRNSDKLIARKKDWDPKKYGGFDSPTVAYSVLVVAKVEKGKSKKLKSVKELLGITIMERSSFEKNPIDFLEAKGYKEVKKDLIIKLPKYSLFELENGRKRMLASAGELQKGNELALPSKYVNFLYLASHYEKLKGSPEDNEQKQLFVEQHKHYLDEIIEQISEFSKRVILADANLDKVLSAYNKHRDKPIREQAENIIHLFTLTNLGAPAAFKYFDTTIDRKRYTSTKEVLDATLIHQSITGLYETRIDLSQLGGDGGEAAAKEAAAKEAAAKEAAAKEAAAKEAAAKGGLGIEDEYRLHETSTEPDVSLGSTWLSDFPQAWAETGGMGLAVRQAPLIIPLKATSTPVSIQQYPMSHEARLGIKPHIQRLLDQGILVPCQSPWNTPLLPVKKPGTNDYRPVQDLREVNKRVEDIHPTVPNPYNLLSGLPPSHQWYTVLDLKDAFFCLRLHPTSQPLFAFEWRDPGMGISGQLTWTRLPQGFKNSPTLFNEALHRDLADFRIQHPDLILLQYVDDILLAATSELDCQQGTRALLQTLGDLGYRASAKKAQICQKQVKYLGYLLREGQRWLTEARKETVMGQPVPKTPRQLREFLGKAGFCRLFIPGFAEMAAPLYPLTKPGTLFSWGPDQQKAYQEIKQALLTAPALGLPDLTKPFELFVDEKQGYAKGVLTQKLGPWRRPVAYLSKKLDPVAAGWPPCLRMVAAIAVLTKDAGKLTMGQPLVILAPHAVEALVKQPPDRWLSNARMTHYQAMLLDTDRVQFGPVVALNPATLLPLPEEGAPHDCLEILAETHGTRPDLTDQPIPDADHTWYTDGSSFLQEGQRKAGAAVTTETEVIWAGALPAGTSAQRAELIALTQALKMAEGKRLNVYTDSRYAFATAHIHGEIYRRRGWLTSEGREIKNKSEILALLKALFLPKRLSIIHCLGHQKGDSAEARGNRLADQAAREAAIKTPPDTSTLLIAGKRTADGSEFEKRTADGSEFESPKKKAKVE

SEQ ID NO: 2099 - protein, 2096 aa, synthetic construct
MPAAKRVKLDGGDKKYSIGLDIGTNSVGWAVITDEYKVPSKKFKVLGNTDRHSIKKNLIGALLFDSGETAEATRLKRTARRRYTRRKNRICYLQEIFSNEMAKVDDSFFHRLEESFLVEEDKKHERHPIFGNIVDEVAYHEKYPTIYHLRKKLVDSTDKADLRLIYLALAHMIKFRGHFLIEGDLNPDNSDVDKLFIQLVQTYNQLFEENPINASGVDAKAILSARLSKSRRLENLIAQLPGEKKNGLFGNLIALSLGLTPNFKSNFDLAEDAKLQLSKDTYDDDLDNLLAQIGDQYADLFLAAKNLSDAILLSDILRVNTEITKAPLSASMIKRYDEHHQDLTLLKALVRQQLPEKYKEIFFDQSKNGYAGYIDGGASQEEFYKFIKPILEKMDGTEELLVKLNREDLLRKQRTFDNGSIPHQIHLGELHAILRRQEDFYPFLKDNREKIEKILTFRIPYYVGPLARGNSRFAWMTRKSEETITPWNFEEVVDKGASAQSFIERMTNFDKNLPNEKVLPKHSLLYEYFTVYNELTKVKYVTEGMRKPAFLSGEQKKAIVDLLFKTNRKVTVKQLKEDYFKKIECFDSVEISGVEDRFNASLGTYHDLLKIIKDKDFLDNEENEDILEDIVLTLTLFEDREMIEERLKTYAHLFDDKVMKQLKRRRYTGWGRLSRKLINGIRDKQSGKTILDFLKSDGFANRNFMQLIHDDSLTFKEDIQKAQVSGQGDSLHEHIANLAGSPAIKKGILQTVKVVDELVKVMGRHKPENIVIEMARENQTTQKGQKNSRERMKRIEEGIKELGSQILKEHPVENTQLQNEKLYLYYLQNGRDMYVDQELDINRLSDYDVDHIVPQSFLKDDSIDNKVLTRSDKARGKSDNVPSEEVVKKMKNYWRQLLNAKLITQRKFDNLTKAERGGLSELDKAGFIKRQLVETRQITKHVAQILDSRMNTKYDENDKLIREVKVITLKSKLVSDFRKDFQFYKVREINNYHHAHDAYLNAVVGTALIKKYPKLESEFVYGDYKVYDVRKMIAKSEQEIGKATAKYFFYSNIMNFFKTEITLANGEIRKRPLIETNGETGEIVWDKGRDFATVRKVLSMPQVNIVKKTEVQTGGFSKESILPKRNSDKLIARKKDWDPKKYGGFDSPTVAYSVLVVAKVEKGKSKKLKSVKELLGITIMERSSFEKNPIDFLEAKGYKEVKKDLIIKLPKYSLFELENGRKRMLASAGELQKGNELALPSKYVNFLYLASHYEKLKGSPEDNEQKQLFVEQHKHYLDEIIEQISEFSKRVILADANLDKVLSAYNKHRDKPIREQAENIIHLFTLTNLGAPAAFKYFDTTIDRKRYTSTKEVLDATLIHQSITGLYETRIDLSQLGGDGGEAAAKPAPGGSGGLGIEDEYRLHETSTEPDVSLGSTWLSDFPQAWAETGGMGLAVRQAPLIIPLKATSTPVSIQQYPMSHEARLGIKPHIQRLLDQGILVPCQSPWNTPLLPVKKPGTNDYRPVQDLREVNKRVEDIHPTVPNPYNLLSGLPPSHQWYTVLDLKDAFFCLRLHPTSQPLFAFEWRDPGMGISGQLTWTRLPQGFKNSPTLFNEALHRDLADFRIQHPDLILLQYVDDILLAATSELDCQQGTRALLQTLGDLGYRASAKKAQICQKQVKYLGYLLREGQRWLTEARKETVMGQPVPKTPRQLREFLGKAGFCRLFIPGFAEMAAPLYPLTKPGTLFSWGPDQQKAYQEIKQALLTAPALGLPDLTKPFELFVDEKQGYAKGVLTQKLGPWRRPVAYLSKKLDPVAAGWPPCLRMVAAIAVLTKDAGKLTMGQPLVILAPHAVEALVKQPPDRWLSNARMTHYQAMLLDTDRVQFGPVVALNPATLLPLPEEGAPHDCLEILAETHGTRPDLTDQPIPDADHTWYTDGSSFLQEGQRKAGAAVTTETEVIWAGALPAGTSAQRAELIALTQALKMAEGKRLNVYTDSRYAFATAHIHGEIYRRRGWLTSEGREIKNKSEILALLKALFLPKRLSIIHCLGHQKGDSAEARGNRLADQAAREAAIKTPPDTSTLLIAGKRTADGSEFEKRTADGSEFESPKKKAKVE

SEQ ID NO: 2100 - protein, 2096 aa, synthetic construct
MPAAKRVKLDGGDKKYSIGLDIGTNSVGWAVITDEYKVPSKKFKVLGNTDRHSIKKNLIGALLFDSGETAEATRLKRTARRRYTRRKNRICYLQEIFSNEMAKVDDSFFHRLEESFLVEEDKKHERHPIFGNIVDEVAYHEKYPTIYHLRKKLVDSTDKADLRLIYLALAHMIKFRGHFLIEGDLNPDNSDVDKLFIQLVQTYNQLFEENPINASGVDAKAILSARLSKSRRLENLIAQLPGEKKNGLFGNLIALSLGLTPNFKSNFDLAEDAKLQLSKDTYDDDLDNLLAQIGDQYADLFLAAKNLSDAILLSDILRVNTEITKAPLSASMIKRYDEHHQDLTLLKALVRQQLPEKYKEIFFDQSKNGYAGYIDGGASQEEFYKFIKPILEKMDGTEELLVKLNREDLLRKQRTFDNGSIPHQIHLGELHAILRRQEDFYPFLKDNREKIEKILTFRIPYYVGPLARGNSRFAWMTRKSEETITPWNFEEVVDKGASAQSFIERMTNFDKNLPNEKVLPKHSLLYEYFTVYNELTKVKYVTEGMRKPAFLSGEQKKAIVDLLFKTNRKVTVKQLKEDYFKKIECFDSVEISGVEDRFNASLGTYHDLLKIIKDKDFLDNEENEDILEDIVLTLTLFEDREMIEERLKTYAHLFDDKVMKQLKRRRYTGWGRLSRKLINGIRDKQSGKTILDFLKSDGFANRNFMQLIHDDSLTFKEDIQKAQVSGQGDSLHEHIANLAGSPAIKKGILQTVKVVDELVKVMGRHKPENIVIEMARENQTTQKGQKNSRERMKRIEEGIKELGSQILKEHPVENTQLQNEKLYLYYLQNGRDMYVDQELDINRLSDYDVDHIVPQSFLKDDSIDNKVLTRSDKARGKSDNVPSEEVVKKMKNYWRQLLNAKLITQRKFDNLTKAERGGLSELDKAGFIKRQLVETRQITKHVAQILDSRMNTKYDENDKLIREVKVITLKSKLVSDFRKDFQFYKVREINNYHHAHDAYLNAVVGTALIKKYPKLESEFVYGDYKVYDVRKMIAKSEQEIGKATAKYFFYSNIMNFFKTEITLANGEIRKRPLIETNGETGEIVWDKGRDFATVRKVLSMPQVNIVKKTEVQTGGFSKESILPKRNSDKLIARKKDWDPKKYGGFDSPTVAYSVLVVAKVEKGKSKKLKSVKELLGITIMERSSFEKNPIDFLEAKGYKEVKKDLIIKLPKYSLFELENGRKRMLASAGELQKGNELALPSKYVNFLYLASHYEKLKGSPEDNEQKQLFVEQHKHYLDEIIEQISEFSKRVILADANLDKVLSAYNKHRDKPIREQAENIIHLFTLTNLGAPAAFKYFDTTIDRKRYTSTKEVLDATLIHQSITGLYETRIDLSQLGGDGGGGSGSSEAAAKGGLGIEDEYRLHETSTEPDVSLGSTWLSDFPQAWAETGGMGLAVRQAPLIIPLKATSTPVSIQQYPMSHEARLGIKPHIQRLLDQGILVPCQSPWNTPLLPVKKPGTNDYRPVQDLREVNKRVEDIHPTVPNPYNLLSGLPPSHQWYTVLDLKDAFFCLRLHPTSQPLFAFEWRDPGMGISGQLTWTRLPQGFKNSPTLFNEALHRDLADFRIQHPDLILLQYVDDILLAATSELDCQQGTRALLQTLGDLGYRASAKKAQICQKQVKYLGYLLREGQRWLTEARKETVMGQPVPKTPRQLREFLGKAGFCRLFIPGFAEMAAPLYPLTKPGTLFSWGPDQQKAYQEIKQALLTAPALGLPDLTKPFELFVDEKQGYAKGVLTQKLGPWRRPVAYLSKKLDPVAAGWPPCLRMVAAIAVLTKDAGKLTMGQPLVILAPHAVEALVKQPPDRWLSNARMTHYQAMLLDTDRVQFGPVVALNPATLLPLPEEGAPHDCLEILAETHGTRPDLTDQPIPDADHTWYTDGSSFLQEGQRKAGAAVTTETEVIWAGALPAGTSAQRAELIALTQALKMAEGKRLNVYTDSRYAFATAHIHGEIYRRRGWLTSEGREIKNKSEILALLKALFLPKRLSIIHCLGHQKGDSAEARGNRLADQAAREAAIKTPPDTSTLLIAGKRTADGSEFEKRTADGSEFESPKKKAKVE

SEQ ID NO: 2101 - protein, 2094 aa, synthetic construct
MPAAKRVKLDGGDKKYSIGLDIGTNSVGWAVITDEYKVPSKKFKVLGNTDRHSIKKNLIGALLFDSGETAEATRLKRTARRRYTRRKNRICYLQEIFSNEMAKVDDSFFHRLEESFLVEEDKKHERHPIFGNIVDEVAYHEKYPTIYHLRKKLVDSTDKADLRLIYLALAHMIKFRGHFLIEGDLNPDNSDVDKLFIQLVQTYNQLFEENPINASGVDAKAILSARLSKSRRLENLIAQLPGEKKNGLFGNLIALSLGLTPNFKSNFDLAEDAKLQLSKDTYDDDLDNLLAQIGDQYADLFLAAKNLSDAILLSDILRVNTEITKAPLSASMIKRYDEHHQDLTLLKALVRQQLPEKYKEIFFDQSKNGYAGYIDGGASQEEFYKFIKPILEKMDGTEELLVKLNREDLLRKQRTFDNGSIPHQIHLGELHAILRRQEDFYPFLKDNREKIEKILTFRIPYYVGPLARGNSRFAWMTRKSEETITPWNFEEVVDKGASAQSFIERMTNFDKNLPNEKVLPKHSLLYEYFTVYNELTKVKYVTEGMRKPAFLSGEQKKAIVDLLFKTNRKVTVKQLKEDYFKKIECFDSVEISGVEDRFNASLGTYHDLLKIIKDKDFLDNEENEDILEDIVLTLTLFEDREMIEERLKTYAHLFDDKVMKQLKRRRYTGWGRLSRKLINGIRDKQSGKTILDFLKSDGFANRNFMQLIHDDSLTFKEDIQKAQVSGQGDSLHEHIANLAGSPAIKKGILQTVKVVDELVKVMGRHKPENIVIEMARENQTTQKGQKNSRERMKRIEEGIKELGSQILKEHPVENTQLQNEKLYLYYLQNGRDMYVDQELDINRLSDYDVDHIVPQSFLKDDSIDNKVLTRSDKARGKSDNVPSEEVVKKMKNYWRQLLNAKLITQRKFDNLTKAERGGLSELDKAGFIKRQLVETRQITKHVAQILDSRMNTKYDENDKLIREVKVITLKSKLVSDFRKDFQFYKVREINNYHHAHDAYLNAVVGTALIKKYPKLESEFVYGDYKVYDVRKMIAKSEQEIGKATAKYFFYSNIMNFFKTEITLANGEIRKRPLIETNGETGEIVWDKGRDFATVRKVLSMPQVNIVKKTEVQTGGFSKESILPKRNSDKLIARKKDWDPKKYGGFDSPTVAYSVLVVAKVEKGKSKKLKSVKELLGITIMERSSFEKNPIDFLEAKGYKEVKKDLIIKLPKYSLFELENGRKRMLASAGELQKGNELALPSKYVNFLYLASHYEKLKGSPEDNEQKQLFVEQHKHYLDEIIEQISEFSKRVILADANLDKVLSAYNKHRDKPIREQAENIIHLFTLTNLGAPAAFKYFDTTIDRKRYTSTKEVLDATLIHQSITGLYETRIDLSQLGGDGGPAPGGGGSSGGLGIEDEYRLHETSTEPDVSLGSTWLSDFPQAWAETGGMGLAVRQAPLIIPLKATSTPVSIQQYPMSHEARLGIKPHIQRLLDQGILVPCQSPWNTPLLPVKKPGTNDYRPVQDLREVNKRVEDIHPTVPNPYNLLSGLPPSHQWYTVLDLKDAFFCLRLHPTSQPLFAFEWRDPGMGISGQLTWTRLPQGFKNSPTLFNEALHRDLADFRIQHPDLILLQYVDDILLAATSELDCQQGTRALLQTLGDLGYRASAKKAQICQKQVKYLGYLLREGQRWLTEARKETVMGQPVPKTPRQLREFLGKAGFCRLFIPGFAEMAAPLYPLTKPGTLFSWGPDQQKAYQEIKQALLTAPALGLPDLTKPFELFVDEKQGYAKGVLTQKLGPWRRPVAYLSKKLDPVAAGWPPCLRMVAAIAVLTKDAGKLTMGQPLVILAPHAVEALVKQPPDRWLSNARMTHYQAMLLDTDRVQFGPVVALNPATLLPLPEEGAPHDCLEILAETHGTRPDLTDQPIPDADHTWYTDGSSFLQEGQRKAGAAVTTETEVIWAGALPAGTSAQRAELIALTQALKMAEGKRLNVYTDSRYAFATAHIHGEIYRRRGWLTSEGREIKNKSEILALLKALFLPKRLSIIHCLGHQKGDSAEARGNRLADQAAREAAIKTPPDTSTLLIAGKRTADGSEFEKRTADGSEFESPKKKAKVE

SEQ ID NO: 2102 - protein, 2096 aa, synthetic construct
MPAAKRVKLDGGDKKYSIGLDIGTNSVGWAVITDEYKVPSKKFKVLGNTDRHSIKKNLIGALLFDSGETAEATRLKRTARRRYTRRKNRICYLQEIFSNEMAKVDDSFFHRLEESFLVEEDKKHERHPIFGNIVDEVAYHEKYPTIYHLRKKLVDSTDKADLRLIYLALAHMIKFRGHFLIEGDLNPDNSDVDKLFIQLVQTYNQLFEENPINASGVDAKAILSARLSKSRRLENLIAQLPGEKKNGLFGNLIALSLGLTPNFKSNFDLAEDAKLQLSKDTYDDDLDNLLAQIGDQYADLFLAAKNLSDAILLSDILRVNTEITKAPLSASMIKRYDEHHQDLTLLKALVRQQLPEKYKEIFFDQSKNGYAGYIDGGASQEEFYKFIKPILEKMDGTEELLVKLNREDLLRKQRTFDNGSIPHQIHLGELHAILRRQEDFYPFLKDNREKIEKILTFRIPYYVGPLARGNSRFAWMTRKSEETITPWNFEEVVDKGASAQSFIERMTNFDKNLPNEKVLPKHSLLYEYFTVYNELTKVKYVTEGMRKPAFLSGEQKKAIVDLLFKTNRKVTVKQLKEDYFKKIECFDSVEISGVEDRFNASLGTYHDLLKIIKDKDFLDNEENEDILEDIVLTLTLFEDREMIEERLKTYAHLFDDKVMKQLKRRRYTGWGRLSRKLINGIRDKQSGKTILDFLKSDGFANRNFMQLIHDDSLTFKEDIQKAQVSGQGDSLHEHIANLAGSPAIKKGILQTVKVVDELVKVMGRHKPENIVIEMARENQTTQKGQKNSRERMKRIEEGIKELGSQILKEHPVENTQLQNEKLYLYYLQNGRDMYVDQELDINRLSDYDVDHIVPQSFLKDDSIDNKVLTRSDKARGKSDNVPSEEVVKKMKNYWRQLLNAKLITQRKFDNLTKAERGGLSELDKAGFIKRQLVETRQITKHVAQILDSRMNTKYDENDKLIREVKVITLKSKLVSDFRKDFQFYKVREINNYHHAHDAYLNAVVGTALIKKYPKLESEFVYGDYKVYDVRKMIAKSEQEIGKATAKYFFYSNIMNFFKTEITLANGEIRKRPLIETNGETGEIVWDKGRDFATVRKVLSMPQVNIVKKTEVQTGGFSKESILPKRNSDKLIARKKDWDPKKYGGFDSPTVAYSVLVVAKVEKGKSKKLKSVKELLGITIMERSSFEKNPIDFLEAKGYKEVKKDLIIKLPKYSLFELENGRKRMLASAGELQKGNELALPSKYVNFLYLASHYEKLKGSPEDNEQKQLFVEQHKHYLDEIIEQISEFSKRVILADANLDKVLSAYNKHRDKPIREQAENIIHLFTLTNLGAPAAFKYFDTTIDRKRYTSTKEVLDATLIHQSITGLYETRIDLSQLGGDGGGGSEAAAKGGGGGLGIEDEYRLHETSTEPDVSLGSTWLSDFPQAWAETGGMGLAVRQAPLIIPLKATSTPVSIQQYPMSHEARLGIKPHIQRLLDQGILVPCQSPWNTPLLPVKKPGTNDYRPVQDLREVNKRVEDIHPTVPNPYNLLSGLPPSHQWYTVLDLKDAFFCLRLHPTSQPLFAFEWRDPGMGISGQLTWTRLPQGFKNSPTLFNEALHRDLADFRIQHPDLILLQYVDDILLAATSELDCQQGTRALLQTLGDLGYRASAKKAQICQKQVKYLGYLLREGQRWLTEARKETVMGQPVPKTPRQLREFLGKAGFCRLFIPGFAEMAAPLYPLTKPGTLFSWGPDQQKAYQEIKQALLTAPALGLPDLTKPFELFVDEKQGYAKGVLTQKLGPWRRPVAYLSKKLDPVAAGWPPCLRMVAAIAVLTKDAGKLTMGQPLVILAPHAVEALVKQPPDRWLSNARMTHYQAMLLDTDRVQFGPVVALNPATLLPLPEEGAPHDCLEILAETHGTRPDLTDQPIPDADHTWYTDGSSFLQEGQRKAGAAVTTETEVIWAGALPAGTSAQRAELIALTQALKMAEGKRLNVYTDSRYAFATAHIHGEIYRRRGWLTSEGREIKNKSEILALLKALFLPKRLSIIHCLGHQKGDSAEARGNRLADQAAREAAIKTPPDTSTLLIAGKRTADGSEFEKRTADGSEFESPKKKAKVE

SEQ ID NO: 2103 - protein, 2088 aa, synthetic construct
MPAAKRVKLDGGDKKYSIGLDIGTNSVGWAVITDEYKVPSKKFKVLGNTDRHSIKKNLIGALLFDSGETAEATRLKRTARRRYTRRKNRICYLQEIFSNEMAKVDDSFFHRLEESFLVEEDKKHERHPIFGNIVDEVAYHEKYPTIYHLRKKLVDSTDKADLRLIYLALAHMIKFRGHFLIEGDLNPDNSDVDKLFIQLVQTYNQLFEENPINASGVDAKAILSARLSKSRRLENLIAQLPGEKKNGLFGNLIALSLGLTPNFKSNFDLAEDAKLQLSKDTYDDDLDNLLAQIGDQYADLFLAAKNLSDAILLSDILRVNTEITKAPLSASMIKRYDEHHQDLTLLKALVRQQLPEKYKEIFFDQSKNGYAGYIDGGASQEEFYKFIKPILEKMDGTEELLVKLNREDLLRKQRTFDNGSIPHQIHLGELHAILRRQEDFYPFLKDNREKIEKILTFRIPYYVGPLARGNSRFAWMTRKSEETITPWNFEEVVDKGASAQSFIERMTNFDKNLPNEKVLPKHSLLYEYFTVYNELTKVKYVTEGMRKPAFLSGEQKKAIVDLLFKTNRKVTVKQLKEDYFKKIECFDSVEISGVEDRFNASLGTYHDLLKIIKDKDFLDNEENEDILEDIVLTLTLFEDREMIEERLKTYAHLFDDKVMKQLKRRRYTGWGRLSRKLINGIRDKQSGKTILDFLKSDGFANRNFMQLIHDDSLTFKEDIQKAQVSGQGDSLHEHIANLAGSPAIKKGILQTVKVVDELVKVMGRHKPENIVIEMARENQTTQKGQKNSRERMKRIEEGIKELGSQILKEHPVENTQLQNEKLYLYYLQNGRDMYVDQELDINRLSDYDVDHIVPQSFLKDDSIDNKVLTRSDKARGKSDNVPSEEVVKKMKNYWRQLLNAKLITQRKFDNLTKAERGGLSELDKAGFIKRQLVETRQITKHVAQILDSRMNTKYDENDKLIREVKVITLKSKLVSDFRKDFQFYKVREINNYHHAHDAYLNAVVGTALIKKYPKLESEFVYGDYKVYDVRKMIAKSEQEIGKATAKYFFYSNIMNFFKTEITLANGEIRKRPLIETNGETGEIVWDKGRDFATVRKVLSMPQVNIVKKTEVQTGGFSKESILPKRNSDKLIARKKDWDPKKYGGFDSPTVAYSVLVVAKVEKGKSKKLKSVKELLGITIMERSSFEKNPIDFLEAKGYKEVKKDLIIKLPKYSLFELENGRKRMLASAGELQKGNELALPSKYVNFLYLASHYEKLKGSPEDNEQKQLFVEQHKHYLDEIIEQISEFSKRVILADANLDKVLSAYNKHRDKPIREQAENIIHLFTLTNLGAPAAFKYFDTTIDRKRYTSTKEVLDATLIHQSITGLYETRIDLSQLGGDGGPAPGGLGIEDEYRLHETSTEPDVSLGSTWLSDFPQAWAETGGMGLAVRQAPLIIPLKATSTPVSIQQYPMSHEARLGIKPHIQRLLDQGILVPCQSPWNTPLLPVKKPGTNDYRPVQDLREVNKRVEDIHPTVPNPYNLLSGLPPSHQWYTVLDLKDAFFCLRLHPTSQPLFAFEWRDPGMGISGQLTWTRLPQGFKNSPTLFNEALHRDLADFRIQHPDLILLQYVDDILLAATSELDCQQGTRALLQTLGDLGYRASAKKAQICQKQVKYLGYLLREGQRWLTEARKETVMGQPVPKTPRQLREFLGKAGFCRLFIPGFAEMAAPLYPLTKPGTLFSWGPDQQKAYQEIKQALLTAPALGLPDLTKPFELFVDEKQGYAKGVLTQKLGPWRRPVAYLSKKLDPVAAGWPPCLRMVAAIAVLTKDAGKLTMGQPLVILAPHAVEALVKQPPDRWLSNARMTHYQAMLLDTDRVQFGPVVALNPATLLPLPEEGAPHDCLEILAETHGTRPDLTDQPIPDADHTWYTDGSSFLQEGQRKAGAAVTTETEVIWAGALPAGTSAQRAELIALTQALKMAEGKRLNVYTDSRYAFATAHIHGEIYRRRGWLTSEGREIKNKSEILALLKALFLPKRLSIIHCLGHQKGDSAEARGNRLADQAAREAAIKTPPDTSTLLIAGKRTADGSEFEKRTADGSEFESPKKKAKVE

SEQ ID NO: 2104 - protein, 2093 aa, synthetic construct
MPAAKRVKLDGGDKKYSIGLDIGTNSVGWAVITDEYKVPSKKFKVLGNTDRHSIKKNLIGALLFDSGETAEATRLKRTARRRYTRRKNRICYLQEIFSNEMAKVDDSFFHRLEESFLVEEDKKHERHPIFGNIVDEVAYHEKYPTIYHLRKKLVDSTDKADLRLIYLALAHMIKFRGHFLIEGDLNPDNSDVDKLFIQLVQTYNQLFEENPINASGVDAKAILSARLSKSRRLENLIAQLPGEKKNGLFGNLIALSLGLTPNFKSNFDLAEDAKLQLSKDTYDDDLDNLLAQIGDQYADLFLAAKNLSDAILLSDILRVNTEITKAPLSASMIKRYDEHHQDLTLLKALVRQQLPEKYKEIFFDQSKNGYAGYIDGGASQEEFYKFIKPILEKMDGTEELLVKLNREDLLRKQRTFDNGSIPHQIHLGELHAILRRQEDFYPFLKDNREKIEKILTFRIPYYVGPLARGNSRFAWMTRKSEETITPWNFEEVVDKGASAQSFIERMTNFDKNLPNEKVLPKHSLLYEYFTVYNELTKVKYVTEGMRKPAFLSGEQKKAIVDLLFKTNRKVTVKQLKEDYFKKIECFDSVEISGVEDRFNASLGTYHDLLKIIKDKDFLDNEENEDILEDIVLTLTLFEDREMIEERLKTYAHLFDDKVMKQLKRRRYTGWGRLSRKLINGIRDKQSGKTILDFLKSDGFANRNFMQLIHDDSLTFKEDIQKAQVSGQGDSLHEHIANLAGSPAIKKGILQTVKVVDELVKVMGRHKPENIVIEMARENQTTQKGQKNSRERMKRIEEGIKELGSQILKEHPVENTQLQNEKLYLYYLQNGRDMYVDQELDINRLSDYDVDHIVPQSFLKDDSIDNKVLTRSDKARGKSDNVPSEEVVKKMKNYWRQLLNAKLITQRKFDNLTKAERGGLSELDKAGFIKRQLVETRQITKHVAQILDSRMNTKYDENDKLIREVKVITLKSKLVSDFRKDFQFYKVREINNYHHAHDAYLNAVVGTALIKKYPKLESEFVYGDYKVYDVRKMIAKSEQEIGKATAKYFFYSNIMNFFKTEITLANGEIRKRPLIETNGETGEIVWDKGRDFATVRKVLSMPQVNIVKKTEVQTGGFSKESILPKRNSDKLIARKKDWDPKKYGGFDSPTVAYSVLVVAKVEKGKSKKLKSVKELLGITIMERSSFEKNPIDFLEAKGYKEVKKDLIIKLPKYSLFELENGRKRMLASAGELQKGNELALPSKYVNFLYLASHYEKLKGSPEDNEQKQLFVEQHKHYLDEIIEQISEFSKRVILADANLDKVLSAYNKHRDKPIREQAENIIHLFTLTNLGAPAAFKYFDTTIDRKRYTSTKEVLDATLIHQSITGLYETRIDLSQLGGDGGEAAAKGGSGGLGIEDEYRLHETSTEPDVSLGSTWLSDFPQAWAETGGMGLAVRQAPLIIPLKATSTPVSIQQYPMSHEARLGIKPHIQRLLDQGILVPCQSPWNTPLLPVKKPGTNDYRPVQDLREVNKRVEDIHPTVPNPYNLLSGLPPSHQWYTVLDLKDAFFCLRLHPTSQPLFAFEWRDPGMGISGQLTWTRLPQGFKNSPTLFNEALHRDLADFRIQHPDLILLQYVDDILLAATSELDCQQGTRALLQTLGDLGYRASAKKAQICQKQVKYLGYLLREGQRWLTEARKETVMGQPVPKTPRQLREFLGKAGFCRLFIPGFAEMAAPLYPLTKPGTLFSWGPDQQKAYQEIKQALLTAPALGLPDLTKPFELFVDEKQGYAKGVLTQKLGPWRRPVAYLSKKLDPVAAGWPPCLRMVAAIAVLTKDAGKLTMGQPLVILAPHAVEALVKQPPDRWLSNARMTHYQAMLLDTDRVQFGPVVALNPATLLPLPEEGAPHDCLEILAETHGTRPDLTDQPIPDADHTWYTDGSSFLQEGQRKAGAAVTTETEVIWAGALPAGTSAQRAELIALTQALKMAEGKRLNVYTDSRYAFATAHIHGEIYRRRGWLTSEGREIKNKSEILALLKALFLPKRLSIIHCLGHQKGDSAEARGNRLADQAAREAAIKTPPDTSTLLIAGKRTADGSEFEKRTADGSEFESPKKKAKVE

SEQ ID NO: 2105 - protein, 2093 aa, synthetic construct
MPAAKRVKLDGGDKKYSIGLDIGTNSVGWAVITDEYKVPSKKFKVLGNTDRHSIKKNLIGALLFDSGETAEATRLKRTARRRYTRRKNRICYLQEIFSNEMAKVDDSFFHRLEESFLVEEDKKHERHPIFGNIVDEVAYHEKYPTIYHLRKKLVDSTDKADLRLIYLALAHMIKFRGHFLIEGDLNPDNSDVDKLFIQLVQTYNQLFEENPINASGVDAKAILSARLSKSRRLENLIAQLPGEKKNGLFGNLIALSLGLTPNFKSNFDLAEDAKLQLSKDTYDDDLDNLLAQIGDQYADLFLAAKNLSDAILLSDILRVNTEITKAPLSASMIKRYDEHHQDLTLLKALVRQQLPEKYKEIFFDQSKNGYAGYIDGGASQEEFYKFIKPILEKMDGTEELLVKLNREDLLRKQRTFDNGSIPHQIHLGELHAILRRQEDFYPFLKDNREKIEKILTFRIPYYVGPLARGNSRFAWMTRKSEETITPWNFEEVVDKGASAQSFIERMTNFDKNLPNEKVLPKHSLLYEYFTVYNELTKVKYVTEGMRKPAFLSGEQKKAIVDLLFKTNRKVTVKQLKEDYFKKIECFDSVEISGVEDRFNASLGTYHDLLKIIKDKDFLDNEENEDILEDIVLTLTLFEDREMIEERLKTYAHLFDDKVMKQLKRRRYTGWGRLSRKLINGIRDKQSGKTILDFLKSDGFANRNFMQLIHDDSLTFKEDIQKAQVSGQGDSLHEHIANLAGSPAIKKGILQTVKVVDELVKVMGRHKPENIVIEMARENQTTQKGQKNSRERMKRIEEGIKELGSQILKEHPVENTQLQNEKLYLYYLQNGRDMYVDQELDINRLSDYDVDHIVPQSFLKDDSIDNKVLTRSDKARGKSDNVPSEEVVKKMKNYWRQLLNAKLITQRKFDNLTKAERGGLSELDKAGFIKRQLVETRQITKHVAQILDSRMNTKYDENDKLIREVKVITLKSKLVSDFRKDFQFYKVREINNYHHAHDAYLNAVVGTALIKKYPKLESEFVYGDYKVYDVRKMIAKSEQEIGKATAKYFFYSNIMNFFKTEITLANGEIRKRPLIETNGETGEIVWDKGRDFATVRKVLSMPQVNIVKKTEVQTGGFSKESILPKRNSDKLIARKKDWDPKKYGGFDSPTVAYSVLVVAKVEKGKSKKLKSVKELLGITIMERSSFEKNPIDFLEAKGYKEVKKDLIIKLPKYSLFELENGRKRMLASAGELQKGNELALPSKYVNFLYLASHYEKLKGSPEDNEQKQLFVEQHKHYLDEIIEQISEFSKRVILADANLDKVLSAYNKHRDKPIREQAENIIHLFTLTNLGAPAAFKYFDTTIDRKRYTSTKEVLDATLIHQSITGLYETRIDLSQLGGDGGGGSEAAAKGGLGIEDEYRLHETSTEPDVSLGSTWLSDFPQAWAETGGMGLAVRQAPLIIPLKATSTPVSIQQYPMSHEARLGIKPHIQRLLDQGILVPCQSPWNTPLLPVKKPGTNDYRPVQDLREVNKRVEDIHPTVPNPYNLLSGLPPSHQWYTVLDLKDAFFCLRLHPTSQPLFAFEWRDPGMGISGQLTWTRLPQGFKNSPTLFNEALHRDLADFRIQHPDLILLQYVDDILLAATSELDCQQGTRALLQTLGDLGYRASAKKAQICQKQVKYLGYLLREGQRWLTEARKETVMGQPVPKTPRQLREFLGKAGFCRLFIPGFAEMAAPLYPLTKPGTLFSWGPDQQKAYQEIKQALLTAPALGLPDLTKPFELFVDEKQGYAKGVLTQKLGPWRRPVAYLSKKLDPVAAGWPPCLRMVAAIAVLTKDAGKLTMGQPLVILAPHAVEALVKQPPDRWLSNARMTHYQAMLLDTDRVQFGPVVALNPATLLPLPEEGAPHDCLEILAETHGTRPDLTDQPIPDADHTWYTDGSSFLQEGQRKAGAAVTTETEVIWAGALPAGTSAQRAELIALTQALKMAEGKRLNVYTDSRYAFATAHIHGEIYRRRGWLTSEGREIKNKSEILALLKALFLPKRLSIIHCLGHQKGDSAEARGNRLADQAAREAAIKTPPDTSTLLIAGKRTADGSEFEKRTADGSEFESPKKKAKVE

SEQ ID NO: 2106 - protein, 2100 aa, synthetic construct
MPAAKRVKLDGGDKKYSIGLDIGTNSVGWAVITDEYKVPSKKFKVLGNTDRHSIKKNLIGALLFDSGETAEATRLKRTARRRYTRRKNRICYLQEIFSNEMAKVDDSFFHRLEESFLVEEDKKHERHPIFGNIVDEVAYHEKYPTIYHLRKKLVDSTDKADLRLIYLALAHMIKFRGHFLIEGDLNPDNSDVDKLFIQLVQTYNQLFEENPINASGVDAKAILSARLSKSRRLENLIAQLPGEKKNGLFGNLIALSLGLTPNFKSNFDLAEDAKLQLSKDTYDDDLDNLLAQIGDQYADLFLAAKNLSDAILLSDILRVNTEITKAPLSASMIKRYDEHHQDLTLLKALVRQQLPEKYKEIFFDQSKNGYAGYIDGGASQEEFYKFIKPILEKMDGTEELLVKLNREDLLRKQRTFDNGSIPHQIHLGELHAILRRQEDFYPFLKDNREKIEKILTFRIPYYVGPLARGNSRFAWMTRKSEETITPWNFEEVVDKGASAQSFIERMTNFDKNLPNEKVLPKHSLLYEYFTVYNELTKVKYVTEGMRKPAFLSGEQKKAIVDLLFKTNRKVTVKQLKEDYFKKIECFDSVEISGVEDRFNASLGTYHDLLKIIKDKDFLDNEENEDILEDIVLTLTLFEDREMIEERLKTYAHLFDDKVMKQLKRRRYTGWGRLSRKLINGIRDKQSGKTILDFLKSDGFANRNFMQLIHDDSLTFKEDIQKAQVSGQGDSLHEHIANLAGSPAIKKGILQTVKVVDELVKVMGRHKPENIVIEMARENQTTQKGQKNSRERMKRIEEGIKELGSQILKEHPVENTQLQNEKLYLYYLQNGRDMYVDQELDINRLSDYDVDHIVPQSFLKDDSIDNKVLTRSDKARGKSDNVPSEEVVKKMKNYWRQLLNAKLITQRKFDNLTKAERGGLSELDKAGFIKRQLVETRQITKHVAQILDSRMNTKYDENDKLIREVKVITLKSKLVSDFRKDFQFYKVREINNYHHAHDAYLNAVVGTALIKKYPKLESEFVYGDYKVYDVRKMIAKSEQEIGKATAKYFFYSNIMNFFKTEITLANGEIRKRPLIETNGETGEIVWDKGRDFATVRKVLSMPQVNIVKKTEVQTGGFSKESILPKRNSDKLIARKKDWDPKKYGGFDSPTVAYSVLVVAKVEKGKSKKLKSVKELLGITIMERSSFEKNPIDFLEAKGYKEVKKDLIIKLPKYSLFELENGRKRMLASAGELQKGNELALPSKYVNFLYLASHYEKLKGSPEDNEQKQLFVEQHKHYLDEIIEQISEFSKRVILADANLDKVLSAYNKHRDKPIREQAENIIHLFTLTNLGAPAAFKYFDTTIDRKRYTSTKEVLDATLIHQSITGLYETRIDLSQLGGDGGGGGGSEAAAKGGGGSGGLGIEDEYRLHETSTEPDVSLGSTWLSDFPQAWAETGGMGLAVRQAPLIIPLKATSTPVSIQQYPMSHEARLGIKPHIQRLLDQGILVPCQSPWNTPLLPVKKPGTNDYRPVQDLREVNKRVEDIHPTVPNPYNLLSGLPPSHQWYTVLDLKDAFFCLRLHPTSQPLFAFEWRDPGMGISGQLTWTRLPQGFKNSPTLFNEALHRDLADFRIQHPDLILLQYVDDILLAATSELDCQQGTRALLQTLGDLGYRASAKKAQICQKQVKYLGYLLREGQRWLTEARKETVMGQPVPKTPRQLREFLGKAGFCRLFIPGFAEMAAPLYPLTKPGTLFSWGPDQQKAYQEIKQALLTAPALGLPDLTKPFELFVDEKQGYAKGVLTQKLGPWRRPVAYLSKKLDPVAAGWPPCLRMVAAIAVLTKDAGKLTMGQPLVILAPHAVEALVKQPPDRWLSNARMTHYQAMLLDTDRVQFGPVVALNPATLLPLPEEGAPHDCLEILAETHGTRPDLTDQPIPDADHTWYTDGSSFLQEGQRKAGAAVTTETEVIWAGALPAGTSAQRAELIALTQALKMAEGKRLNVYTDSRYAFATAHIHGEIYRRRGWLTSEGREIKNKSEILALLKALFLPKRLSIIHCLGHQKGDSAEARGNRLADQAAREAAIKTPPDTSTLLIAGKRTADGSEFEKRTADGSEFESPKKKAKVE

SEQ ID NO: 2107 - protein, 2094 aa, synthetic construct
MPAAKRVKLDGGDKKYSIGLDIGTNSVGWAVITDEYKVPSKKFKVLGNTDRHSIKKNLIGALLFDSGETAEATRLKRTARRRYTRRKNRICYLQEIFSNEMAKVDDSFFHRLEESFLVEEDKKHERHPIFGNIVDEVAYHEKYPTIYHLRKKLVDSTDKADLRLIYLALAHMIKFRGHFLIEGDLNPDNSDVDKLFIQLVQTYNQLFEENPINASGVDAKAILSARLSKSRRLENLIAQLPGEKKNGLFGNLIALSLGLTPNFKSNFDLAEDAKLQLSKDTYDDDLDNLLAQIGDQYADLFLAAKNLSDAILLSDILRVNTEITKAPLSASMIKRYDEHHQDLTLLKALVRQQLPEKYKEIFFDQSKNGYAGYIDGGASQEEFYKFIKPILEKMDGTEELLVKLNREDLLRKQRTFDNGSIPHQIHLGELHAILRRQEDFYPFLKDNREKIEKILTFRIPYYVGPLARGNSRFAWMTRKSEETITPWNFEEVVDKGASAQSFIERMTNFDKNLPNEKVLPKHSLLYEYFTVYNELTKVKYVTEGMRKPAFLSGEQKKAIVDLLFKTNRKVTVKQLKEDYFKKIECFDSVEISGVEDRFNASLGTYHDLLKIIKDKDFLDNEENEDILEDIVLTLTLFEDREMIEERLKTYAHLFDDKVMKQLKRRRYTGWGRLSRKLINGIRDKQSGKTILDFLKSDGFANRNFMQLIHDDSLTFKEDIQKAQVSGQGDSLHEHIANLAGSPAIKKGILQTVKVVDELVKVMGRHKPENIVIEMARENQTTQKGQKNSRERMKRIEEGIKELGSQILKEHPVENTQLQNEKLYLYYLQNGRDMYVDQELDINRLSDYDVDHIVPQSFLKDDSIDNKVLTRSDKARGKSDNVPSEEVVKKMKNYWRQLLNAKLITQRKFDNLTKAERGGLSELDKAGFIKRQLVETRQITKHVAQILDSRMNTKYDENDKLIREVKVITLKSKLVSDFRKDFQFYKVREINNYHHAHDAYLNAVVGTALIKKYPKLESEFVYGDYKVYDVRKMIAKSEQEIGKATAKYFFYSNIMNFFKTEITLANGEIRKRPLIETNGETGEIVWDKGRDFATVRKVLSMPQVNIVKKTEVQTGGFSKESILPKRNSDKLIARKKDWDPKKYGGFDSPTVAYSVLVVAKVEKGKSKKLKSVKELLGITIMERSSFEKNPIDFLEAKGYKEVKKDLIIKLPKYSLFELENGRKRMLASAGELQKGNELALPSKYVNFLYLASHYEKLKGSPEDNEQKQLFVEQHKHYLDEIIEQISEFSKRVILADANLDKVLSAYNKHRDKPIREQAENIIHLFTLTNLGAPAAFKYFDTTIDRKRYTSTKEVLDATLIHQSITGLYETRIDLSQLGGDGGGGGGSSGGSGGLGIEDEYRLHETSTEPDVSLGSTWLSDFPQAWAETGGMGLAVRQAPLIIPLKATSTPVSIQQYPMSHEARLGIKPHIQRLLDQGILVPCQSPWNTPLLPVKKPGTNDYRPVQDLREVNKRVEDIHPTVPNPYNLLSGLPPSHQWYTVLDLKDAFFCLRLHPTSQPLFAFEWRDPGMGISGQLTWTRLPQGFKNSPTLFNEALHRDLADFRIQHPDLILLQYVDDILLAATSELDCQQGTRALLQTLGDLGYRASAKKAQICQKQVKYLGYLLREGQRWLTEARKETVMGQPVPKTPRQLREFLGKAGFCRLFIPGFAEMAAPLYPLTKPGTLFSWGPDQQKAYQEIKQALLTAPALGLPDLTKPFELFVDEKQGYAKGVLTQKLGPWRRPVAYLSKKLDPVAAGWPPCLRMVAAIAVLTKDAGKLTMGQPLVILAPHAVEALVKQPPDRWLSNARMTHYQAMLLDTDRVQFGPVVALNPATLLPLPEEGAPHDCLEILAETHGTRPDLTDQPIPDADHTWYTDGSSFLQEGQRKAGAAVTTETEVIWAGALPAGTSAQRAELIALTQALKMAEGKRLNVYTDSRYAFATAHIHGEIYRRRGWLTSEGREIKNKSEILALLKALFLPKRLSIIHCLGHQKGDSAEARGNRLADQAAREAAIKTPPDTSTLLIAGKRTADGSEFEKRTADGSEFESPKKKAKVE

SEQ ID NO: 2108 - protein, 2096 aa, synthetic construct
MPAAKRVKLDGGDKKYSIGLDIGTNSVGWAVITDEYKVPSKKFKVLGNTDRHSIKKNLIGALLFDSGETAEATRLKRTARRRYTRRKNRICYLQEIFSNEMAKVDDSFFHRLEESFLVEEDKKHERHPIFGNIVDEVAYHEKYPTIYHLRKKLVDSTDKADLRLIYLALAHMIKFRGHFLIEGDLNPDNSDVDKLFIQLVQTYNQLFEENPINASGVDAKAILSARLSKSRRLENLIAQLPGEKKNGLFGNLIALSLGLTPNFKSNFDLAEDAKLQLSKDTYDDDLDNLLAQIGDQYADLFLAAKNLSDAILLSDILRVNTEITKAPLSASMIKRYDEHHQDLTLLKALVRQQLPEKYKEIFFDQSKNGYAGYIDGGASQEEFYKFIKPILEKMDGTEELLVKLNREDLLRKQRTFDNGSIPHQIHLGELHAILRRQEDFYPFLKDNREKIEKILTFRIPYYVGPLARGNSRFAWMTRKSEETITPWNFEEVVDKGASAQSFIERMTNFDKNLPNEKVLPKHSLLYEYFTVYNELTKVKYVTEGMRKPAFLSGEQKKAIVDLLFKTNRKVTVKQLKEDYFKKIECFDSVEISGVEDRFNASLGTYHDLLKIIKDKDFLDNEENEDILEDIVLTLTLFEDREMIEERLKTYAHLFDDKVMKQLKRRRYTGWGRLSRKLINGIRDKQSGKTILDFLKSDGFANRNFMQLIHDDSLTFKEDIQKAQVSGQGDSLHEHIANLAGSPAIKKGILQTVKVVDELVKVMGRHKPENIVIEMARENQTTQKGQKNSRERMKRIEEGIKELGSQILKEHPVENTQLQNEKLYLYYLQNGRDMYVDQELDINRLSDYDVDHIVPQSFLKDDSIDNKVLTRSDKARGKSDNVPSEEVVKKMKNYWRQLLNAKLITQRKFDNLTKAERGGLSELDKAGFIKRQLVETRQITKHVAQILDSRMNTKYDENDKLIREVKVITLKSKLVSDFRKDFQFYKVREINNYHHAHDAYLNAVVGTALIKKYPKLESEFVYGDYKVYDVRKMIAKSEQEIGKATAKYFFYSNIMNFFKTEITLANGEIRKRPLIETNGETGEIVWDKGRDFATVRKVLSMPQVNIVKKTEVQTGGFSKESILPKRNSDKLIARKKDWDPKKYGGFDSPTVAYSVLVVAKVEKGKSKKLKSVKELLGITIMERSSFEKNPIDFLEAKGYKEVKKDLIIKLPKYSLFELENGRKRMLASAGELQKGNELALPSKYVNFLYLASHYEKLKGSPEDNEQKQLFVEQHKHYLDEIIEQISEFSKRVILADANLDKVLSAYNKHRDKPIREQAENIIHLFTLTNLGAPAAFKYFDTTIDRKRYTSTKEVLDATLIHQSITGLYETRIDLSQLGGDGGGSSGGGEAAAKGGLGIEDEYRLHETSTEPDVSLGSTWLSDFPQAWAETGGMGLAVRQAPLIIPLKATSTPVSIQQYPMSHEARLGIKPHIQRLLDQGILVPCQSPWNTPLLPVKKPGTNDYRPVQDLREVNKRVEDIHPTVPNPYNLLSGLPPSHQWYTVLDLKDAFFCLRLHPTSQPLFAFEWRDPGMGISGQLTWTRLPQGFKNSPTLFNEALHRDLADFRIQHPDLILLQYVDDILLAATSELDCQQGTRALLQTLGDLGYRASAKKAQICQKQVKYLGYLLREGQRWLTEARKETVMGQPVPKTPRQLREFLGKAGFCRLFIPGFAEMAAPLYPLTKPGTLFSWGPDQQKAYQEIKQALLTAPALGLPDLTKPFELFVDEKQGYAKGVLTQKLGPWRRPVAYLSKKLDPVAAGWPPCLRMVAAIAVLTKDAGKLTMGQPLVILAPHAVEALVKQPPDRWLSNARMTHYQAMLLDTDRVQFGPVVALNPATLLPLPEEGAPHDCLEILAETHGTRPDLTDQPIPDADHTWYTDGSSFLQEGQRKAGAAVTTETEVIWAGALPAGTSAQRAELIALTQALKMAEGKRLNVYTDSRYAFATAHIHGEIYRRRGWLTSEGREIKNKSEILALLKALFLPKRLSIIHCLGHQKGDSAEARGNRLADQAAREAAIKTPPDTSTLLIAGKRTADGSEFEKRTADGSEFESPKKKAKVE

SEQ ID NO: 2109 - protein, 2096 aa, synthetic construct
MPAAKRVKLDGGDKKYSIGLDIGTNSVGWAVITDEYKVPSKKFKVLGNTDRHSIKKNLIGALLFDSGETAEATRLKRTARRRYTRRKNRICYLQEIFSNEMAKVDDSFFHRLEESFLVEEDKKHERHPIFGNIVDEVAYHEKYPTIYHLRKKLVDSTDKADLRLIYLALAHMIKFRGHFLIEGDLNPDNSDVDKLFIQLVQTYNQLFEENPINASGVDAKAILSARLSKSRRLENLIAQLPGEKKNGLFGNLIALSLGLTPNFKSNFDLAEDAKLQLSKDTYDDDLDNLLAQIGDQYADLFLAAKNLSDAILLSDILRVNTEITKAPLSASMIKRYDEHHQDLTLLKALVRQQLPEKYKEIFFDQSKNGYAGYIDGGASQEEFYKFIKPILEKMDGTEELLVKLNREDLLRKQRTFDNGSIPHQIHLGELHAILRRQEDFYPFLKDNREKIEKILTFRIPYYVGPLARGNSRFAWMTRKSEETITPWNFEEVVDKGASAQSFIERMTNFDKNLPNEKVLPKHSLLYEYFTVYNELTKVKYVTEGMRKPAFLSGEQKKAIVDLLFKTNRKVTVKQLKEDYFKKIECFDSVEISGVEDRFNASLGTYHDLLKIIKDKDFLDNEENEDILEDIVLTLTLFEDREMIEERLKTYAHLFDDKVMKQLKRRRYTGWGRLSRKLINGIRDKQSGKTILDFLKSDGFANRNFMQLIHDDSLTFKEDIQKAQVSGQGDSLHEHIANLAGSPAIKKGILQTVKVVDELVKVMGRHKPENIVIEMARENQTTQKGQKNSRERMKRIEEGIKELGSQILKEHPVENTQLQNEKLYLYYLQNGRDMYVDQELDINRLSDYDVDHIVPQSFLKDDSIDNKVLTRSDKARGKSDNVPSEEVVKKMKNYWRQLLNAKLITQRKFDNLTKAERGGLSELDKAGFIKRQLVETRQITKHVAQILDSRMNTKYDENDKLIREVKVITLKSKLVSDFRKDFQFYKVREINNYHHAHDAYLNAVVGTALIKKYPKLESEFVYGDYKVYDVRKMIAKSEQEIGKATAKYFFYSNIMNFFKTEITLANGEIRKRPLIETNGETGEIVWDKGRDFATVRKVLSMPQVNIVKKTEVQTGGFSKESILPKRNSDKLIARKKDWDPKKYGGFDSPTVAYSVLVVAKVEKGKSKKLKSVKELLGITIMERSSFEKNPIDFLEAKGYKEVKKDLIIKLPKYSLFELENGRKRMLASAGELQKGNELALPSKYVNFLYLASHYEKLKGSPEDNEQKQLFVEQHKHYLDEIIEQISEFSKRVILADANLDKVLSAYNKHRDKPIREQAENIIHLFTLTNLGAPAAFKYFDTTIDRKRYTSTKEVLDATLIHQSITGLYETRIDLSQLGGDGGGSSEAAAKPAPGGLGIEDEYRLHETSTEPDVSLGSTWLSDFPQAWAETGGMGLAVRQAPLIIPLKATSTPVSIQQYPMSHEARLGIKPHIQRLLDQGILVPCQSPWNTPLLPVKKPGTNDYRPVQDLREVNKRVEDIHPTVPNPYNLLSGLPPSHQWYTVLDLKDAFFCLRLHPTSQPLFAFEWRDPGMGISGQLTWTRLPQGFKNSPTLFNEALHRDLADFRIQHPDLILLQYVDDILLAATSELDCQQGTRALLQTLGDLGYRASAKKAQICQKQVKYLGYLLREGQRWLTEARKETVMGQPVPKTPRQLREFLGKAGFCRLFIPGFAEMAAPLYPLTKPGTLFSWGPDQQKAYQEIKQALLTAPALGLPDLTKPFELFVDEKQGYAKGVLTQKLGPWRRPVAYLSKKLDPVAAGWPPCLRMVAAIAVLTKDAGKLTMGQPLVILAPHAVEALVKQPPDRWLSNARMTHYQAMLLDTDRVQFGPVVALNPATLLPLPEEGAPHDCLEILAETHGTRPDLTDQPIPDADHTWYTDGSSFLQEGQRKAGAAVTTETEVIWAGALPAGTSAQRAELIALTQALKMAEGKRLNVYTDSRYAFATAHIHGEIYRRRGWLTSEGREIKNKSEILALLKALFLPKRLSIIHCLGHQKGDSAEARGNRLADQAAREAAIKTPPDTSTLLIAGKRTADGSEFEKRTADGSEFESPKKKAKVE

SEQ ID NO: 2110 - protein, 2092 aa, synthetic construct
MPAAKRVKLDGGDKKYSIGLDIGTNSVGWAVITDEYKVPSKKFKVLGNTDRHSIKKNLIGALLFDSGETAEATRLKRTARRRYTRRKNRICYLQEIFSNEMAKVDDSFFHRLEESFLVEEDKKHERHPIFGNIVDEVAYHEKYPTIYHLRKKLVDSTDKADLRLIYLALAHMIKFRGHFLIEGDLNPDNSDVDKLFIQLVQTYNQLFEENPINASGVDAKAILSARLSKSRRLENLIAQLPGEKKNGLFGNLIALSLGLTPNFKSNFDLAEDAKLQLSKDTYDDDLDNLLAQIGDQYADLFLAAKNLSDAILLSDILRVNTEITKAPLSASMIKRYDEHHQDLTLLKALVRQQLPEKYKEIFFDQSKNGYAGYIDGGASQEEFYKFIKPILEKMDGTEELLVKLNREDLLRKQRTFDNGSIPHQIHLGELHAILRRQEDFYPFLKDNREKIEKILTFRIPYYVGPLARGNSRFAWMTRKSEETITPWNFEEVVDKGASAQSFIERMTNFDKNLPNEKVLPKHSLLYEYFTVYNELTKVKYVTEGMRKPAFLSGEQKKAIVDLLFKTNRKVTVKQLKEDYFKKIECFDSVEISGVEDRFNASLGTYHDLLKIIKDKDFLDNEENEDILEDIVLTLTLFEDREMIEERLKTYAHLFDDKVMKQLKRRRYTGWGRLSRKLINGIRDKQSGKTILDFLKSDGFANRNFMQLIHDDSLTFKEDIQKAQVSGQGDSLHEHIANLAGSPAIKKGILQTVKVVDELVKVMGRHKPENIVIEMARENQTTQKGQKNSRERMKRIEEGIKELGSQILKEHPVENTQLQNEKLYLYYLQNGRDMYVDQELDINRLSDYDVDHIVPQSFLKDDSIDNKVLTRSDKARGKSDNVPSEEVVKKMKNYWRQLLNAKLITQRKFDNLTKAERGGLSELDKAGFIKRQLVETRQITKHVAQILDSRMNTKYDENDKLIREVKVITLKSKLVSDFRKDFQFYKVREINNYHHAHDAYLNAVVGTALIKKYPKLESEFVYGDYKVYDVRKMIAKSEQEIGKATAKYFFYSNIMNFFKTEITLANGEIRKRPLIETNGETGEIVWDKGRDFATVRKVLSMPQVNIVKKTEVQTGGFSKESILPKRNSDKLIARKKDWDPKKYGGFDSPTVAYSVLVVAKVEKGKSKKLKSVKELLGITIMERSSFEKNPIDFLEAKGYKEVKKDLIIKLPKYSLFELENGRKRMLASAGELQKGNELALPSKYVNFLYLASHYEKLKGSPEDNEQKQLFVEQHKHYLDEIIEQISEFSKRVILADANLDKVLSAYNKHRDKPIREQAENIIHLFTLTNLGAPAAFKYFDTTIDRKRYTSTKEVLDATLIHQSITGLYETRIDLSQLGGDGGGGGGGGGGGLGIEDEYRLHETSTEPDVSLGSTWLSDFPQAWAETGGMGLAVRQAPLIIPLKATSTPVSIQQYPMSHEARLGIKPHIQRLLDQGILVPCQSPWNTPLLPVKKPGTNDYRPVQDLREVNKRVEDIHPTVPNPYNLLSGLPPSHQWYTVLDLKDAFFCLRLHPTSQPLFAFEWRDPGMGISGQLTWTRLPQGFKNSPTLFNEALHRDLADFRIQHPDLILLQYVDDILLAATSELDCQQGTRALLQTLGDLGYRASAKKAQICQKQVKYLGYLLREGQRWLTEARKETVMGQPVPKTPRQLREFLGKAGFCRLFIPGFAEMAAPLYPLTKPGTLFSWGPDQQKAYQEIKQALLTAPALGLPDLTKPFELFVDEKQGYAKGVLTQKLGPWRRPVAYLSKKLDPVAAGWPPCLRMVAAIAVLTKDAGKLTMGQPLVILAPHAVEALVKQPPDRWLSNARMTHYQAMLLDTDRVQFGPVVALNPATLLPLPEEGAPHDCLEILAETHGTRPDLTDQPIPDADHTWYTDGSSFLQEGQRKAGAAVTTETEVIWAGALPAGTSAQRAELIALTQALKMAEGKRLNVYTDSRYAFATAHIHGEIYRRRGWLTSEGREIKNKSEILALLKALFLPKRLSIIHCLGHQKGDSAEARGNRLADQAAREAAIKTPPDTSTLLIAGKRTADGSEFEKRTADGSEFESPKKKAKVE

SEQ ID NO: 2111 - protein, 2091 aa, synthetic construct
MPAAKRVKLDGGDKKYSIGLDIGTNSVGWAVITDEYKVPSKKFKVLGNTDRHSIKKNLIGALLFDSGETAEATRLKRTARRRYTRRKNRICYLQEIFSNEMAKVDDSFFHRLEESFLVEEDKKHERHPIFGNIVDEVAYHEKYPTIYHLRKKLVDSTDKADLRLIYLALAHMIKFRGHFLIEGDLNPDNSDVDKLFIQLVQTYNQLFEENPINASGVDAKAILSARLSKSRRLENLIAQLPGEKKNGLFGNLIALSLGLTPNFKSNFDLAEDAKLQLSKDTYDDDLDNLLAQIGDQYADLFLAAKNLSDAILLSDILRVNTEITKAPLSASMIKRYDEHHQDLTLLKALVRQQLPEKYKEIFFDQSKNGYAGYIDGGASQEEFYKFIKPILEKMDGTEELLVKLNREDLLRKQRTFDNGSIPHQIHLGELHAILRRQEDFYPFLKDNREKIEKILTFRIPYYVGPLARGNSRFAWMTRKSEETITPWNFEEVVDKGASAQSFIERMTNFDKNLPNEKVLPKHSLLYEYFTVYNELTKVKYVTEGMRKPAFLSGEQKKAIVDLLFKTNRKVTVKQLKEDYFKKIECFDSVEISGVEDRFNASLGTYHDLLKIIKDKDFLDNEENEDILEDIVLTLTLFEDREMIEERLKTYAHLFDDKVMKQLKRRRYTGWGRLSRKLINGIRDKQSGKTILDFLKSDGFANRNFMQLIHDDSLTFKEDIQKAQVSGQGDSLHEHIANLAGSPAIKKGILQTVKVVDELVKVMGRHKPENIVIEMARENQTTQKGQKNSRERMKRIEEGIKELGSQILKEHPVENTQLQNEKLYLYYLQNGRDMYVDQELDINRLSDYDVDHIVPQSFLKDDSIDNKVLTRSDKARGKSDNVPSEEVVKKMKNYWRQLLNAKLITQRKFDNLTKAERGGLSELDKAGFIKRQLVETRQITKHVAQILDSRMNTKYDENDKLIREVKVITLKSKLVSDFRKDFQFYKVREINNYHHAHDAYLNAVVGTALIKKYPKLESEFVYGDYKVYDVRKMIAKSEQEIGKATAKYFFYSNIMNFFKTEITLANGEIRKRPLIETNGETGEIVWDKGRDFATVRKVLSMPQVNIVKKTEVQTGGFSKESILPKRNSDKLIARKKDWDPKKYGGFDSPTVAYSVLVVAKVEKGKSKKLKSVKELLGITIMERSSFEKNPIDFLEAKGYKEVKKDLIIKLPKYSLFELENGRKRMLASAGELQKGNELALPSKYVNFLYLASHYEKLKGSPEDNEQKQLFVEQHKHYLDEIIEQISEFSKRVILADANLDKVLSAYNKHRDKPIREQAENIIHLFTLTNLGAPAAFKYFDTTIDRKRYTSTKEVLDATLIHQSITGLYETRIDLSQLGGDGGGGGGGGGGLGIEDEYRLHETSTEPDVSLGSTWLSDFPQAWAETGGMGLAVRQAPLIIPLKATSTPVSIQQYPMSHEARLGIKPHIQRLLDQGILVPCQSPWNTPLLPVKKPGTNDYRPVQDLREVNKRVEDIHPTVPNPYNLLSGLPPSHQWYTVLDLKDAFFCLRLHPTSQPLFAFEWRDPGMGISGQLTWTRLPQGFKNSPTLFNEALHRDLADFRIQHPDLILLQYVDDILLAATSELDCQQGTRALLQTLGDLGYRASAKKAQICQKQVKYLGYLLREGQRWLTEARKETVMGQPVPKTPRQLREFLGKAGFCRLFIPGFAEMAAPLYPLTKPGTLFSWGPDQQKAYQEIKQALLTAPALGLPDLTKPFELFVDEKQGYAKGVLTQKLGPWRRPVAYLSKKLDPVAAGWPPCLRMVAAIAVLTKDAGKLTMGQPLVILAPHAVEALVKQPPDRWLSNARMTHYQAMLLDTDRVQFGPVVALNPATLLPLPEEGAPHDCLEILAETHGTRPDLTDQPIPDADHTWYTDGSSFLQEGQRKAGAAVTTETEVIWAGALPAGTSAQRAELIALTQALKMAEGKRLNVYTDSRYAFATAHIHGEIYRRRGWLTSEGREIKNKSEILALLKALFLPKRLSIIHCLGHQKGDSAEARGNRLADQAAREAAIKTPPDTSTLLIAGKRTADGSEFEKRTADGSEFESPKKKAKVE

SEQ ID NO: 2112 - protein, 2096 aa, synthetic construct
MPAAKRVKLDGGDKKYSIGLDIGTNSVGWAVITDEYKVPSKKFKVLGNTDRHSIKKNLIGALLFDSGETAEATRLKRTARRRYTRRKNRICYLQEIFSNEMAKVDDSFFHRLEESFLVEEDKKHERHPIFGNIVDEVAYHEKYPTIYHLRKKLVDSTDKADLRLIYLALAHMIKFRGHFLIEGDLNPDNSDVDKLFIQLVQTYNQLFEENPINASGVDAKAILSARLSKSRRLENLIAQLPGEKKNGLFGNLIALSLGLTPNFKSNFDLAEDAKLQLSKDTYDDDLDNLLAQIGDQYADLFLAAKNLSDAILLSDILRVNTEITKAPLSASMIKRYDEHHQDLTLLKALVRQQLPEKYKEIFFDQSKNGYAGYIDGGASQEEFYKFIKPILEKMDGTEELLVKLNREDLLRKQRTFDNGSIPHQIHLGELHAILRRQEDFYPFLKDNREKIEKILTFRIPYYVGPLARGNSRFAWMTRKSEETITPWNFEEVVDKGASAQSFIERMTNFDKNLPNEKVLPKHSLLYEYFTVYNELTKVKYVTEGMRKPAFLSGEQKKAIVDLLFKTNRKVTVKQLKEDYFKKIECFDSVEISGVEDRFNASLGTYHDLLKIIKDKDFLDNEENEDILEDIVLTLTLFEDREMIEERLKTYAHLFDDKVMKQLKRRRYTGWGRLSRKLINGIRDKQSGKTILDFLKSDGFANRNFMQLIHDDSLTFKEDIQKAQVSGQGDSLHEHIANLAGSPAIKKGILQTVKVVDELVKVMGRHKPENIVIEMARENQTTQKGQKNSRERMKRIEEGIKELGSQILKEHPVENTQLQNEKLYLYYLQNGRDMYVDQELDINRLSDYDVDHIVPQSFLKDDSIDNKVLTRSDKARGKSDNVPSEEVVKKMKNYWRQLLNAKLITQRKFDNLTKAERGGLSELDKAGFIKRQLVETRQITKHVAQILDSRMNTKYDENDKLIREVKVITLKSKLVSDFRKDFQFYKVREINNYHHAHDAYLNAVVGTALIKKYPKLESEFVYGDYKVYDVRKMIAKSEQEIGKATAKYFFYSNIMNFFKTEITLANGEIRKRPLIETNGETGEIVWDKGRDFATVRKVLSMPQVNIVKKTEVQTGGFSKESILPKRNSDKLIARKKDWDPKKYGGFDSPTVAYSVLVVAKVEKGKSKKLKSVKELLGITIMERSSFEKNPIDFLEAKGYKEVKKDLIIKLPKYSLFELENGRKRMLASAGELQKGNELALPSKYVNFLYLASHYEKLKGSPEDNEQKQLFVEQHKHYLDEIIEQISEFSKRVILADANLDKVLSAYNKHRDKPIREQAENIIHLFTLTNLGAPAAFKYFDTTIDRKRYTSTKEVLDATLIHQSITGLYETRIDLSQLGGDGGEAAAKGGSPAPGGLGIEDEYRLHETSTEPDVSLGSTWLSDFPQAWAETGGMGLAVRQAPLIIPLKATSTPVSIQQYPMSHEARLGIKPHIQRLLDQGILVPCQSPWNTPLLPVKKPGTNDYRPVQDLREVNKRVEDIHPTVPNPYNLLSGLPPSHQWYTVLDLKDAFFCLRLHPTSQPLFAFEWRDPGMGISGQLTWTRLPQGFKNSPTLFNEALHRDLADFRIQHPDLILLQYVDDILLAATSELDCQQGTRALLQTLGDLGYRASAKKAQICQKQVKYLGYLLREGQRWLTEARKETVMGQPVPKTPRQLREFLGKAGFCRLFIPGFAEMAAPLYPLTKPGTLFSWGPDQQKAYQEIKQALLTAPALGLPDLTKPFELFVDEKQGYAKGVLTQKLGPWRRPVAYLSKKLDPVAAGWPPCLRMVAAIAVLTKDAGKLTMGQPLVILAPHAVEALVKQPPDRWLSNARMTHYQAMLLDTDRVQFGPVVALNPATLLPLPEEGAPHDCLEILAETHGTRPDLTDQPIPDADHTWYTDGSSFLQEGQRKAGAAVTTETEVIWAGALPAGTSAQRAELIALTQALKMAEGKRLNVYTDSRYAFATAHIHGEIYRRRGWLTSEGREIKNKSEILALLKALFLPKRLSIIHCLGHQKGDSAEARGNRLADQAAREAAIKTPPDTSTLLIAGKRTADGSEFEKRTADGSEFESPKKKAKVE

SEQ ID NO: 2113 - protein, 2088 aa, synthetic construct; identical to SEQ ID NO: 2053

SEQ ID NO: 2114 - protein, 2094 aa, synthetic construct; identical to SEQ ID NO: 2060

SEQ ID NO: 2115 - protein, 2093 aa, synthetic construct
MPAAKRVKLDGGDKKYSIGLDIGTNSVGWAVITDEYKVPSKKFKVLGNTDRHSIKKNLIGALLFDSGETAEATRLKRTARRRYTRRKNRICYLQEIFSNEMAKVDDSFFHRLEESFLVEEDKKHERHPIFGNIVDEVAYHEKYPTIYHLRKKLVDSTDKADLRLIYLALAHMIKFRGHFLIEGDLNPDNSDVDKLFIQLVQTYNQLFEENPINASGVDAKAILSARLSKSRRLENLIAQLPGEKKNGLFGNLIALSLGLTPNFKSNFDLAEDAKLQLSKDTYDDDLDNLLAQIGDQYADLFLAAKNLSDAILLSDILRVNTEITKAPLSASMIKRYDEHHQDLTLLKALVRQQLPEKYKEIFFDQSKNGYAGYIDGGASQEEFYKFIKPILEKMDGTEELLVKLNREDLLRKQRTFDNGSIPHQIHLGELHAILRRQEDFYPFLKDNREKIEKILTFRIPYYVGPLARGNSRFAWMTRKSEETITPWNFEEVVDKGASAQSFIERMTNFDKNLPNEKVLPKHSLLYEYFTVYNELTKVKYVTEGMRKPAFLSGEQKKAIVDLLFKTNRKVTVKQLKEDYFKKIECFDSVEISGVEDRFNASLGTYHDLLKIIKDKDFLDNEENEDILEDIVLTLTLFEDREMIEERLKTYAHLFDDKVMKQLKRRRYTGWGRLSRKLINGIRDKQSGKTILDFLKSDGFANRNFMQLIHDDSLTFKEDIQKAQVSGQGDSLHEHIANLAGSPAIKKGILQTVKVVDELVKVMGRHKPENIVIEMARENQTTQKGQKNSRERMKRIEEGIKELGSQILKEHPVENTQLQNEKLYLYYLQNGRDMYVDQELDINRLSDYDVDHIVPQSFLKDDSIDNKVLTRSDKARGKSDNVPSEEVVKKMKNYWRQLLNAKLITQRKFDNLTKAERGGLSELDKAGFIKRQLVETRQITKHVAQILDSRMNTKYDENDKLIREVKVITLKSKLVSDFRKDFQFYKVREINNYHHAHDAYLNAVVGTALIKKYPKLESEFVYGDYKVYDVRKMIAKSEQEIGKATAKYFFYSNIMNFFKTEITLANGEIRKRPLIETNGETGEIVWDKGRDFATVRKVLSMPQVNIVKKTEVQTGGFSKESILPKRNSDKLIARKKDWDPKKYGGFDSPTVAYSVLVVAKVEKGKSKKLKSVKELLGITIMERSSFEKNPIDFLEAKGYKEVKKDLIIKLPKYSLFELENGRKRMLASAGELQKGNELALPSKYVNFLYLASHYEKLKGSPEDNEQKQLFVEQHKHYLDEIIEQISEFSKRVILADANLDKVLSAYNKHRDKPIREQAENIIHLFTLTNLGAPAAFKYFDTTIDRKRYTSTKEVLDATLIHQSITGLYETRIDLSQLGGDGGGSSEAAAKGGLGIEDEYRLHETSTEPDVSLGSTWLSDFPQAWAETGGMGLAVRQAPLIIPLKATSTPVSIQQYPMSHEARLGIKPHIQRLLDQGILVPCQSPWNTPLLPVKKPGTNDYRPVQDLREVNKRVEDIHPTVPNPYNLLSGLPPSHQWYTVLDLKDAFFCLRLHPTSQPLFAFEWRDPGMGISGQLTWTRLPQGFKNSPTLFNEALHRDLADFRIQHPDLILLQYVDDILLAATSELDCQQGTRALLQTLGDLGYRASAKKAQICQKQVKYLGYLLREGQRWLTEARKETVMGQPVPKTPRQLREFLGKAGFCRLFIPGFAEMAAPLYPLTKPGTLFSWGPDQQKAYQEIKQALLTAPALGLPDLTKPFELFVDEKQGYAKGVLTQKLGPWRRPVAYLSKKLDPVAAGWPPCLRMVAAIAVLTKDAGKLTMGQPLVILAPHAVEALVKQPPDRWLSNARMTHYQAMLLDTDRVQFGPVVALNPATLLPLPEEGAPHDCLEILAETHGTRPDLTDQPIPDADHTWYTDGSSFLQEGQRKAGAAVTTETEVIWAGALPAGTSAQRAELIALTQALKMAEGKRLNVYTDSRYAFATAHIHGEIYRRRGWLTSEGREIKNKSEILALLKALFLPKRLSIIHCLGHQKGDSAEARGNRLADQAAREAAIKTPPDTSTLLIAGKRTADGSEFEKRTADGSEFESPKKKAKVE

SEQ ID NO: 2116 - protein, 2100 aa, synthetic construct
MPAAKRVKLDGGDKKYSIGLDIGTNSVGWAVITDEYKVPSKKFKVLGNTDRHSIKKNLIGALLFDSGETAEATRLKRTARRRYTRRKNRICYLQEIFSNEMAKVDDSFFHRLEESFLVEEDKKHERHPIFGNIVDEVAYHEKYPTIYHLRKKLVDSTDKADLRLIYLALAHMIKFRGHFLIEGDLNPDNSDVDKLFIQLVQTYNQLFEENPINASGVDAKAILSARLSKSRRLENLIAQLPGEKKNGLFGNLIALSLGLTPNFKSNFDLAEDAKLQLSKDTYDDDLDNLLAQIGDQYADLFLAAKNLSDAILLSDILRVNTEITKAPLSASMIKRYDEHHQDLTLLKALVRQQLPEKYKEIFFDQSKNGYAGYIDGGASQEEFYKFIKPILEKMDGTEELLVKLNREDLLRKQRTFDNGSIPHQIHLGELHAILRRQEDFYPFLKDNREKIEKILTFRIPYYVGPLARGNSRFAWMTRKSEETITPWNFEEVVDKGASAQSFIERMTNFDKNLPNEKVLPKHSLLYEYFTVYNELTKVKYVTEGMRKPAFLSGEQKKAIVDLLFKTNRKVTVKQLKEDYFKKIECFDSVEISGVEDRFNASLGTYHDLLKIIKDKDFLDNEENEDILEDIVLTLTLFEDREMIEERLKTYAHLFDDKVMKQLKRRRYTGWGRLSRKLINGIRDKQSGKTILDFLKSDGFANRNFMQLIHDDSLTFKEDIQKAQVSGQGDSLHEHIANLAGSPAIKKGILQTVKVVDELVKVMGRHKPENIVIEMARENQTTQKGQKNSRERMKRIEEGIKELGSQILKEHPVENTQLQNEKLYLYYLQNGRDMYVDQELDINRLSDYDVDHIVPQSFLKDDSIDNKVLTRSDKARGKSDNVPSEEVVKKMKNYWRQLLNAKLITQRKFDNLTKAERGGLSELDKAGFIKRQLVETRQITKHVAQILDSRMNTKYDENDKLIREVKVITLKSKLVSDFRKDFQFYKVREINNYHHAHDAYLNAVVGTALIKKYPKLESEFVYGDYKVYDVRKMIAKSEQEIGKATAKYFFYSNIMNFFKTEITLANGEIRKRPLIETNGETGEIVWDKGRDFATVRKVLSMPQVNIVKKTEVQTGGFSKESILPKRNSDKLIARKKDWDPKKYGGFDSPTVAYSVLVVAKVEKGKSKKLKSVKELLGITIMERSSFEKNPIDFLEAKGYKEVKKDLIIKLPKYSLFELENGRKRMLASAGELQKGNELALPSKYVNFLYLASHYEKLKGSPEDNEQKQLFVEQHKHYLDEIIEQISEFSKRVILADANLDKVLSAYNKHRDKPIREQAENIIHLFTLTNLGAPAAFKYFDTTIDRKRYTSTKEVLDATLIHQSITGLYETRIDLSQLGGDGGGGGGSGGGGSGGGGSGGLGIEDEYRLHETSTEPDVSLGSTWLSDFPQAWAETGGMGLAVRQAPLIIPLKATSTPVSIQQYPMSHEARLGIKPHIQRLLDQGILVPCQSPWNTPLLPVKKPGTNDYRPVQDLREVNKRVEDIHPTVPNPYNLLSGLPPSHQWYTVLDLKDAFFCLRLHPTSQPLFAFEWRDPGMGISGQLTWTRLPQGFKNSPTLFNEALHRDLADFRIQHPDLILLQYVDDILLAATSELDCQQGTRALLQTLGDLGYRASAKKAQICQKQVKYLGYLLREGQRWLTEARKETVMGQPVPKTPRQLREFLGKAGFCRLFIPGFAEMAAPLYPLTKPGTLFSWGPDQQKAYQEIKQALLTAPALGLPDLTKPFELFVDEKQGYAKGVLTQKLGPWRRPVAYLSKKLDPVAAGWPPCLRMVAAIAVLTKDAGKLTMGQPLVILAPHAVEALVKQPPDRWLSNARMTHYQAMLLDTDRVQFGPVVALNPATLLPLPEEGAPHDCLEILAETHGTRPDLTDQPIPDADHTWYTDGSSFLQEGQRKAGAAVTTETEVIWAGALPAGTSAQRAELIALTQALKMAEGKRLNVYTDSRYAFATAHIHGEIYRRRGWLTSEGREIKNKSEILALLKALFLPKRLSIIHCLGHQKGDSAEARGNRLADQAAREAAIKTPPDTSTLLIAGKRTADGSEFEKRTADGSEFESPKKKAKVE

SEQ ID NO: 2117 - protein, 2096 aa, synthetic construct
MPAAKRVKLDGGDKKYSIGLDIGTNSVGWAVITDEYKVPSKKFKVLGNTDRHSIKKNLIGALLFDSGETAEATRLKRTARRRYTRRKNRICYLQEIFSNEMAKVDDSFFHRLEESFLVEEDKKHERHPIFGNIVDEVAYHEKYPTIYHLRKKLVDSTDKADLRLIYLALAHMIKFRGHFLIEGDLNPDNSDVDKLFIQLVQTYNQLFEENPINASGVDAKAILSARLSKSRRLENLIAQLPGEKKNGLFGNLIALSLGLTPNFKSNFDLAEDAKLQLSKDTYDDDLDNLLAQIGDQYADLFLAAKNLSDAILLSDILRVNTEITKAPLSASMIKRYDEHHQDLTLLKALVRQQLPEKYKEIFFDQSKNGYAGYIDGGASQEEFYKFIKPILEKMDGTEELLVKLNREDLLRKQRTFDNGSIPHQIHLGELHAILRRQEDFYPFLKDNREKIEKILTFRIPYYVGPLARGNSRFAWMTRKSEETITPWNFEEVVDKGASAQSFIERMTNFDKNLPNEKVLPKHSLLYEYFTVYNELTKVKYVTEGMRKPAFLSGEQKKAIVDLLFKTNRKVTVKQLKEDYFKKIECFDSVEISGVEDRFNASLGTYHDLLKIIKDKDFLDNEENEDILEDIVLTLTLFEDREMIEERLKTYAHLFDDKVMKQLKRRRYTGWGRLSRKLINGIRDKQSGKTILDFLKSDGFANRNFMQLIHDDSLTFKEDIQKAQVSGQGDSLHEHIANLAGSPAIKKGILQTVKVVDELVKVMGRHKPENIVIEMARENQTTQKGQKNSRERMKRIEEGIKELGSQILKEHPVENTQLQNEKLYLYYLQNGRDMYVDQELDINRLSDYDVDHIVPQSFLKDDSIDNKVLTRSDKARGKSDNVPSEEVVKKMKNYWRQLLNAKLITQRKFDNLTKAERGGLSELDKAGFIKRQLVETRQITKHVAQILDSRMNTKYDENDKLIREVKVITLKSKLVSDFRKDFQFYKVREINNYHHAHDAYLNAVVGTALIKKYPKLESEFVYGDYKVYDVRKMIAKSEQEIGKATAKYFFYSNIMNFFKTEITLANGEIRKRPLIETNGETGEIVWDKGRDFATVRKVLSMPQVNIVKKTEVQTGGFSKESILPKRNSDKLIARKKDWDPKKYGGFDSPTVAYSVLVVAKVEKGKSKKLKSVKELLGITIMERSSFEKNPIDFLEAKGYKEVKKDLIIKLPKYSLFELENGRKRMLASAGELQKGNELALPSKYVNFLYLASHYEKLKGSPEDNEQKQLFVEQHKHYLDEIIEQISEFSKRVILADANLDKVLSAYNKHRDKPIREQAENIIHLFTLTNLGAPAAFKYFDTTIDRKRYTSTKEVLDATLIHQSITGLYETRIDLSQLGGDGGGSSGGSEAAAKGGLGIEDEYRLHETSTEPDVSLGSTWLSDFPQAWAETGGMGLAVRQAPLIIPLKATSTPVSIQQYPMSHEARLGIKPHIQRLLDQGILVPCQSPWNTPLLPVKKPGTNDYRPVQDLREVNKRVEDIHPTVPNPYNLLSGLPPSHQWYTVLDLKDAFFCLRLHPTSQPLFAFEWRDPGMGISGQLTWTRLPQGFKNSPTLFNEALHRDLADFRIQHPDLILLQYVDDILLAATSELDCQQGTRALLQTLGDLGYRASAKKAQICQKQVKYLGYLLREGQRWLTEARKETVMGQPVPKTPRQLREFLGKAGFCRLFIPGFAEMAAPLYPLTKPGTLFSWGPDQQKAYQEIKQALLTAPALGLPDLTKPFELFVDEKQGYAKGVLTQKLGPWRRPVAYLSKKLDPVAAGWPPCLRMVAAIAVLTKDAGKLTMGQPLVILAPHAVEALVKQPPDRWLSNARMTHYQAMLLDTDRVQFGPVVALNPATLLPLPEEGAPHDCLEILAETHGTRPDLTDQPIPDADHTWYTDGSSFLQEGQRKAGAAVTTETEVIWAGALPAGTSAQRAELIALTQALKMAEGKRLNVYTDSRYAFATAHIHGEIYRRRGWLTSEGREIKNKSEILALLKALFLPKRLSIIHCLGHQKGDSAEARGNRLADQAAREAAIKTPPDTSTLLIAGKRTADGSEFEKRTADGSEFESPKKKAKVE

SEQ ID NO: 2118 - protein, 2100 aa, synthetic construct
MPAAKRVKLDGGDKKYSIGLDIGTNSVGWAVITDEYKVPSKKFKVLGNTDRHSIKKNLIGALLFDSGETAEATRLKRTARRRYTRRKNRICYLQEIFSNEMAKVDDSFFHRLEESFLVEEDKKHERHPIFGNIVDEVAYHEKYPTIYHLRKKLVDSTDKADLRLIYLALAHMIKFRGHFLIEGDLNPDNSDVDKLFIQLVQTYNQLFEENPINASGVDAKAILSARLSKSRRLENLIAQLPGEKKNGLFGNLIALSLGLTPNFKSNFDLAEDAKLQLSKDTYDDDLDNLLAQIGDQYADLFLAAKNLSDAILLSDILRVNTEITKAPLSASMIKRYDEHHQDLTLLKALVRQQLPEKYKEIFFDQSKNGYAGYIDGGASQEEFYKFIKPILEKMDGTEELLVKLNREDLLRKQRTFDNGSIPHQIHLGELHAILRRQEDFYPFLKDNREKIEKILTFRIPYYVGPLARGNSRFAWMTRKSEETITPWNFEEVVDKGASAQSFIERMTNFDKNLPNEKVLPKHSLLYEYFTVYNELTKVKYVTEGMRKPAFLSGEQKKAIVDLLFKTNRKVTVKQLKEDYFKKIECFDSVEISGVEDRFNASLGTYHDLLKIIKDKDFLDNEENEDILEDIVLTLTLFEDREMIEERLKTYAHLFDDKVMKQLKRRRYTGWGRLSRKLINGIRDKQSGKTILDFLKSDGFANRNFMQLIHDDSLTFKEDIQKAQVSGQGDSLHEHIANLAGSPAIKKGILQTVKVVDELVKVMGRHKPENIVIEMARENQTTQKGQKNSRERMKRIEEGIKELGSQILKEHPVENTQLQNEKLYLYYLQNGRDMYVDQELDINRLSDYDVDHIVPQSFLKDDSIDNKVLTRSDKARGKSDNVPSEEVVKKMKNYWRQLLNAKLITQRKFDNLTKAERGGLSELDKAGFIKRQLVETRQITKHVAQILDSRMNTKYDENDKLIREVKVITLKSKLVSDFRKDFQFYKVREINNYHHAHDAYLNAVVGTALIKKYPKLESEFVYGDYKVYDVRKMIAKSEQEIGKATAKYFFYSNIMNFFKTEITLANGEIRKRPLIETNGETGEIVWDKGRDFATVRKVLSMPQVNIVKKTEVQTGGFSKESILPKRNSDKLIARKKDWDPKKYGGFDSPTVAYSVLVVAKVEKGKSKKLKSVKELLGITIMERSSFEKNPIDFLEAKGYKEVKKDLIIKLPKYSLFELENGRKRMLASAGELQKGNELALPSKYVNFLYLASHYEKLKGSPEDNEQKQLFVEQHKHYLDEIIEQISEFSKRVILADANLDKVLSAYNKHRDKPIREQAENIIHLFTLTNLGAPAAFKYFDTTIDRKRYTSTKEVLDATLIHQSITGLYETRIDLSQLGGDGGGGSGGSGGSGGSGGSGGLGIEDEYRLHETSTEPDVSLGSTWLSDFPQAWAETGGMGLAVRQAPLIIPLKATSTPVSIQQYPMSHEARLGIKPHIQRLLDQGILVPCQSPWNTPLLPVKKPGTNDYRPVQDLREVNKRVEDIHPTVPNPYNLLSGLPPSHQWYTVLDLKDAFFCLRLHPTSQPLFAFEWRDPGMGISGQLTWTRLPQGFKNSPTLFNEALHRDLADFRIQHPDLILLQYVDDILLAATSELDCQQGTRALLQTLGDLGYRASAKKAQICQKQVKYLGYLLREGQRWLTEARKETVMGQPVPKTPRQLREFLGKAGFCRLFIPGFAEMAAPLYPLTKPGTLFSWGPDQQKAYQEIKQALLTAPALGLPDLTKPFELFVDEKQGYAKGVLTQKLGPWRRPVAYLSKKLDPVAAGWPPCLRMVAAIAVLTKDAGKLTMGQPLVILAPHAVEALVKQPPDRWLSNARMTHYQAMLLDTDRVQFGPVVALNPATLLPLPEEGAPHDCLEILAETHGTRPDLTDQPIPDADHTWYTDGSSFLQEGQRKAGAAVTTETEVIWAGALPAGTSAQRAELIALTQALKMAEGKRLNVYTDSRYAFATAHIHGEIYRRRGWLTSEGREIKNKSEILALLKALFLPKRLSIIHCLGHQKGDSAEARGNRLADQAAREAAIKTPPDTSTLLIAGKRTADGSEFEKRTADGSEFESPKKKAKVE

SEQ ID NO: 2119 - protein, 2096 aa, synthetic construct
MPAAKRVKLDGGDKKYSIGLDIGTNSVGWAVITDEYKVPSKKFKVLGNTDRHSIKKNLIGALLFDSGETAEATRLKRTARRRYTRRKNRICYLQEIFSNEMAKVDDSFFHRLEESFLVEEDKKHERHPIFGNIVDEVAYHEKYPTIYHLRKKLVDSTDKADLRLIYLALAHMIKFRGHFLIEGDLNPDNSDVDKLFIQLVQTYNQLFEENPINASGVDAKAILSARLSKSRRLENLIAQLPGEKKNGLFGNLIALSLGLTPNFKSNFDLAEDAKLQLSKDTYDDDLDNLLAQIGDQYADLFLAAKNLSDAILLSDILRVNTEITKAPLSASMIKRYDEHHQDLTLLKALVRQQLPEKYKEIFFDQSKNGYAGYIDGGASQEEFYKFIKPILEKMDGTEELLVKLNREDLLRKQRTFDNGSIPHQIHLGELHAILRRQEDFYPFLKDNREKIEKILTFRIPYYVGPLARGNSRFAWMTRKSEETITPWNFEEVVDKGASAQSFIERMTNFDKNLPNEKVLPKHSLLYEYFTVYNELTKVKYVTEGMRKPAFLSGEQKKAIVDLLFKTNRKVTVKQLKEDYFKKIECFDSVEISGVEDRFNASLGTYHDLLKIIKDKDFLDNEENEDILEDIVLTLTLFEDREMIEERLKTYAHLFDDKVMKQLKRRRYTGWGRLSRKLINGIRDKQSGKTILDFLKSDGFANRNFMQLIHDDSLTFKEDIQKAQVSGQGDSLHEHIANLAGSPAIKKGILQTVKVVDELVKVMGRHKPENIVIEMARENQTTQKGQKNSRERMKRIEEGIKELGSQILKEHPVENTQLQNEKLYLYYLQNGRDMYVDQELDINRLSDYDVDHIVPQSFLKDDSIDNKVLTRSDKARGKSDNVPSEEVVKKMKNYWRQLLNAKLITQRKFDNLTKAERGGLSELDKAGFIKRQLVETRQITKHVAQILDSRMNTKYDENDKLIREVKVITLKSKLVSDFRKDFQFYKVREINNYHHAHDAYLNAVVGTALIKKYPKLESEFVYGDYKVYDVRKMIAKSEQEIGKATAKYFFYSNIMNFFKTEITLANGEIRKRPLIETNGETGEIVWDKGRDFATVRKVLSMPQVNIVKKTEVQTGGFSKESILPKRNSDKLIARKKDWDPKKYGGFDSPTVAYSVLVVAKVEKGKSKKLKSVKELLGITIMERSSFEKNPIDFLEAKGYKEVKKDLIIKLPKYSLFELENGRKRMLASAGELQKGNELALPSKYVNFLYLASHYEKLKGSPEDNEQKQLFVEQHKHYLDEIIEQISEFSKRVILADANLDKVLSAYNKHRDKPIREQAENIIHLFTLTNLGAPAAFKYFDTTIDRKRYTSTKEVLDATLIHQSITGLYETRIDLSQLGGDGGEAAAKGSSGGSGGLGIEDEYRLHETSTEPDVSLGSTWLSDFPQAWAETGGMGLAVRQAPLIIPLKATSTPVSIQQYPMSHEARLGIKPHIQRLLDQGILVPCQSPWNTPLLPVKKPGTNDYRPVQDLREVNKRVEDIHPTVPNPYNLLSGLPPSHQWYTVLDLKDAFFCLRLHPTSQPLFAFEWRDPGMGISGQLTWTRLPQGFKNSPTLFNEALHRDLADFRIQHPDLILLQYVDDILLAATSELDCQQGTRALLQTLGDLGYRASAKKAQICQKQVKYLGYLLREGQRWLTEARKETVMGQPVPKTPRQLREFLGKAGFCRLFIPGFAEMAAPLYPLTKPGTLFSWGPDQQKAYQEIKQALLTAPALGLPDLTKPFELFVDEKQGYAKGVLTQKLGPWRRPVAYLSKKLDPVAAGWPPCLRMVAAIAVLTKDAGKLTMGQPLVILAPHAVEALVKQPPDRWLSNARMTHYQAMLLDTDRVQFGPVVALNPATLLPLPEEGAPHDCLEILAETHGTRPDLTDQPIPDADHTWYTDGSSFLQEGQRKAGAAVTTETEVIWAGALPAGTSAQRAELIALTQALKMAEGKRLNVYTDSRYAFATAHIHGEIYRRRGWLTSEGREIKNKSEILALLKALFLPKRLSIIHCLGHQKGDSAEARGNRLADQAAREAAIKTPPDTSTLLIAGKRTADGSEFEKRTADGSEFESPKKKAKVE

SEQ ID NO: 2120 - protein, 2096 aa, synthetic construct
MPAAKRVKLDGGDKKYSIGLDIGTNSVGWAVITDEYKVPSKKFKVLGNTDRHSIKKNLIGALLFDSGETAEATRLKRTARRRYTRRKNRICYLQEIFSNEMAKVDDSFFHRLEESFLVEEDKKHERHPIFGNIVDEVAYHEKYPTIYHLRKKLVDSTDKADLRLIYLALAHMIKFRGHFLIEGDLNPDNSDVDKLFIQLVQTYNQLFEENPINASGVDAKAILSARLSKSRRLENLIAQLPGEKKNGLFGNLIALSLGLTPNFKSNFDLAEDAKLQLSKDTYDDDLDNLLAQIGDQYADLFLAAKNLSDAILLSDILRVNTEITKAPLSASMIKRYDEHHQDLTLLKALVRQQLPEKYKEIFFDQSKNGYAGYIDGGASQEEFYKFIKPILEKMDGTEELLVKLNREDLLRKQRTFDNGSIPHQIHLGELHAILRRQEDFYPFLKDNREKIEKILTFRIPYYVGPLARGNSRFAWMTRKSEETITPWNFEEVVDKGASAQSFIERMTNFDKNLPNEKVLPKHSLLYEYFTVYNELTKVKYVTEGMRKPAFLSGEQKKAIVDLLFKTNRKVTVKQLKEDYFKKIECFDSVEISGVEDRFNASLGTYHDLLKIIKDKDFLDNEENEDILEDIVLTLTLFEDREMIEERLKTYAHLFDDKVMKQLKRRRYTGWGRLSRKLINGIRDKQSGKTILDFLKSDGFANRNFMQLIHDDSLTFKEDIQKAQVSGQGDSLHEHIANLAGSPAIKKGILQTVKVVDELVKVMGRHKPENIVIEMARENQTTQKGQKNSRERMKRIEEGIKELGSQILKEHPVENTQLQNEKLYLYYLQNGRDMYVDQELDINRLSDYDVDHIVPQSFLKDDSIDNKVLTRSDKARGKSDNVPSEEVVKKMKNYWRQLLNAKLITQRKFDNLTKAERGGLSELDKAGFIKRQLVETRQITKHVAQILDSRMNTKYDENDKLIREVKVITLKSKLVSDFRKDFQFYKVREINNYHHAHDAYLNAVVGTALIKKYPKLESEFVYGDYKVYDVRKMIAKSEQEIGKATAKYFFYSNIMNFFKTEITLANGEIRKRPLIETNGETGEIVWDKGRDFATVRKVLSMPQVNIVKKTEVQTGGFSKESILPKRNSDKLIARKKDWDPKKYGGFDSPTVAYSVLVVAKVEKGKSKKLKSVKELLGITIMERSSFEKNPIDFLEAKGYKEVKKDLIIKLPKYSLFELENGRKRMLASAGELQKGNELALPSKYVNFLYLASHYEKLKGSPEDNEQKQLFVEQHKHYLDEIIEQISEFSKRVILADANLDKVLSAYNKHRDKPIREQAENIIHLFTLTNLGAPAAFKYFDTTIDRKRYTSTKEVLDATLIHQSITGLYETRIDLSQLGGDGGPAPEAAAKGGGGGLGIEDEYRLHETSTEPDVSLGSTWLSDFPQAWAETGGMGLAVRQAPLIIPLKATSTPVSIQQYPMSHEARLGIKPHIQRLLDQGILVPCQSPWNTPLLPVKKPGTNDYRPVQDLREVNKRVEDIHPTVPNPYNLLSGLPPSHQWYTVLDLKDAFFCLRLHPTSQPLFAFEWRDPGMGISGQLTWTRLPQGFKNSPTLFNEALHRDLADFRIQHPDLILLQYVDDILLAATSELDCQQGTRALLQTLGDLGYRASAKKAQICQKQVKYLGYLLREGQRWLTEARKETVMGQPVPKTPRQLREFLGKAGFCRLFIPGFAEMAAPLYPLTKPGTLFSWGPDQQKAYQEIKQALLTAPALGLPDLTKPFELFVDEKQGYAKGVLTQKLGPWRRPVAYLSKKLDPVAAGWPPCLRMVAAIAVLTKDAGKLTMGQPLVILAPHAVEALVKQPPDRWLSNARMTHYQAMLLDTDRVQFGPVVALNPATLLPLPEEGAPHDCLEILAETHGTRPDLTDQPIPDADHTWYTDGSSFLQEGQRKAGAAVTTETEVIWAGALPAGTSAQRAELIALTQALKMAEGKRLNVYTDSRYAFATAHIHGEIYRRRGWLTSEGREIKNKSEILALLKALFLPKRLSIIHCLGHQKGDSAEARGNRLADQAAREAAIKTPPDTSTLLIAGKRTADGSEFEKRTADGSEFESPKKKAKVE

SEQ ID NO: 2121 - protein, 2101 aa, synthetic construct
MPAAKRVKLDGGDKKYSIGLDIGTNSVGWAVITDEYKVPSKKFKVLGNTDRHSIKKNLIGALLFDSGETAEATRLKRTARRRYTRRKNRICYLQEIFSNEMAKVDDSFFHRLEESFLVEEDKKHERHPIFGNIVDEVAYHEKYPTIYHLRKKLVDSTDKADLRLIYLALAHMIKFRGHFLIEGDLNPDNSDVDKLFIQLVQTYNQLFEENPINASGVDAKAILSARLSKSRRLENLIAQLPGEKKNGLFGNLIALSLGLTPNFKSNFDLAEDAKLQLSKDTYDDDLDNLLAQIGDQYADLFLAAKNLSDAILLSDILRVNTEITKAPLSASMIKRYDEHHQDLTLLKALVRQQLPEKYKEIFFDQSKNGYAGYIDGGASQEEFYKFIKPILEKMDGTEELLVKLNREDLLRKQRTFDNGSIPHQIHLGELHAILRRQEDFYPFLKDNREKIEKILTFRIPYYVGPLARGNSRFAWMTRKSEETITPWNFEEVVDKGASAQSFIERMTNFDKNLPNEKVLPKHSLLYEYFTVYNELTKVKYVTEGMRKPAFLSGEQKKAIVDLLFKTNRKVTVKQLKEDYFKKIECFDSVEISGVEDRFNASLGTYHDLLKIIKDKDFLDNEENEDILEDIVLTLTLFEDREMIEERLKTYAHLFDDKVMKQLKRRRYTGWGRLSRKLINGIRDKQSGKTILDFLKSDGFANRNFMQLIHDDSLTFKEDIQKAQVSGQGDSLHEHIANLAGSPAIKKGILQTVKVVDELVKVMGRHKPENIVIEMARENQTTQKGQKNSRERMKRIEEGIKELGSQILKEHPVENTQLQNEKLYLYYLQNGRDMYVDQELDINRLSDYDVDHIVPQSFLKDDSIDNKVLTRSDKARGKSDNVPSEEVVKKMKNYWRQLLNAKLITQRKFDNLTKAERGGLSELDKAGFIKRQLVETRQITKHVAQILDSRMNTKYDENDKLIREVKVITLKSKLVSDFRKDFQFYKVREINNYHHAHDAYLNAVVGTALIKKYPKLESEFVYGDYKVYDVRKMIAKSEQEIGKATAKYFFYSNIMNFFKTEITLANGEIRKRPLIETNGETGEIVWDKGRDFATVRKVLSMPQVNIVKKTEVQTGGFSKESILPKRNSDKLIARKKDWDPKKYGGFDSPTVAYSVLVVAKVEKGKSKKLKSVKELLGITIMERSSFEKNPIDFLEAKGYKEVKKDLIIKLPKYSLFELENGRKRMLASAGELQKGNELALPSKYVNFLYLASHYEKLKGSPEDNEQKQLFVEQHKHYLDEIIEQISEFSKRVILADANLDKVLSAYNKHRDKPIREQAENIIHLFTLTNLGAPAAFKYFDTTIDRKRYTSTKEVLDATLIHQSITGLYETRIDLSQLGGDGGSGSETPGTSESATPESGGLGIEDEYRLHETSTEPDVSLGSTWLSDFPQAWAETGGMGLAVRQAPLIIPLKATSTPVSIQQYPMSHEARLGIKPHIQRLLDQGILVPCQSPWNTPLLPVKKPGTNDYRPVQDLREVNKRVEDIHPTVPNPYNLLSGLPPSHQWYTVLDLKDAFFCLRLHPTSQPLFAFEWRDPGMGISGQLTWTRLPQGFKNSPTLFNEALHRDLADFRIQHPDLILLQYVDDILLAATSELDCQQGTRALLQTLGDLGYRASAKKAQICQKQVKYLGYLLREGQRWLTEARKETVMGQPVPKTPRQLREFLGKAGFCRLFIPGFAEMAAPLYPLTKPGTLFSWGPDQQKAYQEIKQALLTAPALGLPDLTKPFELFVDEKQGYAKGVLTQKLGPWRRPVAYLSKKLDPVAAGWPPCLRMVAAIAVLTKDAGKLTMGQPLVILAPHAVEALVKQPPDRWLSNARMTHYQAMLLDTDRVQFGPVVALNPATLLPLPEEGAPHDCLEILAETHGTRPDLTDQPIPDADHTWYTDGSSFLQEGQRKAGAAVTTETEVIWAGALPAGTSAQRAELIALTQALKMAEGKRLNVYTDSRYAFATAHIHGEIYRRRGWLTSEGREIKNKSEILALLKALFLPKRLSIIHCLGHQKGDSAEARGNRLADQAAREAAIKTPPDTSTLLIAGKRTADGSEFEKRTADGSEFESPKKKAKVE

SEQ ID NO: 2122 - protein, 2094 aa, synthetic construct; identical to SEQ ID NO: 2058

SEQ ID NO: 2123 - protein, 2096 aa, synthetic construct; identical to SEQ ID NO: 2054

SEQ ID NO: 2124 - protein, 2091 aa, synthetic construct
MPAAKRVKLDGGDKKYSIGLDIGTNSVGWAVITDEYKVPSKKFKVLGNTDRHSIKKNLIGALLFDSGETAEATRLKRTARRRYTRRKNRICYLQEIFSNEMAKVDDSFFHRLEESFLVEEDKKHERHPIFGNIVDEVAYHEKYPTIYHLRKKLVDSTDKADLRLIYLALAHMIKFRGHFLIEGDLNPDNSDVDKLFIQLVQTYNQLFEENPINASGVDAKAILSARLSKSRRLENLIAQLPGEKKNGLFGNLIALSLGLTPNFKSNFDLAEDAKLQLSKDTYDDDLDNLLAQIGDQYADLFLAAKNLSDAILLSDILRVNTEITKAPLSASMIKRYDEHHQDLTLLKALVRQQLPEKYKEIFFDQSKNGYAGYIDGGASQEEFYKFIKPILEKMDGTEELLVKLNREDLLRKQRTFDNGSIPHQIHLGELHAILRRQEDFYPFLKDNREKIEKILTFRIPYYVGPLARGNSRFAWMTRKSEETITPWNFEEVVDKGASAQSFIERMTNFDKNLPNEKVLPKHSLLYEYFTVYNELTKVKYVTEGMRKPAFLSGEQKKAIVDLLFKTNRKVTVKQLKEDYFKKIECFDSVEISGVEDRFNASLGTYHDLLKIIKDKDFLDNEENEDILEDIVLTLTLFEDREMIEERLKTYAHLFDDKVMKQLKRRRYTGWGRLSRKLINGIRDKQSGKTILDFLKSDGFANRNFMQLIHDDSLTFKEDIQKAQVSGQGDSLHEHIANLAGSPAIKKGILQTVKVVDELVKVMGRHKPENIVIEMARENQTTQKGQKNSRERMKRIEEGIKELGSQILKEHPVENTQLQNEKLYLYYLQNGRDMYVDQELDINRLSDYDVDHIVPQSFLKDDSIDNKVLTRSDKARGKSDNVPSEEVVKKMKNYWRQLLNAKLITQRKFDNLTKAERGGLSELDKAGFIKRQLVETRQITKHVAQILDSRMNTKYDENDKLIREVKVITLKSKLVSDFRKDFQFYKVREINNYHHAHDAYLNAVVGTALIKKYPKLESEFVYGDYKVYDVRKMIAKSEQEIGKATAKYFFYSNIMNFFKTEITLANGEIRKRPLIETNGETGEIVWDKGRDFATVRKVLSMPQVNIVKKTEVQTGGFSKESILPKRNSDKLIARKKDWDPKKYGGFDSPTVAYSVLVVAKVEKGKSKKLKSVKELLGITIMERSSFEKNPIDFLEAKGYKEVKKDLIIKLPKYSLFELENGRKRMLASAGELQKGNELALPSKYVNFLYLASHYEKLKGSPEDNEQKQLFVEQHKHYLDEIIEQISEFSKRVILADANLDKVLSAYNKHRDKPIREQAENIIHLFTLTNLGAPAAFKYFDTTIDRKRYTSTKEVLDATLIHQSITGLYETRIDLSQLGGDGGGSSPAPGGLGIEDEYRLHETSTEPDVSLGSTWLSDFPQAWAETGGMGLAVRQAPLIIPLKATSTPVSIQQYPMSHEARLGIKPHIQRLLDQGILVPCQSPWNTPLLPVKKPGTNDYRPVQDLREVNKRVEDIHPTVPNPYNLLSGLPPSHQWYTVLDLKDAFFCLRLHPTSQPLFAFEWRDPGMGISGQLTWTRLPQGFKNSPTLFNEALHRDLADFRIQHPDLILLQYVDDILLAATSELDCQQGTRALLQTLGDLGYRASAKKAQICQKQVKYLGYLLREGQRWLTEARKETVMGQPVPKTPRQLREFLGKAGFCRLFIPGFAEMAAPLYPLTKPGTLFSWGPDQQKAYQEIKQALLTAPALGLPDLTKPFELFVDEKQGYAKGVLTQKLGPWRRPVAYLSKKLDPVAAGWPPCLRMVAAIAVLTKDAGKLTMGQPLVILAPHAVEALVKQPPDRWLSNARMTHYQAMLLDTDRVQFGPVVALNPATLLPLPEEGAPHDCLEILAETHGTRPDLTDQPIPDADHTWYTDGSSFLQEGQRKAGAAVTTETEVIWAGALPAGTSAQRAELIALTQALKMAEGKRLNVYTDSRYAFATAHIHGEIYRRRGWLTSEGREIKNKSEILALLKALFLPKRLSIIHCLGHQKGDSAEARGNRLADQAAREAAIKTPPDTSTLLIAGKRTADGSEFEKRTADGSEFESPKKKAKVE

SEQ ID NO: 2125 - protein, 2090 aa, synthetic construct
MPAAKRVKLDGGDKKYSIGLDIGTNSVGWAVITDEYKVPSKKFKVLGNTDRHSIKKNLIGALLFDSGETAEATRLKRTARRRYTRRKNRICYLQEIFSNEMAKVDDSFFHRLEESFLVEEDKKHERHPIFGNIVDEVAYHEKYPTIYHLRKKLVDSTDKADLRLIYLALAHMIKFRGHFLIEGDLNPDNSDVDKLFIQLVQTYNQLFEENPINASGVDAKAILSARLSKSRRLENLIAQLPGEKKNGLFGNLIALSLGLTPNFKSNFDLAEDAKLQLSKDTYDDDLDNLLAQIGDQYADLFLAAKNLSDAILLSDILRVNTEITKAPLSASMIKRYDEHHQDLTLLKALVRQQLPEKYKEIFFDQSKNGYAGYIDGGASQEEFYKFIKPILEKMDGTEELLVKLNREDLLRKQRTFDNGSIPHQIHLGELHAILRRQEDFYPFLKDNREKIEKILTFRIPYYVGPLARGNSRFAWMTRKSEETITPWNFEEVVDKGASAQSFIERMTNFDKNLPNEKVLPKHSLLYEYFTVYNELTKVKYVTEGMRKPAFLSGEQKKAIVDLLFKTNRKVTVKQLKEDYFKKIECFDSVEISGVEDRFNASLGTYHDLLKIIKDKDFLDNEENEDILEDIVLTLTLFEDREMIEERLKTYAHLFDDKVMKQLKRRRYTGWGRLSRKLINGIRDKQSGKTILDFLKSDGFANRNFMQLIHDDSLTFKEDIQKAQVSGQGDSLHEHIANLAGSPAIKKGILQTVKVVDELVKVMGRHKPENIVIEMARENQTTQKGQKNSRERMKRIEEGIKELGSQILKEHPVENTQLQNEKLYLYYLQNGRDMYVDQELDINRLSDYDVDHIVPQSFLKDDSIDNKVLTRSDKARGKSDNVPSEEVVKKMKNYWRQLLNAKLITQRKFDNLTKAERGGLSELDKAGFIKRQLVETRQITKHVAQILDSRMNTKYDENDKLIREVKVITLKSKLVSDFRKDFQFYKVREINNYHHAHDAYLNAVVGTALIKKYPKLESEFVYGDYKVYDVRKMIAKSEQEIGKATAKYFFYSNIMNFFKTEITLANGEIRKRPLIETNGETGEIVWDKGRDFATVRKVLSMPQVNIVKKTEVQTGGFSKESILPKRNSDKLIARKKDWDPKKYGGFDSPTVAYSVLVVAKVEKGKSKKLKSVKELLGITIMERSSFEKNPIDFLEAKGYKEVKKDLIIKLPKYSLFELENGRKRMLASAGELQKGNELALPSKYVNFLYLASHYEKLKGSPEDNEQKQLFVEQHKHYLDEIIEQISEFSKRVILADANLDKVLSAYNKHRDKPIREQAENIIHLFTLTNLGAPAAFKYFDTTIDRKRYTSTKEVLDATLIHQSITGLYETRIDLSQLGGDGGGGGGSGGLGIEDEYRLHETSTEPDVSLGSTWLSDFPQAWAETGGMGLAVRQAPLIIPLKATSTPVSIQQYPMSHEARLGIKPHIQRLLDQGILVPCQSPWNTPLLPVKKPGTNDYRPVQDLREVNKRVEDIHPTVPNPYNLLSGLPPSHQWYTVLDLKDAFFCLRLHPTSQPLFAFEWRDPGMGISGQLTWTRLPQGFKNSPTLFNEALHRDLADFRIQHPDLILLQYVDDILLAATSELDCQQGTRALLQTLGDLGYRASAKKAQICQKQVKYLGYLLREGQRWLTEARKETVMGQPVPKTPRQLREFLGKAGFCRLFIPGFAEMAAPLYPLTKPGTLFSWGPDQQKAYQEIKQALLTAPALGLPDLTKPFELFVDEKQGYAKGVLTQKLGPWRRPVAYLSKKLDPVAAGWPPCLRMVAAIAVLTKDAGKLTMGQPLVILAPHAVEALVKQPPDRWLSNARMTHYQAMLLDTDRVQFGPVVALNPATLLPLPEEGAPHDCLEILAETHGTRPDLTDQPIPDADHTWYTDGSSFLQEGQRKAGAAVTTETEVIWAGALPAGTSAQRAELIALTQALKMAEGKRLNVYTDSRYAFATAHIHGEIYRRRGWLTSEGREIKNKSEILALLKALFLPKRLSIIHCLGHQKGDSAEARGNRLADQAAREAAIKTPPDTSTLLIAGKRTADGSEFEKRTADGSEFESPKKKAKVE

SEQ ID NO: 2126 - protein, 2096 aa, synthetic construct; identical to SEQ ID NO: 2052

SEQ ID NO: 2127 - protein, 2091 aa, synthetic construct
MPAAKRVKLDGGDKKYSIGLDIGTNSVGWAVITDEYKVPSKKFKVLGNTDRHSIKKNLIGALLFDSGETAEATRLKRTARRRYTRRKNRICYLQEIFSNEMAKVDDSFFHRLEESFLVEEDKKHERHPIFGNIVDEVAYHEKYPTIYHLRKKLVDSTDKADLRLIYLALAHMIKFRGHFLIEGDLNPDNSDVDKLFIQLVQTYNQLFEENPINASGVDAKAILSARLSKSRRLENLIAQLPGEKKNGLFGNLIALSLGLTPNFKSNFDLAEDAKLQLSKDTYDDDLDNLLAQIGDQYADLFLAAKNLSDAILLSDILRVNTEITKAPLSASMIKRYDEHHQDLTLLKALVRQQLPEKYKEIFFDQSKNGYAGYIDGGASQEEFYKFIKPILEKMDGTEELLVKLNREDLLRKQRTFDNGSIPHQIHLGELHAILRRQEDFYPFLKDNREKIEKILTFRIPYYVGPLARGNSRFAWMTRKSEETITPWNFEEVVDKGASAQSFIERMTNFDKNLPNEKVLPKHSLLYEYFTVYNELTKVKYVTEGMRKPAFLSGEQKKAIVDLLFKTNRKVTVKQLKEDYFKKIECFDSVEISGVEDRFNASLGTYHDLLKIIKDKDFLDNEENEDILEDIVLTLTLFEDREMIEERLKTYAHLFDDKVMKQLKRRRYTGWGRLSRKLINGIRDKQSGKTILDFLKSDGFANRNFMQLIHDDSLTFKEDIQKAQVSGQGDSLHEHIANLAGSPAIKKGILQTVKVVDELVKVMGRHKPENIVIEMARENQTTQKGQKNSRERMKRIEEGIKELGSQILKEHPVENTQLQNEKLYLYYLQNGRDMYVDQELDINRLSDYDVDHIVPQSFLKDDSIDNKVLTRSDKARGKSDNVPSEEVVKKMKNYWRQLLNAKLITQRKFDNLTKAERGGLSELDKAGFIKRQLVETRQITKHVAQILDSRMNTKYDENDKLIREVKVITLKSKLVSDFRKDFQFYKVREINNYHHAHDAYLNAVVGTALIKKYPKLESEFVYGDYKVYDVRKMIAKSEQEIGKATAKYFFYSNIMNFFKTEITLANGEIRKRPLIETNGETGEIVWDKGRDFATVRKVLSMPQVNIVKKTEVQTGGFSKESILPKRNSDKLIARKKDWDPKKYGGFDSPTVAYSVLVVAKVEKGKSKKLKSVKELLGITIMERSSFEKNPIDFLEAKGYKEVKKDLIIKLPKYSLFELENGRKRMLASAGELQKGNELALPSKYVNFLYLASHYEKLKGSPEDNEQKQLFVEQHKHYLDEIIEQISEFSKRVILADANLDKVLSAYNKHRDKPIREQAENIIHLFTLTNLGAPAAFKYFDTTIDRKRYTSTKEVLDATLIHQSITGLYETRIDLSQLGGDGGGGGPAPGGLGIEDEYRLHETSTEPDVSLGSTWLSDFPQAWAETGGMGLAVRQAPLIIPLKATSTPVSIQQYPMSHEARLGIKPHIQRLLDQGILVPCQSPWNTPLLPVKKPGTNDYRPVQDLREVNKRVEDIHPTVPNPYNLLSGLPPSHQWYTVLDLKDAFFCLRLHPTSQPLFAFEWRDPGMGISGQLTWTRLPQGFKNSPTLFNEALHRDLADFRIQHPDLILLQYVDDILLAATSELDCQQGTRALLQTLGDLGYRASAKKAQICQKQVKYLGYLLREGQRWLTEARKETVMGQPVPKTPRQLREFLGKAGFCRLFIPGFAEMAAPLYPLTKPGTLFSWGPDQQKAYQEIKQALLTAPALGLPDLTKPFELFVDEKQGYAKGVLTQKLGPWRRPVAYLSKKLDPVAAGWPPCLRMVAAIAVLTKDAGKLTMGQPLVILAPHAVEALVKQPPDRWLSNARMTHYQAMLLDTDRVQFGPVVALNPATLLPLPEEGAPHDCLEILAETHGTRPDLTDQPIPDADHTWYTDGSSFLQEGQRKAGAAVTTETEVIWAGALPAGTSAQRAELIALTQALKMAEGKRLNVYTDSRYAFATAHIHGEIYRRRGWLTSEGREIKNKSEILALLKALFLPKRLSIIHCLGHQKGDSAEARGNRLADQAAREAAIKTPPDTSTLLIAGKRTADGSEFEKRTADGSEFESPKKKAKVE

SEQ ID NO: 2128 - protein, 2095 aa, synthetic construct
MPAAKRVKLDGGDKKYSIGLDIGTNSVGWAVITDEYKVPSKKFKVLGNTDRHSIKKNLIGALLFDSGETAEATRLKRTARRRYTRRKNRICYLQEIFSNEMAKVDDSFFHRLEESFLVEEDKKHERHPIFGNIVDEVAYHEKYPTIYHLRKKLVDSTDKADLRLIYLALAHMIKFRGHFLIEGDLNPDNSDVDKLFIQLVQTYNQLFEENPINASGVDAKAILSARLSKSRRLENLIAQLPGEKKNGLFGNLIALSLGLTPNFKSNFDLAEDAKLQLSKDTYDDDLDNLLAQIGDQYADLFLAAKNLSDAILLSDILRVNTEITKAPLSASMIKRYDEHHQDLTLLKALVRQQLPEKYKEIFFDQSKNGYAGYIDGGASQEEFYKFIKPILEKMDGTEELLVKLNREDLLRKQRTFDNGSIPHQIHLGELHAILRRQEDFYPFLKDNREKIEKILTFRIPYYVGPLARGNSRFAWMTRKSEETITPWNFEEVVDKGASAQSFIERMTNFDKNLPNEKVLPKHSLLYEYFTVYNELTKVKYVTEGMRKPAFLSGEQKKAIVDLLFKTNRKVTVKQLKEDYFKKIECFDSVEISGVEDRFNASLGTYHDLLKIIKDKDFLDNEENEDILEDIVLTLTLFEDREMIEERLKTYAHLFDDKVMKQLKRRRYTGWGRLSRKLINGIRDKQSGKTILDFLKSDGFANRNFMQLIHDDSLTFKEDIQKAQVSGQGDSLHEHIANLAGSPAIKKGILQTVKVVDELVKVMGRHKPENIVIEMARENQTTQKGQKNSRERMKRIEEGIKELGSQILKEHPVENTQLQNEKLYLYYLQNGRDMYVDQELDINRLSDYDVDHIVPQSFLKDDSIDNKVLTRSDKARGKSDNVPSEEVVKKMKNYWRQLLNAKLITQRKFDNLTKAERGGLSELDKAGFIKRQLVETRQITKHVAQILDSRMNTKYDENDKLIREVKVITLKSKLVSDFRKDFQFYKVREINNYHHAHDAYLNAVVGTALIKKYPKLESEFVYGDYKVYDVRKMIAKSEQEIGKATAKYFFYSNIMNFFKTEITLANGEIRKRPLIETNGETGEIVWDKGRDFATVRKVLSMPQVNIVKKTEVQTGGFSKESILPKRNSDKLIARKKDWDPKKYGGFDSPTVAYSVLVVAKVEKGKSKKLKSVKELLGITIMERSSFEKNPIDFLEAKGYKEVKKDLIIKLPKYSLFELENGRKRMLASAGELQKGNELALPSKYVNFLYLASHYEKLKGSPEDNEQKQLFVEQHKHYLDEIIEQISEFSKRVILADANLDKVLSAYNKHRDKPIREQAENIIHLFTLTNLGAPAAFKYFDTTIDRKRYTSTKEVLDATLIHQSITGLYETRIDLSQLGGDGGEAAAKEAAAKGGLGIEDEYRLHETSTEPDVSLGSTWLSDFPQAWAETGGMGLAVRQAPLIIPLKATSTPVSIQQYPMSHEARLGIKPHIQRLLDQGILVPCQSPWNTPLLPVKKPGTNDYRPVQDLREVNKRVEDIHPTVPNPYNLLSGLPPSHQWYTVLDLKDAFFCLRLHPTSQPLFAFEWRDPGMGISGQLTWTRLPQGFKNSPTLFNEALHRDLADFRIQHPDLILLQYVDDILLAATSELDCQQGTRALLQTLGDLGYRASAKKAQICQKQVKYLGYLLREGQRWLTEARKETVMGQPVPKTPRQLREFLGKAGFCRLFIPGFAEMAAPLYPLTKPGTLFSWGPDQQKAYQEIKQALLTAPALGLPDLTKPFELFVDEKQGYAKGVLTQKLGPWRRPVAYLSKKLDPVAAGWPPCLRMVAAIAVLTKDAGKLTMGQPLVILAPHAVEALVKQPPDRWLSNARMTHYQAMLLDTDRVQFGPVVALNPATLLPLPEEGAPHDCLEILAETHGTRPDLTDQPIPDADHTWYTDGSSFLQEGQRKAGAAVTTETEVIWAGALPAGTSAQRAELIALTQALKMAEGKRLNVYTDSRYAFATAHIHGEIYRRRGWLTSEGREIKNKSEILALLKALFLPKRLSIIHCLGHQKGDSAEARGNRLADQAAREAAIKTPPDTSTLLIAGKRTADGSEFEKRTADGSEFESPKKKAKVE

SEQ ID NO: 2129 - protein, 2096 aa, synthetic construct; identical to SEQ ID NO: 2059

SEQ ID NO: 2130 - protein, 2096 aa, synthetic construct
MPAAKRVKLDGGDKKYSIGLDIGTNSVGWAVITDEYKVPSKKFKVLGNTDRHSIKKNLIGALLFDSGETAEATRLKRTARRRYTRRKNRICYLQEIFSNEMAKVDDSFFHRLEESFLVEEDKKHERHPIFGNIVDEVAYHEKYPTIYHLRKKLVDSTDKADLRLIYLALAHMIKFRGHFLIEGDLNPDNSDVDKLFIQLVQTYNQLFEENPINASGVDAKAILSARLSKSRRLENLIAQLPGEKKNGLFGNLIALSLGLTPNFKSNFDLAEDAKLQLSKDTYDDDLDNLLAQIGDQYADLFLAAKNLSDAILLSDILRVNTEITKAPLSASMIKRYDEHHQDLTLLKALVRQQLPEKYKEIFFDQSKNGYAGYIDGGASQEEFYKFIKPILEKMDGTEELLVKLNREDLLRKQRTFDNGSIPHQIHLGELHAILRRQEDFYPFLKDNREKIEKILTFRIPYYVGPLARGNSRFAWMTRKSEETITPWNFEEVVDKGASAQSFIERMTNFDKNLPNEKVLPKHSLLYEYFTVYNELTKVKYVTEGMRKPAFLSGEQKKAIVDLLFKTNRKVTVKQLKEDYFKKIECFDSVEISGVEDRFNASLGTYHDLLKIIKDKDFLDNEENEDILEDIVLTLTLFEDREMIEERLKTYAHLFDDKVMKQLKRRRYTGWGRLSRKLINGIRDKQSGKTILDFLKSDGFANRNFMQLIHDDSLTFKEDIQKAQVSGQGDSLHEHIANLAGSPAIKKGILQTVKVVDELVKVMGRHKPENIVIEMARENQTTQKGQKNSRERMKRIEEGIKELGSQILKEHPVENTQLQNEKLYLYYLQNGRDMYVDQELDINRLSDYDVDHIVPQSFLKDDSIDNKVLTRSDKARGKSDNVPSEEVVKKMKNYWRQLLNAKLITQRKFDNLTKAERGGLSELDKAGFIKRQLVETRQITKHVAQILDSRMNTKYDENDKLIREVKVITLKSKLVSDFRKDFQFYKVREINNYHHAHDAYLNAVVGTALIKKYPKLESEFVYGDYKVYDVRKMIAKSEQEIGKATAKYFFYSNIMNFFKTEITLANGEIRKRPLIETNGETGEIVWDKGRDFATVRKVLSMPQVNIVKKTEVQTGGFSKESILPKRNSDKLIARKKDWDPKKYGGFDSPTVAYSVLVVAKVEKGKSKKLKSVKELLGITIMERSSFEKNPIDFLEAKGYKEVKKDLIIKLPKYSLFELENGRKRMLASAGELQKGNELALPSKYVNFLYLASHYEKLKGSPEDNEQKQLFVEQHKHYLDEIIEQISEFSKRVILADANLDKVLSAYNKHRDKPIREQAENIIHLFTLTNLGAPAAFKYFDTTIDRKRYTSTKEVLDATLIHQSITGLYETRIDLSQLGGDGGEAAAKPAPGGGGGLGIEDEYRLHETSTEPDVSLGSTWLSDFPQAWAETGGMGLAVRQAPLIIPLKATSTPVSIQQYPMSHEARLGIKPHIQRLLDQGILVPCQSPWNTPLLPVKKPGTNDYRPVQDLREVNKRVEDIHPTVPNPYNLLSGLPPSHQWYTVLDLKDAFFCLRLHPTSQPLFAFEWRDPGMGISGQLTWTRLPQGFKNSPTLFNEALHRDLADFRIQHPDLILLQYVDDILLAATSELDCQQGTRALLQTLGDLGYRASAKKAQICQKQVKYLGYLLREGQRWLTEARKETVMGQPVPKTPRQLREFLGKAGFCRLFIPGFAEMAAPLYPLTKPGTLFSWGPDQQKAYQEIKQALLTAPALGLPDLTKPFELFVDEKQGYAKGVLTQKLGPWRRPVAYLSKKLDPVAAGWPPCLRMVAAIAVLTKDAGKLTMGQPLVILAPHAVEALVKQPPDRWLSNARMTHYQAMLLDTDRVQFGPVVALNPATLLPLPEEGAPHDCLEILAETHGTRPDLTDQPIPDADHTWYTDGSSFLQEGQRKAGAAVTTETEVIWAGALPAGTSAQRAELIALTQALKMAEGKRLNVYTDSRYAFATAHIHGEIYRRRGWLTSEGREIKNKSEILALLKALFLPKRLSIIHCLGHQKGDSAEARGNRLADQAAREAAIKTPPDTSTLLIAGKRTADGSEFEKRTADGSEFESPKKKAKVE

SEQ ID NO: 2131 - protein, 2088 aa, synthetic construct
MPAAKRVKLDGGDKKYSIGLDIGTNSVGWAVITDEYKVPSKKFKVLGNTDRHSIKKNLIGALLFDSGETAEATRLKRTARRRYTRRKNRICYLQEIFSNEMAKVDDSFFHRLEESFLVEEDKKHERHPIFGNIVDEVAYHEKYPTIYHLRKKLVDSTDKADLRLIYLALAHMIKFRGHFLIEGDLNPDNSDVDKLFIQLVQTYNQLFEENPINASGVDAKAILSARLSKSRRLENLIAQLPGEKKNGLFGNLIALSLGLTPNFKSNFDLAEDAKLQLSKDTYDDDLDNLLAQIGDQYADLFLAAKNLSDAILLSDILRVNTEITKAPLSASMIKRYDEHHQDLTLLKALVRQQLPEKYKEIFFDQSKNGYAGYIDGGASQEEFYKFIKPILEKMDGTEELLVKLNREDLLRKQRTFDNGSIPHQIHLGELHAILRRQEDFYPFLKDNREKIEKILTFRIPYYVGPLARGNSRFAWMTRKSEETITPWNFEEVVDKGASAQSFIERMTNFDKNLPNEKVLPKHSLLYEYFTVYNELTKVKYVTEGMRKPAFLSGEQKKAIVDLLFKTNRKVTVKQLKEDYFKKIECFDSVEISGVEDRFNASLGTYHDLLKIIKDKDFLDNEENEDILEDIVLTLTLFEDREMIEERLKTYAHLFDDKVMKQLKRRRYTGWGRLSRKLINGIRDKQSGKTILDFLKSDGFANRNFMQLIHDDSLTFKEDIQKAQVSGQGDSLHEHIANLAGSPAIKKGILQTVKVVDELVKVMGRHKPENIVIEMARENQTTQKGQKNSRERMKRIEEGIKELGSQILKEHPVENTQLQNEKLYLYYLQNGRDMYVDQELDINRLSDYDVDHIVPQSFLKDDSIDNKVLTRSDKARGKSDNVPSEEVVKKMKNYWRQLLNAKLITQRKFDNLTKAERGGLSELDKAGFIKRQLVETRQITKHVAQILDSRMNTKYDENDKLIREVKVITLKSKLVSDFRKDFQFYKVREINNYHHAHDAYLNAVVGTALIKKYPKLESEFVYGDYKVYDVRKMIAKSEQEIGKATAKYFFYSNIMNFFKTEITLANGEIRKRPLIETNGETGEIVWDKGRDFATVRKVLSMPQVNIVKKTEVQTGGFSKESILPKRNSDKLIARKKDWDPKKYGGFDSPTVAYSVLVVAKVEKGKSKKLKSVKELLGITIMERSSFEKNPIDFLEAKGYKEVKKDLIIKLPKYSLFELENGRKRMLASAGELQKGNELALPSKYVNFLYLASHYEKLKGSPEDNEQKQLFVEQHKHYLDEIIEQISEFSKRVILADANLDKVLSAYNKHRDKPIREQAENIIHLFTLTNLGAPAAFKYFDTTIDRKRYTSTKEVLDATLIHQSITGLYETRIDLSQLGGDGGGGSGGLGIEDEYRLHETSTEPDVSLGSTWLSDFPQAWAETGGMGLAVRQAPLIIPLKATSTPVSIQQYPMSHEARLGIKPHIQRLLDQGILVPCQSPWNTPLLPVKKPGTNDYRPVQDLREVNKRVEDIHPTVPNPYNLLSGLPPSHQWYTVLDLKDAFFCLRLHPTSQPLFAFEWRDPGMGISGQLTWTRLPQGFKNSPTLFNEALHRDLADFRIQHPDLILLQYVDDILLAATSELDCQQGTRALLQTLGDLGYRASAKKAQICQKQVKYLGYLLREGQRWLTEARKETVMGQPVPKTPRQLREFLGKAGFCRLFIPGFAEMAAPLYPLTKPGTLFSWGPDQQKAYQEIKQALLTAPALGLPDLTKPFELFVDEKQGYAKGVLTQKLGPWRRPVAYLSKKLDPVAAGWPPCLRMVAAIAVLTKDAGKLTMGQPLVILAPHAVEALVKQPPDRWLSNARMTHYQAMLLDTDRVQFGPVVALNPATLLPLPEEGAPHDCLEILAETHGTRPDLTDQPIPDADHTWYTDGSSFLQEGQRKAGAAVTTETEVIWAGALPAGTSAQRAELIALTQALKMAEGKRLNVYTDSRYAFATAHIHGEIYRRRGWLTSEGREIKNKSEILALLKALFLPKRLSIIHCLGHQKGDSAEARGNRLADQAAREAAIKTPPDTSTLLIAGKRTADGSEFEKRTADGSEFESPKKKAKVE

SEQ ID NO: 2132 - protein, 2096 aa, synthetic construct
MPAAKRVKLDGGDKKYSIGLDIGTNSVGWAVITDEYKVPSKKFKVLGNTDRHSIKKNLIGALLFDSGETAEATRLKRTARRRYTRRKNRICYLQEIFSNEMAKVDDSFFHRLEESFLVEEDKKHERHPIFGNIVDEVAYHEKYPTIYHLRKKLVDSTDKADLRLIYLALAHMIKFRGHFLIEGDLNPDNSDVDKLFIQLVQTYNQLFEENPINASGVDAKAILSARLSKSRRLENLIAQLPGEKKNGLFGNLIALSLGLTPNFKSNFDLAEDAKLQLSKDTYDDDLDNLLAQIGDQYADLFLAAKNLSDAILLSDILRVNTEITKAPLSASMIKRYDEHHQDLTLLKALVRQQLPEKYKEIFFDQSKNGYAGYIDGGASQEEFYKFIKPILEKMDGTEELLVKLNREDLLRKQRTFDNGSIPHQIHLGELHAILRRQEDFYPFLKDNREKIEKILTFRIPYYVGPLARGNSRFAWMTRKSEETITPWNFEEVVDKGASAQSFIERMTNFDKNLPNEKVLPKHSLLYEYFTVYNELTKVKYVTEGMRKPAFLSGEQKKAIVDLLFKTNRKVTVKQLKEDYFKKIECFDSVEISGVEDRFNASLGTYHDLLKIIKDKDFLDNEENEDILEDIVLTLTLFEDREMIEERLKTYAHLFDDKVMKQLKRRRYTGWGRLSRKLINGIRDKQSGKTILDFLKSDGFANRNFMQLIHDDSLTFKEDIQKAQVSGQGDSLHEHIANLAGSPAIKKGILQTVKVVDELVKVMGRHKPENIVIEMARENQTTQKGQKNSRERMKRIEEGIKELGSQILKEHPVENTQLQNEKLYLYYLQNGRDMYVDQELDINRLSDYDVDHIVPQSFLKDDSIDNKVLTRSDKARGKSDNVPSEEVVKKMKNYWRQLLNAKLITQRKFDNLTKAERGGLSELDKAGFIKRQLVETRQITKHVAQILDSRMNTKYDENDKLIREVKVITLKSKLVSDFRKDFQFYKVREINNYHHAHDAYLNAVVGTALIKKYPKLESEFVYGDYKVYDVRKMIAKSEQEIGKATAKYFFYSNIMNFFKTEITLANGEIRKRPLIETNGETGEIVWDKGRDFATVRKVLSMPQVNIVKKTEVQTGGFSKESILPKRNSDKLIARKKDWDPKKYGGFDSPTVAYSVLVVAKVEKGKSKKLKSVKELLGITIMERSSFEKNPIDFLEAKGYKEVKKDLIIKLPKYSLFELENGRKRMLASAGELQKGNELALPSKYVNFLYLASHYEKLKGSPEDNEQKQLFVEQHKHYLDEIIEQISEFSKRVILADANLDKVLSAYNKHRDKPIREQAENIIHLFTLTNLGAPAAFKYFDTTIDRKRYTSTKEVLDATLIHQSITGLYETRIDLSQLGGDGGGGGEAAAKGGSGGLGIEDEYRLHETSTEPDVSLGSTWLSDFPQAWAETGGMGLAVRQAPLIIPLKATSTPVSIQQYPMSHEARLGIKPHIQRLLDQGILVPCQSPWNTPLLPVKKPGTNDYRPVQDLREVNKRVEDIHPTVPNPYNLLSGLPPSHQWYTVLDLKDAFFCLRLHPTSQPLFAFEWRDPGMGISGQLTWTRLPQGFKNSPTLFNEALHRDLADFRIQHPDLILLQYVDDILLAATSELDCQQGTRALLQTLGDLGYRASAKKAQICQKQVKYLGYLLREGQRWLTEARKETVMGQPVPKTPRQLREFLGKAGFCRLFIPGFAEMAAPLYPLTKPGTLFSWGPDQQKAYQEIKQALLTAPALGLPDLTKPFELFVDEKQGYAKGVLTQKLGPWRRPVAYLSKKLDPVAAGWPPCLRMVAAIAVLTKDAGKLTMGQPLVILAPHAVEALVKQPPDRWLSNARMTHYQAMLLDTDRVQFGPVVALNPATLLPLPEEGAPHDCLEILAETHGTRPDLTDQPIPDADHTWYTDGSSFLQEGQRKAGAAVTTETEVIWAGALPAGTSAQRAELIALTQALKMAEGKRLNVYTDSRYAFATAHIHGEIYRRRGWLTSEGREIKNKSEILALLKALFLPKRLSIIHCLGHQKGDSAEARGNRLADQAAREAAIKTPPDTSTLLIAGKRTADGSEFEKRTADGSEFESPKKKAKVE

SEQ ID NO: 2133 - protein, 2094 aa, synthetic construct
MPAAKRVKLDGGDKKYSIGLDIGTNSVGWAVITDEYKVPSKKFKVLGNTDRHSIKKNLIGALLFDSGETAEATRLKRTARRRYTRRKNRICYLQEIFSNEMAKVDDSFFHRLEESFLVEEDKKHERHPIFGNIVDEVAYHEKYPTIYHLRKKLVDSTDKADLRLIYLALAHMIKFRGHFLIEGDLNPDNSDVDKLFIQLVQTYNQLFEENPINASGVDAKAILSARLSKSRRLENLIAQLPGEKKNGLFGNLIALSLGLTPNFKSNFDLAEDAKLQLSKDTYDDDLDNLLAQIGDQYADLFLAAKNLSDAILLSDILRVNTEITKAPLSASMIKRYDEHHQDLTLLKALVRQQLPEKYKEIFFDQSKNGYAGYIDGGASQEEFYKFIKPILEKMDGTEELLVKLNREDLLRKQRTFDNGSIPHQIHLGELHAILRRQEDFYPFLKDNREKIEKILTFRIPYYVGPLARGNSRFAWMTRKSEETITPWNFEEVVDKGASAQSFIERMTNFDKNLPNEKVLPKHSLLYEYFTVYNELTKVKYVTEGMRKPAFLSGEQKKAIVDLLFKTNRKVTVKQLKEDYFKKIECFDSVEISGVEDRFNASLGTYHDLLKIIKDKDFLDNEENEDILEDIVLTLTLFEDREMIEERLKTYAHLFDDKVMKQLKRRRYTGWGRLSRKLINGIRDKQSGKTILDFLKSDGFANRNFMQLIHDDSLTFKEDIQKAQVSGQGDSLHEHIANLAGSPAIKKGILQTVKVVDELVKVMGRHKPENIVIEMARENQTTQKGQKNSRERMKRIEEGIKELGSQILKEHPVENTQLQNEKLYLYYLQNGRDMYVDQELDINRLSDYDVDHIVPQSFLKDDSIDNKVLTRSDKARGKSDNVPSEEVVKKMKNYWRQLLNAKLITQRKFDNLTKAERGGLSELDKAGFIKRQLVETRQITKHVAQILDSRMNTKYDENDKLIREVKVITLKSKLVSDFRKDFQFYKVREINNYHHAHDAYLNAVVGTALIKKYPKLESEFVYGDYKVYDVRKMIAKSEQEIGKATAKYFFYSNIMNFFKTEITLANGEIRKRPLIETNGETGEIVWDKGRDFATVRKVLSMPQVNIVKKTEVQTGGFSKESILPKRNSDKLIARKKDWDPKKYGGFDSPTVAYSVLVVAKVEKGKSKKLKSVKELLGITIMERSSFEKNPIDFLEAKGYKEVKKDLIIKLPKYSLFELENGRKRMLASAGELQKGNELALPSKYVNFLYLASHYEKLKGSPEDNEQKQLFVEQHKHYLDEIIEQISEFSKRVILADANLDKVLSAYNKHRDKPIREQAENIIHLFTLTNLGAPAAFKYFDTTIDRKRYTSTKEVLDATLIHQSITGLYETRIDLSQLGGDGGGGGGGSPAPGGLGIEDEYRLHETSTEPDVSLGSTWLSDFPQAWAETGGMGLAVRQAPLIIPLKATSTPVSIQQYPMSHEARLGIKPHIQRLLDQGILVPCQSPWNTPLLPVKKPGTNDYRPVQDLREVNKRVEDIHPTVPNPYNLLSGLPPSHQWYTVLDLKDAFFCLRLHPTSQPLFAFEWRDPGMGISGQLTWTRLPQGFKNSPTLFNEALHRDLADFRIQHPDLILLQYVDDILLAATSELDCQQGTRALLQTLGDLGYRASAKKAQICQKQVKYLGYLLREGQRWLTEARKETVMGQPVPKTPRQLREFLGKAGFCRLFIPGFAEMAAPLYPLTKPGTLFSWGPDQQKAYQEIKQALLTAPALGLPDLTKPFELFVDEKQGYAKGVLTQKLGPWRRPVAYLSKKLDPVAAGWPPCLRMVAAIAVLTKDAGKLTMGQPLVILAPHAVEALVKQPPDRWLSNARMTHYQAMLLDTDRVQFGPVVALNPATLLPLPEEGAPHDCLEILAETHGTRPDLTDQPIPDADHTWYTDGSSFLQEGQRKAGAAVTTETEVIWAGALPAGTSAQRAELIALTQALKMAEGKRLNVYTDSRYAFATAHIHGEIYRRRGWLTSEGREIKNKSEILALLKALFLPKRLSIIHCLGHQKGDSAEARGNRLADQAAREAAIKTPPDTSTLLIAGKRTADGSEFEKRTADGSEFESPKKKAKVE

SEQ ID NO: 2134 - protein, 2091 aa, synthetic construct
MPAAKRVKLDGGDKKYSIGLDIGTNSVGWAVITDEYKVPSKKFKVLGNTDRHSIKKNLIGALLFDSGETAEATRLKRTARRRYTRRKNRICYLQEIFSNEMAKVDDSFFHRLEESFLVEEDKKHERHPIFGNIVDEVAYHEKYPTIYHLRKKLVDSTDKADLRLIYLALAHMIKFRGHFLIEGDLNPDNSDVDKLFIQLVQTYNQLFEENPINASGVDAKAILSARLSKSRRLENLIAQLPGEKKNGLFGNLIALSLGLTPNFKSNFDLAEDAKLQLSKDTYDDDLDNLLAQIGDQYADLFLAAKNLSDAILLSDILRVNTEITKAPLSASMIKRYDEHHQDLTLLKALVRQQLPEKYKEIFFDQSKNGYAGYIDGGASQEEFYKFIKPILEKMDGTEELLVKLNREDLLRKQRTFDNGSIPHQIHLGELHAILRRQEDFYPFLKDNREKIEKILTFRIPYYVGPLARGNSRFAWMTRKSEETITPWNFEEVVDKGASAQSFIERMTNFDKNLPNEKVLPKHSLLYEYFTVYNELTKVKYVTEGMRKPAFLSGEQKKAIVDLLFKTNRKVTVKQLKEDYFKKIECFDSVEISGVEDRFNASLGTYHDLLKIIKDKDFLDNEENEDILEDIVLTLTLFEDREMIEERLKTYAHLFDDKVMKQLKRRRYTGWGRLSRKLINGIRDKQSGKTILDFLKSDGFANRNFMQLIHDDSLTFKEDIQKAQVSGQGDSLHEHIANLAGSPAIKKGILQTVKVVDELVKVMGRHKPENIVIEMARENQTTQKGQKNSRERMKRIEEGIKELGSQILKEHPVENTQLQNEKLYLYYLQNGRDMYVDQELDINRLSDYDVDHIVPQSFLKDDSIDNKVLTRSDKARGKSDNVPSEEVVKKMKNYWRQLLNAKLITQRKFDNLTKAERGGLSELDKAGFIKRQLVETRQITKHVAQILDSRMNTKYDENDKLIREVKVITLKSKLVSDFRKDFQFYKVREINNYHHAHDAYLNAVVGTALIKKYPKLESEFVYGDYKVYDVRKMIAKSEQEIGKATAKYFFYSNIMNFFKTEITLANGEIRKRPLIETNGETGEIVWDKGRDFATVRKVLSMPQVNIVKKTEVQTGGFSKESILPKRNSDKLIARKKDWDPKKYGGFDSPTVAYSVLVVAKVEKGKSKKLKSVKELLGITIMERSSFEKNPIDFLEAKGYKEVKKDLIIKLPKYSLFELENGRKRMLASAGELQKGNELALPSKYVNFLYLASHYEKLKGSPEDNEQKQLFVEQHKHYLDEIIEQISEFSKRVILADANLDKVLSAYNKHRDKPIREQAENIIHLFTLTNLGAPAAFKYFDTTIDRKRYTSTKEVLDATLIHQSITGLYETRIDLSQLGGDGGPAPGGGGGLGIEDEYRLHETSTEPDVSLGSTWLSDFPQAWAETGGMGLAVRQAPLIIPLKATSTPVSIQQYPMSHEARLGIKPHIQRLLDQGILVPCQSPWNTPLLPVKKPGTNDYRPVQDLREVNKRVEDIHPTVPNPYNLLSGLPPSHQWYTVLDLKDAFFCLRLHPTSQPLFAFEWRDPGMGISGQLTWTRLPQGFKNSPTLFNEALHRDLADFRIQHPDLILLQYVDDILLAATSELDCQQGTRALLQTLGDLGYRASAKKAQICQKQVKYLGYLLREGQRWLTEARKETVMGQPVPKTPRQLREFLGKAGFCRLFIPGFAEMAAPLYPLTKPGTLFSWGPDQQKAYQEIKQALLTAPALGLPDLTKPFELFVDEKQGYAKGVLTQKLGPWRRPVAYLSKKLDPVAAGWPPCLRMVAAIAVLTKDAGKLTMGQPLVILAPHAVEALVKQPPDRWLSNARMTHYQAMLLDTDRVQFGPVVALNPATLLPLPEEGAPHDCLEILAETHGTRPDLTDQPIPDADHTWYTDGSSFLQEGQRKAGAAVTTETEVIWAGALPAGTSAQRAELIALTQALKMAEGKRLNVYTDSRYAFATAHIHGEIYRRRGWLTSEGREIKNKSEILALLKALFLPKRLSIIHCLGHQKGDSAEARGNRLADQAAREAAIKTPPDTSTLLIAGKRTADGSEFEKRTADGSEFESPKKKAKVE

SEQ ID NO: 2135 - protein, 2096 aa, synthetic construct
MPAAKRVKLDGGDKKYSIGLDIGTNSVGWAVITDEYKVPSKKFKVLGNTDRHSIKKNLIGALLFDSGETAEATRLKRTARRRYTRRKNRICYLQEIFSNEMAKVDDSFFHRLEESFLVEEDKKHERHPIFGNIVDEVAYHEKYPTIYHLRKKLVDSTDKADLRLIYLALAHMIKFRGHFLIEGDLNPDNSDVDKLFIQLVQTYNQLFEENPINASGVDAKAILSARLSKSRRLENLIAQLPGEKKNGLFGNLIALSLGLTPNFKSNFDLAEDAKLQLSKDTYDDDLDNLLAQIGDQYADLFLAAKNLSDAILLSDILRVNTEITKAPLSASMIKRYDEHHQDLTLLKALVRQQLPEKYKEIFFDQSKNGYAGYIDGGASQEEFYKFIKPILEKMDGTEELLVKLNREDLLRKQRTFDNGSIPHQIHLGELHAILRRQEDFYPFLKDNREKIEKILTFRIPYYVGPLARGNSRFAWMTRKSEETITPWNFEEVVDKGASAQSFIERMTNFDKNLPNEKVLPKHSLLYEYFTVYNELTKVKYVTEGMRKPAFLSGEQKKAIVDLLFKTNRKVTVKQLKEDYFKKIECFDSVEISGVEDRFNASLGTYHDLLKIIKDKDFLDNEENEDILEDIVLTLTLFEDREMIEERLKTYAHLFDDKVMKQLKRRRYTGWGRLSRKLINGIRDKQSGKTILDFLKSDGFANRNFMQLIHDDSLTFKEDIQKAQVSGQGDSLHEHIANLAGSPAIKKGILQTVKVVDELVKVMGRHKPENIVIEMARENQTTQKGQKNSRERMKRIEEGIKELGSQILKEHPVENTQLQNEKLYLYYLQNGRDMYVDQELDINRLSDYDVDHIVPQSFLKDDSIDNKVLTRSDKARGKSDNVPSEEVVKKMKNYWRQLLNAKLITQRKFDNLTKAERGGLSELDKAGFIKRQLVETRQITKHVAQILDSRMNTKYDENDKLIREVKVITLKSKLVSDFRKDFQFYKVREINNYHHAHDAYLNAVVGTALIKKYPKLESEFVYGDYKVYDVRKMIAKSEQEIGKATAKYFFYSNIMNFFKTEITLANGEIRKRPLIETNGETGEIVWDKGRDFATVRKVLSMPQVNIVKKTEVQTGGFSKESILPKRNSDKLIARKKDWDPKKYGGFDSPTVAYSVLVVAKVEKGKSKKLKSVKELLGITIMERSSFEKNPIDFLEAKGYKEVKKDLIIKLPKYSLFELENGRKRMLASAGELQKGNELALPSKYVNFLYLASHYEKLKGSPEDNEQKQLFVEQHKHYLDEIIEQISEFSKRVILADANLDKVLSAYNKHRDKPIREQAENIIHLFTLTNLGAPAAFKYFDTTIDRKRYTSTKEVLDATLIHQSITGLYETRIDLSQLGGDGGGGGEAAAKPAPGGLGIEDEYRLHETSTEPDVSLGSTWLSDFPQAWAETGGMGLAVRQAPLIIPLKATSTPVSIQQYPMSHEARLGIKPHIQRLLDQGILVPCQSPWNTPLLPVKKPGTNDYRPVQDLREVNKRVEDIHPTVPNPYNLLSGLPPSHQWYTVLDLKDAFFCLRLHPTSQPLFAFEWRDPGMGISGQLTWTRLPQGFKNSPTLFNEALHRDLADFRIQHPDLILLQYVDDILLAATSELDCQQGTRALLQTLGDLGYRASAKKAQICQKQVKYLGYLLREGQRWLTEARKETVMGQPVPKTPRQLREFLGKAGFCRLFIPGFAEMAAPLYPLTKPGTLFSWGPDQQKAYQEIKQALLTAPALGLPDLTKPFELFVDEKQGYAKGVLTQKLGPWRRPVAYLSKKLDPVAAGWPPCLRMVAAIAVLTKDAGKLTMGQPLVILAPHAVEALVKQPPDRWLSNARMTHYQAMLLDTDRVQFGPVVALNPATLLPLPEEGAPHDCLEILAETHGTRPDLTDQPIPDADHTWYTDGSSFLQEGQRKAGAAVTTETEVIWAGALPAGTSAQRAELIALTQALKMAEGKRLNVYTDSRYAFATAHIHGEIYRRRGWLTSEGREIKNKSEILALLKALFLPKRLSIIHCLGHQKGDSAEARGNRLADQAAREAAIKTPPDTSTLLIAGKRTADGSEFEKRTADGSEFESPKKKAKVE

SEQ ID NO: 2136 - protein, 2091 aa, synthetic construct
MPAAKRVKLDGGDKKYSIGLDIGTNSVGWAVITDEYKVPSKKFKVLGNTDRHSIKKNLIGALLFDSGETAEATRLKRTARRRYTRRKNRICYLQEIFSNEMAKVDDSFFHRLEESFLVEEDKKHERHPIFGNIVDEVAYHEKYPTIYHLRKKLVDSTDKADLRLIYLALAHMIKFRGHFLIEGDLNPDNSDVDKLFIQLVQTYNQLFEENPINASGVDAKAILSARLSKSRRLENLIAQLPGEKKNGLFGNLIALSLGLTPNFKSNFDLAEDAKLQLSKDTYDDDLDNLLAQIGDQYADLFLAAKNLSDAILLSDILRVNTEITKAPLSASMIKRYDEHHQDLTLLKALVRQQLPEKYKEIFFDQSKNGYAGYIDGGASQEEFYKFIKPILEKMDGTEELLVKLNREDLLRKQRTFDNGSIPHQIHLGELHAILRRQEDFYPFLKDNREKIEKILTFRIPYYVGPLARGNSRFAWMTRKSEETITPWNFEEVVDKGASAQSFIERMTNFDKNLPNEKVLPKHSLLYEYFTVYNELTKVKYVTEGMRKPAFLSGEQKKAIVDLLFKTNRKVTVKQLKEDYFKKIECFDSVEISGVEDRFNASLGTYHDLLKIIKDKDFLDNEENEDILEDIVLTLTLFEDREMIEERLKTYAHLFDDKVMKQLKRRRYTGWGRLSRKLINGIRDKQSGKTILDFLKSDGFANRNFMQLIHDDSLTFKEDIQKAQVSGQGDSLHEHIANLAGSPAIKKGILQTVKVVDELVKVMGRHKPENIVIEMARENQTTQKGQKNSRERMKRIEEGIKELGSQILKEHPVENTQLQNEKLYLYYLQNGRDMYVDQELDINRLSDYDVDHIVPQSFLKDDSIDNKVLTRSDKARGKSDNVPSEEVVKKMKNYWRQLLNAKLITQRKFDNLTKAERGGLSELDKAGFIKRQLVETRQITKHVAQILDSRMNTKYDENDKLIREVKVITLKSKLVSDFRKDFQFYKVREINNYHHAHDAYLNAVVGTALIKKYPKLESEFVYGDYKVYDVRKMIAKSEQEIGKATAKYFFYSNIMNFFKTEITLANGEIRKRPLIETNGETGEIVWDKGRDFATVRKVLSMPQVNIVKKTEVQTGGFSKESILPKRNSDKLIARKKDWDPKKYGGFDSPTVAYSVLVVAKVEKGKSKKLKSVKELLGITIMERSSFEKNPIDFLEAKGYKEVKKDLIIKLPKYSLFELENGRKRMLASAGELQKGNELALPSKYVNFLYLASHYEKLKGSPEDNEQKQLFVEQHKHYLDEIIEQISEFSKRVILADANLDKVLSAYNKHRDKPIREQAENIIHLFTLTNLGAPAAFKYFDTTIDRKRYTSTKEVLDATLIHQSITGLYETRIDLSQLGGDGGGGSPAPGGLGIEDEYRLHETSTEPDVSLGSTWLSDFPQAWAETGGMGLAVRQAPLIIPLKATSTPVSIQQYPMSHEARLGIKPHIQRLLDQGILVPCQSPWNTPLLPVKKPGTNDYRPVQDLREVNKRVEDIHPTVPNPYNLLSGLPPSHQWYTVLDLKDAFFCLRLHPTSQPLFAFEWRDPGMGISGQLTWTRLPQGFKNSPTLFNEALHRDLADFRIQHPDLILLQYVDDILLAATSELDCQQGTRALLQTLGDLGYRASAKKAQICQKQVKYLGYLLREGQRWLTEARKETVMGQPVPKTPRQLREFLGKAGFCRLFIPGFAEMAAPLYPLTKPGTLFSWGPDQQKAYQEIKQALLTAPALGLPDLTKPFELFVDEKQGYAKGVLTQKLGPWRRPVAYLSKKLDPVAAGWPPCLRMVAAIAVLTKDAGKLTMGQPLVILAPHAVEALVKQPPDRWLSNARMTHYQAMLLDTDRVQFGPVVALNPATLLPLPEEGAPHDCLEILAETHGTRPDLTDQPIPDADHTWYTDGSSFLQEGQRKAGAAVTTETEVIWAGALPAGTSAQRAELIALTQALKMAEGKRLNVYTDSRYAFATAHIHGEIYRRRGWLTSEGREIKNKSEILALLKALFLPKRLSIIHCLGHQKGDSAEARGNRLADQAAREAAIKTPPDTSTLLIAGKRTADGSEFEKRTADGSEFESPKKKAKVE

SEQ ID NO: 2137 - protein, 2097 aa, synthetic construct
MPAAKRVKLDGGDKKYSIGLDIGTNSVGWAVITDEYKVPSKKFKVLGNTDRHSIKKNLIGALLFDSGETAEATRLKRTARRRYTRRKNRICYLQEIFSNEMAKVDDSFFHRLEESFLVEEDKKHERHPIFGNIVDEVAYHEKYPTIYHLRKKLVDSTDKADLRLIYLALAHMIKFRGHFLIEGDLNPDNSDVDKLFIQLVQTYNQLFEENPINASGVDAKAILSARLSKSRRLENLIAQLPGEKKNGLFGNLIALSLGLTPNFKSNFDLAEDAKLQLSKDTYDDDLDNLLAQIGDQYADLFLAAKNLSDAILLSDILRVNTEITKAPLSASMIKRYDEHHQDLTLLKALVRQQLPEKYKEIFFDQSKNGYAGYIDGGASQEEFYKFIKPILEKMDGTEELLVKLNREDLLRKQRTFDNGSIPHQIHLGELHAILRRQEDFYPFLKDNREKIEKILTFRIPYYVGPLARGNSRFAWMTRKSEETITPWNFEEVVDKGASAQSFIERMTNFDKNLPNEKVLPKHSLLYEYFTVYNELTKVKYVTEGMRKPAFLSGEQKKAIVDLLFKTNRKVTVKQLKEDYFKKIECFDSVEISGVEDRFNASLGTYHDLLKIIKDKDFLDNEENEDILEDIVLTLTLFEDREMIEERLKTYAHLFDDKVMKQLKRRRYTGWGRLSRKLINGIRDKQSGKTILDFLKSDGFANRNFMQLIHDDSLTFKEDIQKAQVSGQGDSLHEHIANLAGSPAIKKGILQTVKVVDELVKVMGRHKPENIVIEMARENQTTQKGQKNSRERMKRIEEGIKELGSQILKEHPVENTQLQNEKLYLYYLQNGRDMYVDQELDINRLSDYDVDHIVPQSFLKDDSIDNKVLTRSDKARGKSDNVPSEEVVKKMKNYWRQLLNAKLITQRKFDNLTKAERGGLSELDKAGFIKRQLVETRQITKHVAQILDSRMNTKYDENDKLIREVKVITLKSKLVSDFRKDFQFYKVREINNYHHAHDAYLNAVVGTALIKKYPKLESEFVYGDYKVYDVRKMIAKSEQEIGKATAKYFFYSNIMNFFKTEITLANGEIRKRPLIETNGETGEIVWDKGRDFATVRKVLSMPQVNIVKKTEVQTGGFSKESILPKRNSDKLIARKKDWDPKKYGGFDSPTVAYSVLVVAKVEKGKSKKLKSVKELLGITIMERSSFEKNPIDFLEAKGYKEVKKDLIIKLPKYSLFELENGRKRMLASAGELQKGNELALPSKYVNFLYLASHYEKLKGSPEDNEQKQLFVEQHKHYLDEIIEQISEFSKRVILADANLDKVLSAYNKHRDKPIREQAENIIHLFTLTNLGAPAAFKYFDTTIDRKRYTSTKEVLDATLIHQSITGLYETRIDLSQLGGDGGGGSGGSGGSGGSGGLGIEDEYRLHETSTEPDVSLGSTWLSDFPQAWAETGGMGLAVRQAPLIIPLKATSTPVSIQQYPMSHEARLGIKPHIQRLLDQGILVPCQSPWNTPLLPVKKPGTNDYRPVQDLREVNKRVEDIHPTVPNPYNLLSGLPPSHQWYTVLDLKDAFFCLRLHPTSQPLFAFEWRDPGMGISGQLTWTRLPQGFKNSPTLFNEALHRDLADFRIQHPDLILLQYVDDILLAATSELDCQQGTRALLQTLGDLGYRASAKKAQICQKQVKYLGYLLREGQRWLTEARKETVMGQPVPKTPRQLREFLGKAGFCRLFIPGFAEMAAPLYPLTKPGTLFSWGPDQQKAYQEIKQALLTAPALGLPDLTKPFELFVDEKQGYAKGVLTQKLGPWRRPVAYLSKKLDPVAAGWPPCLRMVAAIAVLTKDAGKLTMGQPLVILAPHAVEALVKQPPDRWLSNARMTHYQAMLLDTDRVQFGPVVALNPATLLPLPEEGAPHDCLEILAETHGTRPDLTDQPIPDADHTWYTDGSSFLQEGQRKAGAAVTTETEVIWAGALPAGTSAQRAELIALTQALKMAEGKRLNVYTDSRYAFATAHIHGEIYRRRGWLTSEGREIKNKSEILALLKALFLPKRLSIIHCLGHQKGDSAEARGNRLADQAAREAAIKTPPDTSTLLIAGKRTADGSEFEKRTADGSEFESPKKKAKVE

SEQ ID NO: 2138 - protein, 2094 aa, synthetic construct; identical to SEQ ID NO: 2061

SEQ ID NO: 2139 - protein, 2096 aa, synthetic construct
MPAAKRVKLDGGDKKYSIGLDIGTNSVGWAVITDEYKVPSKKFKVLGNTDRHSIKKNLIGALLFDSGETAEATRLKRTARRRYTRRKNRICYLQEIFSNEMAKVDDSFFHRLEESFLVEEDKKHERHPIFGNIVDEVAYHEKYPTIYHLRKKLVDSTDKADLRLIYLALAHMIKFRGHFLIEGDLNPDNSDVDKLFIQLVQTYNQLFEENPINASGVDAKAILSARLSKSRRLENLIAQLPGEKKNGLFGNLIALSLGLTPNFKSNFDLAEDAKLQLSKDTYDDDLDNLLAQIGDQYADLFLAAKNLSDAILLSDILRVNTEITKAPLSASMIKRYDEHHQDLTLLKALVRQQLPEKYKEIFFDQSKNGYAGYIDGGASQEEFYKFIKPILEKMDGTEELLVKLNREDLLRKQRTFDNGSIPHQIHLGELHAILRRQEDFYPFLKDNREKIEKILTFRIPYYVGPLARGNSRFAWMTRKSEETITPWNFEEVVDKGASAQSFIERMTNFDKNLPNEKVLPKHSLLYEYFTVYNELTKVKYVTEGMRKPAFLSGEQKKAIVDLLFKTNRKVTVKQLKEDYFKKIECFDSVEISGVEDRFNASLGTYHDLLKIIKDKDFLDNEENEDILEDIVLTLTLFEDREMIEERLKTYAHLFDDKVMKQLKRRRYTGWGRLSRKLINGIRDKQSGKTILDFLKSDGFANRNFMQLIHDDSLTFKEDIQKAQVSGQGDSLHEHIANLAGSPAIKKGILQTVKVVDELVKVMGRHKPENIVIEMARENQTTQKGQKNSRERMKRIEEGIKELGSQILKEHPVENTQLQNEKLYLYYLQNGRDMYVDQELDINRLSDYDVDHIVPQSFLKDDSIDNKVLTRSDKARGKSDNVPSEEVVKKMKNYWRQLLNAKLITQRKFDNLTKAERGGLSELDKAGFIKRQLVETRQITKHVAQILDSRMNTKYDENDKLIREVKVITLKSKLVSDFRKDFQFYKVREINNYHHAHDAYLNAVVGTALIKKYPKLESEFVYGDYKVYDVRKMIAKSEQEIGKATAKYFFYSNIMNFFKTEITLANGEIRKRPLIETNGETGEIVWDKGRDFATVRKVLSMPQVNIVKKTEVQTGGFSKESILPKRNSDKLIARKKDWDPKKYGGFDSPTVAYSVLVVAKVEKGKSKKLKSVKELLGITIMERSSFEKNPIDFLEAKGYKEVKKDLIIKLPKYSLFELENGRKRMLASAGELQKGNELALPSKYVNFLYLASHYEKLKGSPEDNEQKQLFVEQHKHYLDEIIEQISEFSKRVILADANLDKVLSAYNKHRDKPIREQAENIIHLFTLTNLGAPAAFKYFDTTIDRKRYTSTKEVLDATLIHQSITGLYETRIDLSQLGGDGGGGSPAPEAAAKGGLGIEDEYRLHETSTEPDVSLGSTWLSDFPQAWAETGGMGLAVRQAPLIIPLKATSTPVSIQQYPMSHEARLGIKPHIQRLLDQGILVPCQSPWNTPLLPVKKPGTNDYRPVQDLREVNKRVEDIHPTVPNPYNLLSGLPPSHQWYTVLDLKDAFFCLRLHPTSQPLFAFEWRDPGMGISGQLTWTRLPQGFKNSPTLFNEALHRDLADFRIQHPDLILLQYVDDILLAATSELDCQQGTRALLQTLGDLGYRASAKKAQICQKQVKYLGYLLREGQRWLTEARKETVMGQPVPKTPRQLREFLGKAGFCRLFIPGFAEMAAPLYPLTKPGTLFSWGPDQQKAYQEIKQALLTAPALGLPDLTKPFELFVDEKQGYAKGVLTQKLGPWRRPVAYLSKKLDPVAAGWPPCLRMVAAIAVLTKDAGKLTMGQPLVILAPHAVEALVKQPPDRWLSNARMTHYQAMLLDTDRVQFGPVVALNPATLLPLPEEGAPHDCLEILAETHGTRPDLTDQPIPDADHTWYTDGSSFLQEGQRKAGAAVTTETEVIWAGALPAGTSAQRAELIALTQALKMAEGKRLNVYTDSRYAFATAHIHGEIYRRRGWLTSEGREIKNKSEILALLKALFLPKRLSIIHCLGHQKGDSAEARGNRLADQAAREAAIKTPPDTSTLLIAGKRTADGSEFEKRTADGSEFESPKKKAKVE

SEQ ID NO: 2140 - protein, 2103 aa, synthetic construct
MPAAKRVKLDGGDKKYSIGLDIGTNSVGWAVITDEYKVPSKKFKVLGNTDRHSIKKNLIGALLFDSGETAEATRLKRTARRRYTRRKNRICYLQEIFSNEMAKVDDSFFHRLEESFLVEEDKKHERHPIFGNIVDEVAYHEKYPTIYHLRKKLVDSTDKADLRLIYLALAHMIKFRGHFLIEGDLNPDNSDVDKLFIQLVQTYNQLFEENPINASGVDAKAILSARLSKSRRLENLIAQLPGEKKNGLFGNLIALSLGLTPNFKSNFDLAEDAKLQLSKDTYDDDLDNLLAQIGDQYADLFLAAKNLSDAILLSDILRVNTEITKAPLSASMIKRYDEHHQDLTLLKALVRQQLPEKYKEIFFDQSKNGYAGYIDGGASQEEFYKFIKPILEKMDGTEELLVKLNREDLLRKQRTFDNGSIPHQIHLGELHAILRRQEDFYPFLKDNREKIEKILTFRIPYYVGPLARGNSRFAWMTRKSEETITPWNFEEVVDKGASAQSFIERMTNFDKNLPNEKVLPKHSLLYEYFTVYNELTKVKYVTEGMRKPAFLSGEQKKAIVDLLFKTNRKVTVKQLKEDYFKKIECFDSVEISGVEDRFNASLGTYHDLLKIIKDKDFLDNEENEDILEDIVLTLTLFEDREMIEERLKTYAHLFDDKVMKQLKRRRYTGWGRLSRKLINGIRDKQSGKTILDFLKSDGFANRNFMQLIHDDSLTFKEDIQKAQVSGQGDSLHEHIANLAGSPAIKKGILQTVKVVDELVKVMGRHKPENIVIEMARENQTTQKGQKNSRERMKRIEEGIKELGSQILKEHPVENTQLQNEKLYLYYLQNGRDMYVDQELDINRLSDYDVDHIVPQSFLKDDSIDNKVLTRSDKARGKSDNVPSEEVVKKMKNYWRQLLNAKLITQRKFDNLTKAERGGLSELDKAGFIKRQLVETRQITKHVAQILDSRMNTKYDENDKLIREVKVITLKSKLVSDFRKDFQFYKVREINNYHHAHDAYLNAVVGTALIKKYPKLESEFVYGDYKVYDVRKMIAKSEQEIGKATAKYFFYSNIMNFFKTEITLANGEIRKRPLIETNGETGEIVWDKGRDFATVRKVLSMPQVNIVKKTEVQTGGFSKESILPKRNSDKLIARKKDWDPKKYGGFDSPTVAYSVLVVAKVEKGKSKKLKSVKELLGITIMERSSFEKNPIDFLEAKGYKEVKKDLIIKLPKYSLFELENGRKRMLASAGELQKGNELALPSKYVNFLYLASHYEKLKGSPEDNEQKQLFVEQHKHYLDEIIEQISEFSKRVILADANLDKVLSAYNKHRDKPIREQAENIIHLFTLTNLGAPAAFKYFDTTIDRKRYTSTKEVLDATLIHQSITGLYETRIDLSQLGGDGGGSSGSSGSSGSSGSSGSSGGLGIEDEYRLHETSTEPDVSLGSTWLSDFPQAWAETGGMGLAVRQAPLIIPLKATSTPVSIQQYPMSHEARLGIKPHIQRLLDQGILVPCQSPWNTPLLPVKKPGTNDYRPVQDLREVNKRVEDIHPTVPNPYNLLSGLPPSHQWYTVLDLKDAFFCLRLHPTSQPLFAFEWRDPGMGISGQLTWTRLPQGFKNSPTLFNEALHRDLADFRIQHPDLILLQYVDDILLAATSELDCQQGTRALLQTLGDLGYRASAKKAQICQKQVKYLGYLLREGQRWLTEARKETVMGQPVPKTPRQLREFLGKAGFCRLFIPGFAEMAAPLYPLTKPGTLFSWGPDQQKAYQEIKQALLTAPALGLPDLTKPFELFVDEKQGYAKGVLTQKLGPWRRPVAYLSKKLDPVAAGWPPCLRMVAAIAVLTKDAGKLTMGQPLVILAPHAVEALVKQPPDRWLSNARMTHYQAMLLDTDRVQFGPVVALNPATLLPLPEEGAPHDCLEILAETHGTRPDLTDQPIPDADHTWYTDGSSFLQEGQRKAGAAVTTETEVIWAGALPAGTSAQRAELIALTQALKMAEGKRLNVYTDSRYAFATAHIHGEIYRRRGWLTSEGREIKNKSEILALLKALFLPKRLSIIHCLGHQKGDSAEARGNRLADQAAREAAIKTPPDTSTLLIAGKRTADGSEFEKRTADGSEFESPKKKAKVE

SEQ ID NO: 2141 - protein, 2096 aa, synthetic construct
MPAAKRVKLDGGDKKYSIGLDIGTNSVGWAVITDEYKVPSKKFKVLGNTDRHSIKKNLIGALLFDSGETAEATRLKRTARRRYTRRKNRICYLQEIFSNEMAKVDDSFFHRLEESFLVEEDKKHERHPIFGNIVDEVAYHEKYPTIYHLRKKLVDSTDKADLRLIYLALAHMIKFRGHFLIEGDLNPDNSDVDKLFIQLVQTYNQLFEENPINASGVDAKAILSARLSKSRRLENLIAQLPGEKKNGLFGNLIALSLGLTPNFKSNFDLAEDAKLQLSKDTYDDDLDNLLAQIGDQYADLFLAAKNLSDAILLSDILRVNTEITKAPLSASMIKRYDEHHQDLTLLKALVRQQLPEKYKEIFFDQSKNGYAGYIDGGASQEEFYKFIKPILEKMDGTEELLVKLNREDLLRKQRTFDNGSIPHQIHLGELHAILRRQEDFYPFLKDNREKIEKILTFRIPYYVGPLARGNSRFAWMTRKSEETITPWNFEEVVDKGASAQSFIERMTNFDKNLPNEKVLPKHSLLYEYFTVYNELTKVKYVTEGMRKPAFLSGEQKKAIVDLLFKTNRKVTVKQLKEDYFKKIECFDSVEISGVEDRFNASLGTYHDLLKIIKDKDFLDNEENEDILEDIVLTLTLFEDREMIEERLKTYAHLFDDKVMKQLKRRRYTGWGRLSRKLINGIRDKQSGKTILDFLKSDGFANRNFMQLIHDDSLTFKEDIQKAQVSGQGDSLHEHIANLAGSPAIKKGILQTVKVVDELVKVMGRHKPENIVIEMARENQTTQKGQKNSRERMKRIEEGIKELGSQILKEHPVENTQLQNEKLYLYYLQNGRDMYVDQELDINRLSDYDVDHIVPQSFLKDDSIDNKVLTRSDKARGKSDNVPSEEVVKKMKNYWRQLLNAKLITQRKFDNLTKAERGGLSELDKAGFIKRQLVETRQITKHVAQILDSRMNTKYDENDKLIREVKVITLKSKLVSDFRKDFQFYKVREINNYHHAHDAYLNAVVGTALIKKYPKLESEFVYGDYKVYDVRKMIAKSEQEIGKATAKYFFYSNIMNFFKTEITLANGEIRKRPLIETNGETGEIVWDKGRDFATVRKVLSMPQVNIVKKTEVQTGGFSKESILPKRNSDKLIARKKDWDPKKYGGFDSPTVAYSVLVVAKVEKGKSKKLKSVKELLGITIMERSSFEKNPIDFLEAKGYKEVKKDLIIKLPKYSLFELENGRKRMLASAGELQKGNELALPSKYVNFLYLASHYEKLKGSPEDNEQKQLFVEQHKHYLDEIIEQISEFSKRVILADANLDKVLSAYNKHRDKPIREQAENIIHLFTLTNLGAPAAFKYFDTTIDRKRYTSTKEVLDATLIHQSITGLYETRIDLSQLGGDGGEAAAKGSSGGGGGLGIEDEYRLHETSTEPDVSLGSTWLSDFPQAWAETGGMGLAVRQAPLIIPLKATSTPVSIQQYPMSHEARLGIKPHIQRLLDQGILVPCQSPWNTPLLPVKKPGTNDYRPVQDLREVNKRVEDIHPTVPNPYNLLSGLPPSHQWYTVLDLKDAFFCLRLHPTSQPLFAFEWRDPGMGISGQLTWTRLPQGFKNSPTLFNEALHRDLADFRIQHPDLILLQYVDDILLAATSELDCQQGTRALLQTLGDLGYRASAKKAQICQKQVKYLGYLLREGQRWLTEARKETVMGQPVPKTPRQLREFLGKAGFCRLFIPGFAEMAAPLYPLTKPGTLFSWGPDQQKAYQEIKQALLTAPALGLPDLTKPFELFVDEKQGYAKGVLTQKLGPWRRPVAYLSKKLDPVAAGWPPCLRMVAAIAVLTKDAGKLTMGQPLVILAPHAVEALVKQPPDRWLSNARMTHYQAMLLDTDRVQFGPVVALNPATLLPLPEEGAPHDCLEILAETHGTRPDLTDQPIPDADHTWYTDGSSFLQEGQRKAGAAVTTETEVIWAGALPAGTSAQRAELIALTQALKMAEGKRLNVYTDSRYAFATAHIHGEIYRRRGWLTSEGREIKNKSEILALLKALFLPKRLSIIHCLGHQKGDSAEARGNRLADQAAREAAIKTPPDTSTLLIAGKRTADGSEFEKRTADGSEFESPKKKAKVE

SEQ ID NO: 2142 - protein, 2094 aa, synthetic construct
MPAAKRVKLDGGDKKYSIGLDIGTNSVGWAVITDEYKVPSKKFKVLGNTDRHSIKKNLIGALLFDSGETAEATRLKRTARRRYTRRKNRICYLQEIFSNEMAKVDDSFFHRLEESFLVEEDKKHERHPIFGNIVDEVAYHEKYPTIYHLRKKLVDSTDKADLRLIYLALAHMIKFRGHFLIEGDLNPDNSDVDKLFIQLVQTYNQLFEENPINASGVDAKAILSARLSKSRRLENLIAQLPGEKKNGLFGNLIALSLGLTPNFKSNFDLAEDAKLQLSKDTYDDDLDNLLAQIGDQYADLFLAAKNLSDAILLSDILRVNTEITKAPLSASMIKRYDEHHQDLTLLKALVRQQLPEKYKEIFFDQSKNGYAGYIDGGASQEEFYKFIKPILEKMDGTEELLVKLNREDLLRKQRTFDNGSIPHQIHLGELHAILRRQEDFYPFLKDNREKIEKILTFRIPYYVGPLARGNSRFAWMTRKSEETITPWNFEEVVDKGASAQSFIERMTNFDKNLPNEKVLPKHSLLYEYFTVYNELTKVKYVTEGMRKPAFLSGEQKKAIVDLLFKTNRKVTVKQLKEDYFKKIECFDSVEISGVEDRFNASLGTYHDLLKIIKDKDFLDNEENEDILEDIVLTLTLFEDREMIEERLKTYAHLFDDKVMKQLKRRRYTGWGRLSRKLINGIRDKQSGKTILDFLKSDGFANRNFMQLIHDDSLTFKEDIQKAQVSGQGDSLHEHIANLAGSPAIKKGILQTVKVVDELVKVMGRHKPENIVIEMARENQTTQKGQKNSRERMKRIEEGIKELGSQILKEHPVENTQLQNEKLYLYYLQNGRDMYVDQELDINRLSDYDVDHIVPQSFLKDDSIDNKVLTRSDKARGKSDNVPSEEVVKKMKNYWRQLLNAKLITQRKFDNLTKAERGGLSELDKAGFIKRQLVETRQITKHVAQILDSRMNTKYDENDKLIREVKVITLKSKLVSDFRKDFQFYKVREINNYHHAHDAYLNAVVGTALIKKYPKLESEFVYGDYKVYDVRKMIAKSEQEIGKATAKYFFYSNIMNFFKTEITLANGEIRKRPLIETNGETGEIVWDKGRDFATVRKVLSMPQVNIVKKTEVQTGGFSKESILPKRNSDKLIARKKDWDPKKYGGFDSPTVAYSVLVVAKVEKGKSKKLKSVKELLGITIMERSSFEKNPIDFLEAKGYKEVKKDLIIKLPKYSLFELENGRKRMLASAGELQKGNELALPSKYVNFLYLASHYEKLKGSPEDNEQKQLFVEQHKHYLDEIIEQISEFSKRVILADANLDKVLSAYNKHRDKPIREQAENIIHLFTLTNLGAPAAFKYFDTTIDRKRYTSTKEVLDATLIHQSITGLYETRIDLSQLGGDGGGSSGSSGSSGGLGIEDEYRLHETSTEPDVSLGSTWLSDFPQAWAETGGMGLAVRQAPLIIPLKATSTPVSIQQYPMSHEARLGIKPHIQRLLDQGILVPCQSPWNTPLLPVKKPGTNDYRPVQDLREVNKRVEDIHPTVPNPYNLLSGLPPSHQWYTVLDLKDAFFCLRLHPTSQPLFAFEWRDPGMGISGQLTWTRLPQGFKNSPTLFNEALHRDLADFRIQHPDLILLQYVDDILLAATSELDCQQGTRALLQTLGDLGYRASAKKAQICQKQVKYLGYLLREGQRWLTEARKETVMGQPVPKTPRQLREFLGKAGFCRLFIPGFAEMAAPLYPLTKPGTLFSWGPDQQKAYQEIKQALLTAPALGLPDLTKPFELFVDEKQGYAKGVLTQKLGPWRRPVAYLSKKLDPVAAGWPPCLRMVAAIAVLTKDAGKLTMGQPLVILAPHAVEALVKQPPDRWLSNARMTHYQAMLLDTDRVQFGPVVALNPATLLPLPEEGAPHDCLEILAETHGTRPDLTDQPIPDADHTWYTDGSSFLQEGQRKAGAAVTTETEVIWAGALPAGTSAQRAELIALTQALKMAEGKRLNVYTDSRYAFATAHIHGEIYRRRGWLTSEGREIKNKSEILALLKALFLPKRLSIIHCLGHQKGDSAEARGNRLADQAAREAAIKTPPDTSTLLIAGKRTADGSEFEKRTADGSEFESPKKKAKVE

SEQ ID NO: 2143 - protein, 2094 aa, synthetic construct
MPAAKRVKLDGGDKKYSIGLDIGTNSVGWAVITDEYKVPSKKFKVLGNTDRHSIKKNLIGALLFDSGETAEATRLKRTARRRYTRRKNRICYLQEIFSNEMAKVDDSFFHRLEESFLVEEDKKHERHPIFGNIVDEVAYHEKYPTIYHLRKKLVDSTDKADLRLIYLALAHMIKFRGHFLIEGDLNPDNSDVDKLFIQLVQTYNQLFEENPINASGVDAKAILSARLSKSRRLENLIAQLPGEKKNGLFGNLIALSLGLTPNFKSNFDLAEDAKLQLSKDTYDDDLDNLLAQIGDQYADLFLAAKNLSDAILLSDILRVNTEITKAPLSASMIKRYDEHHQDLTLLKALVRQQLPEKYKEIFFDQSKNGYAGYIDGGASQEEFYKFIKPILEKMDGTEELLVKLNREDLLRKQRTFDNGSIPHQIHLGELHAILRRQEDFYPFLKDNREKIEKILTFRIPYYVGPLARGNSRFAWMTRKSEETITPWNFEEVVDKGASAQSFIERMTNFDKNLPNEKVLPKHSLLYEYFTVYNELTKVKYVTEGMRKPAFLSGEQKKAIVDLLFKTNRKVTVKQLKEDYFKKIECFDSVEISGVEDRFNASLGTYHDLLKIIKDKDFLDNEENEDILEDIVLTLTLFEDREMIEERLKTYAHLFDDKVMKQLKRRRYTGWGRLSRKLINGIRDKQSGKTILDFLKSDGFANRNFMQLIHDDSLTFKEDIQKAQVSGQGDSLHEHIANLAGSPAIKKGILQTVKVVDELVKVMGRHKPENIVIEMARENQTTQKGQKNSRERMKRIEEGIKELGSQILKEHPVENTQLQNEKLYLYYLQNGRDMYVDQELDINRLSDYDVDHIVPQSFLKDDSIDNKVLTRSDKARGKSDNVPSEEVVKKMKNYWRQLLNAKLITQRKFDNLTKAERGGLSELDKAGFIKRQLVETRQITKHVAQILDSRMNTKYDENDKLIREVKVITLKSKLVSDFRKDFQFYKVREINNYHHAHDAYLNAVVGTALIKKYPKLESEFVYGDYKVYDVRKMIAKSEQEIGKATAKYFFYSNIMNFFKTEITLANGEIRKRPLIETNGETGEIVWDKGRDFATVRKVLSMPQVNIVKKTEVQTGGFSKESILPKRNSDKLIARKKDWDPKKYGGFDSPTVAYSVLVVAKVEKGKSKKLKSVKELLGITIMERSSFEKNPIDFLEAKGYKEVKKDLIIKLPKYSLFELENGRKRMLASAGELQKGNELALPSKYVNFLYLASHYEKLKGSPEDNEQKQLFVEQHKHYLDEIIEQISEFSKRVILADANLDKVLSAYNKHRDKPIREQAENIIHLFTLTNLGAPAAFKYFDTTIDRKRYTSTKEVLDATLIHQSITGLYETRIDLSQLGGDGGGSSGGSPAPGGLGIEDEYRLHETSTEPDVSLGSTWLSDFPQAWAETGGMGLAVRQAPLIIPLKATSTPVSIQQYPMSHEARLGIKPHIQRLLDQGILVPCQSPWNTPLLPVKKPGTNDYRPVQDLREVNKRVEDIHPTVPNPYNLLSGLPPSHQWYTVLDLKDAFFCLRLHPTSQPLFAFEWRDPGMGISGQLTWTRLPQGFKNSPTLFNEALHRDLADFRIQHPDLILLQYVDDILLAATSELDCQQGTRALLQTLGDLGYRASAKKAQICQKQVKYLGYLLREGQRWLTEARKETVMGQPVPKTPRQLREFLGKAGFCRLFIPGFAEMAAPLYPLTKPGTLFSWGPDQQKAYQEIKQALLTAPALGLPDLTKPFELFVDEKQGYAKGVLTQKLGPWRRPVAYLSKKLDPVAAGWPPCLRMVAAIAVLTKDAGKLTMGQPLVILAPHAVEALVKQPPDRWLSNARMTHYQAMLLDTDRVQFGPVVALNPATLLPLPEEGAPHDCLEILAETHGTRPDLTDQPIPDADHTWYTDGSSFLQEGQRKAGAAVTTETEVIWAGALPAGTSAQRAELIALTQALKMAEGKRLNVYTDSRYAFATAHIHGEIYRRRGWLTSEGREIKNKSEILALLKALFLPKRLSIIHCLGHQKGDSAEARGNRLADQAAREAAIKTPPDTSTLLIAGKRTADGSEFEKRTADGSEFESPKKKAKVE

SEQ ID NO: 2144 - protein, 2090 aa, synthetic construct
MPAAKRVKLDGGDKKYSIGLDIGTNSVGWAVITDEYKVPSKKFKVLGNTDRHSIKKNLIGALLFDSGETAEATRLKRTARRRYTRRKNRICYLQEIFSNEMAKVDDSFFHRLEESFLVEEDKKHERHPIFGNIVDEVAYHEKYPTIYHLRKKLVDSTDKADLRLIYLALAHMIKFRGHFLIEGDLNPDNSDVDKLFIQLVQTYNQLFEENPINASGVDAKAILSARLSKSRRLENLIAQLPGEKKNGLFGNLIALSLGLTPNFKSNFDLAEDAKLQLSKDTYDDDLDNLLAQIGDQYADLFLAAKNLSDAILLSDILRVNTEITKAPLSASMIKRYDEHHQDLTLLKALVRQQLPEKYKEIFFDQSKNGYAGYIDGGASQEEFYKFIKPILEKMDGTEELLVKLNREDLLRKQRTFDNGSIPHQIHLGELHAILRRQEDFYPFLKDNREKIEKILTFRIPYYVGPLARGNSRFAWMTRKSEETITPWNFEEVVDKGASAQSFIERMTNFDKNLPNEKVLPKHSLLYEYFTVYNELTKVKYVTEGMRKPAFLSGEQKKAIVDLLFKTNRKVTVKQLKEDYFKKIECFDSVEISGVEDRFNASLGTYHDLLKIIKDKDFLDNEENEDILEDIVLTLTLFEDREMIEERLKTYAHLFDDKVMKQLKRRRYTGWGRLSRKLINGIRDKQSGKTILDFLKSDGFANRNFMQLIHDDSLTFKEDIQKAQVSGQGDSLHEHIANLAGSPAIKKGILQTVKVVDELVKVMGRHKPENIVIEMARENQTTQKGQKNSRERMKRIEEGIKELGSQILKEHPVENTQLQNEKLYLYYLQNGRDMYVDQELDINRLSDYDVDHIVPQSFLKDDSIDNKVLTRSDKARGKSDNVPSEEVVKKMKNYWRQLLNAKLITQRKFDNLTKAERGGLSELDKAGFIKRQLVETRQITKHVAQILDSRMNTKYDENDKLIREVKVITLKSKLVSDFRKDFQFYKVREINNYHHAHDAYLNAVVGTALIKKYPKLESEFVYGDYKVYDVRKMIAKSEQEIGKATAKYFFYSNIMNFFKTEITLANGEIRKRPLIETNGETGEIVWDKGRDFATVRKVLSMPQVNIVKKTEVQTGGFSKESILPKRNSDKLIARKKDWDPKKYGGFDSPTVAYSVLVVAKVEKGKSKKLKSVKELLGITIMERSSFEKNPIDFLEAKGYKEVKKDLIIKLPKYSLFELENGRKRMLASAGELQKGNELALPSKYVNFLYLASHYEKLKGSPEDNEQKQLFVEQHKHYLDEIIEQISEFSKRVILADANLDKVLSAYNKHRDKPIREQAENIIHLFTLTNLGAPAAFKYFDTTIDRKRYTSTKEVLDATLIHQSITGLYETRIDLSQLGGDGGPAPAPGGLGIEDEYRLHETSTEPDVSLGSTWLSDFPQAWAETGGMGLAVRQAPLIIPLKATSTPVSIQQYPMSHEARLGIKPHIQRLLDQGILVPCQSPWNTPLLPVKKPGTNDYRPVQDLREVNKRVEDIHPTVPNPYNLLSGLPPSHQWYTVLDLKDAFFCLRLHPTSQPLFAFEWRDPGMGISGQLTWTRLPQGFKNSPTLFNEALHRDLADFRIQHPDLILLQYVDDILLAATSELDCQQGTRALLQTLGDLGYRASAKKAQICQKQVKYLGYLLREGQRWLTEARKETVMGQPVPKTPRQLREFLGKAGFCRLFIPGFAEMAAPLYPLTKPGTLFSWGPDQQKAYQEIKQALLTAPALGLPDLTKPFELFVDEKQGYAKGVLTQKLGPWRRPVAYLSKKLDPVAAGWPPCLRMVAAIAVLTKDAGKLTMGQPLVILAPHAVEALVKQPPDRWLSNARMTHYQAMLLDTDRVQFGPVVALNPATLLPLPEEGAPHDCLEILAETHGTRPDLTDQPIPDADHTWYTDGSSFLQEGQRKAGAAVTTETEVIWAGALPAGTSAQRAELIALTQALKMAEGKRLNVYTDSRYAFATAHIHGEIYRRRGWLTSEGREIKNKSEILALLKALFLPKRLSIIHCLGHQKGDSAEARGNRLADQAAREAAIKTPPDTSTLLIAGKRTADGSEFEKRTADGSEFESPKKKAKVE

SEQ ID NO: 2145 - protein, 2096 aa, synthetic construct
MPAAKRVKLDGGDKKYSIGLDIGTNSVGWAVITDEYKVPSKKFKVLGNTDRHSIKKNLIGALLFDSGETAEATRLKRTARRRYTRRKNRICYLQEIFSNEMAKVDDSFFHRLEESFLVEEDKKHERHPIFGNIVDEVAYHEKYPTIYHLRKKLVDSTDKADLRLIYLALAHMIKFRGHFLIEGDLNPDNSDVDKLFIQLVQTYNQLFEENPINASGVDAKAILSARLSKSRRLENLIAQLPGEKKNGLFGNLIALSLGLTPNFKSNFDLAEDAKLQLSKDTYDDDLDNLLAQIGDQYADLFLAAKNLSDAILLSDILRVNTEITKAPLSASMIKRYDEHHQDLTLLKALVRQQLPEKYKEIFFDQSKNGYAGYIDGGASQEEFYKFIKPILEKMDGTEELLVKLNREDLLRKQRTFDNGSIPHQIHLGELHAILRRQEDFYPFLKDNREKIEKILTFRIPYYVGPLARGNSRFAWMTRKSEETITPWNFEEVVDKGASAQSFIERMTNFDKNLPNEKVLPKHSLLYEYFTVYNELTKVKYVTEGMRKPAFLSGEQKKAIVDLLFKTNRKVTVKQLKEDYFKKIECFDSVEISGVEDRFNASLGTYHDLLKIIKDKDFLDNEENEDILEDIVLTLTLFEDREMIEERLKTYAHLFDDKVMKQLKRRRYTGWGRLSRKLINGIRDKQSGKTILDFLKSDGFANRNFMQLIHDDSLTFKEDIQKAQVSGQGDSLHEHIANLAGSPAIKKGILQTVKVVDELVKVMGRHKPENIVIEMARENQTTQKGQKNSRERMKRIEEGIKELGSQILKEHPVENTQLQNEKLYLYYLQNGRDMYVDQELDINRLSDYDVDHIVPQSFLKDDSIDNKVLTRSDKARGKSDNVPSEEVVKKMKNYWRQLLNAKLITQRKFDNLTKAERGGLSELDKAGFIKRQLVETRQITKHVAQILDSRMNTKYDENDKLIREVKVITLKSKLVSDFRKDFQFYKVREINNYHHAHDAYLNAVVGTALIKKYPKLESEFVYGDYKVYDVRKMIAKSEQEIGKATAKYFFYSNIMNFFKTEITLANGEIRKRPLIETNGETGEIVWDKGRDFATVRKVLSMPQVNIVKKTEVQTGGFSKESILPKRNSDKLIARKKDWDPKKYGGFDSPTVAYSVLVVAKVEKGKSKKLKSVKELLGITIMERSSFEKNPIDFLEAKGYKEVKKDLIIKLPKYSLFELENGRKRMLASAGELQKGNELALPSKYVNFLYLASHYEKLKGSPEDNEQKQLFVEQHKHYLDEIIEQISEFSKRVILADANLDKVLSAYNKHRDKPIREQAENIIHLFTLTNLGAPAAFKYFDTTIDRKRYTSTKEVLDATLIHQSITGLYETRIDLSQLGGDGGGGGGSSEAAAKGGLGIEDEYRLHETSTEPDVSLGSTWLSDFPQAWAETGGMGLAVRQAPLIIPLKATSTPVSIQQYPMSHEARLGIKPHIQRLLDQGILVPCQSPWNTPLLPVKKPGTNDYRPVQDLREVNKRVEDIHPTVPNPYNLLSGLPPSHQWYTVLDLKDAFFCLRLHPTSQPLFAFEWRDPGMGISGQLTWTRLPQGFKNSPTLFNEALHRDLADFRIQHPDLILLQYVDDILLAATSELDCQQGTRALLQTLGDLGYRASAKKAQICQKQVKYLGYLLREGQRWLTEARKETVMGQPVPKTPRQLREFLGKAGFCRLFIPGFAEMAAPLYPLTKPGTLFSWGPDQQKAYQEIKQALLTAPALGLPDLTKPFELFVDEKQGYAKGVLTQKLGPWRRPVAYLSKKLDPVAAGWPPCLRMVAAIAVLTKDAGKLTMGQPLVILAPHAVEALVKQPPDRWLSNARMTHYQAMLLDTDRVQFGPVVALNPATLLPLPEEGAPHDCLEILAETHGTRPDLTDQPIPDADHTWYTDGSSFLQEGQRKAGAAVTTETEVIWAGALPAGTSAQRAELIALTQALKMAEGKRLNVYTDSRYAFATAHIHGEIYRRRGWLTSEGREIKNKSEILALLKALFLPKRLSIIHCLGHQKGDSAEARGNRLADQAAREAAIKTPPDTSTLLIAGKRTADGSEFEKRTADGSEFESPKKKAKVE

SEQ ID NO: 2146 - protein, 2096 aa, synthetic construct
MPAAKRVKLDGGDKKYSIGLDIGTNSVGWAVITDEYKVPSKKFKVLGNTDRHSIKKNLIGALLFDSGETAEATRLKRTARRRYTRRKNRICYLQEIFSNEMAKVDDSFFHRLEESFLVEEDKKHERHPIFGNIVDEVAYHEKYPTIYHLRKKLVDSTDKADLRLIYLALAHMIKFRGHFLIEGDLNPDNSDVDKLFIQLVQTYNQLFEENPINASGVDAKAILSARLSKSRRLENLIAQLPGEKKNGLFGNLIALSLGLTPNFKSNFDLAEDAKLQLSKDTYDDDLDNLLAQIGDQYADLFLAAKNLSDAILLSDILRVNTEITKAPLSASMIKRYDEHHQDLTLLKALVRQQLPEKYKEIFFDQSKNGYAGYIDGGASQEEFYKFIKPILEKMDGTEELLVKLNREDLLRKQRTFDNGSIPHQIHLGELHAILRRQEDFYPFLKDNREKIEKILTFRIPYYVGPLARGNSRFAWMTRKSEETITPWNFEEVVDKGASAQSFIERMTNFDKNLPNEKVLPKHSLLYEYFTVYNELTKVKYVTEGMRKPAFLSGEQKKAIVDLLFKTNRKVTVKQLKEDYFKKIECFDSVEISGVEDRFNASLGTYHDLLKIIKDKDFLDNEENEDILEDIVLTLTLFEDREMIEERLKTYAHLFDDKVMKQLKRRRYTGWGRLSRKLINGIRDKQSGKTILDFLKSDGFANRNFMQLIHDDSLTFKEDIQKAQVSGQGDSLHEHIANLAGSPAIKKGILQTVKVVDELVKVMGRHKPENIVIEMARENQTTQKGQKNSRERMKRIEEGIKELGSQILKEHPVENTQLQNEKLYLYYLQNGRDMYVDQELDINRLSDYDVDHIVPQSFLKDDSIDNKVLTRSDKARGKSDNVPSEEVVKKMKNYWRQLLNAKLITQRKFDNLTKAERGGLSELDKAGFIKRQLVETRQITKHVAQILDSRMNTKYDENDKLIREVKVITLKSKLVSDFRKDFQFYKVREINNYHHAHDAYLNAVVGTALIKKYPKLESEFVYGDYKVYDVRKMIAKSEQEIGKATAKYFFYSNIMNFFKTEITLANGEIRKRPLIETNGETGEIVWDKGRDFATVRKVLSMPQVNIVKKTEVQTGGFSKESILPKRNSDKLIARKKDWDPKKYGGFDSPTVAYSVLVVAKVEKGKSKKLKSVKELLGITIMERSSFEKNPIDFLEAKGYKEVKKDLIIKLPKYSLFELENGRKRMLASAGELQKGNELALPSKYVNFLYLASHYEKLKGSPEDNEQKQLFVEQHKHYLDEIIEQISEFSKRVILADANLDKVLSAYNKHRDKPIREQAENIIHLFTLTNLGAPAAFKYFDTTIDRKRYTSTKEVLDATLIHQSITGLYETRIDLSQLGGDGGGGSEAAAKPAPGGLGIEDEYRLHETSTEPDVSLGSTWLSDFPQAWAETGGMGLAVRQAPLIIPLKATSTPVSIQQYPMSHEARLGIKPHIQRLLDQGILVPCQSPWNTPLLPVKKPGTNDYRPVQDLREVNKRVEDIHPTVPNPYNLLSGLPPSHQWYTVLDLKDAFFCLRLHPTSQPLFAFEWRDPGMGISGQLTWTRLPQGFKNSPTLFNEALHRDLADFRIQHPDLILLQYVDDILLAATSELDCQQGTRALLQTLGDLGYRASAKKAQICQKQVKYLGYLLREGQRWLTEARKETVMGQPVPKTPRQLREFLGKAGFCRLFIPGFAEMAAPLYPLTKPGTLFSWGPDQQKAYQEIKQALLTAPALGLPDLTKPFELFVDEKQGYAKGVLTQKLGPWRRPVAYLSKKLDPVAAGWPPCLRMVAAIAVLTKDAGKLTMGQPLVILAPHAVEALVKQPPDRWLSNARMTHYQAMLLDTDRVQFGPVVALNPATLLPLPEEGAPHDCLEILAETHGTRPDLTDQPIPDADHTWYTDGSSFLQEGQRKAGAAVTTETEVIWAGALPAGTSAQRAELIALTQALKMAEGKRLNVYTDSRYAFATAHIHGEIYRRRGWLTSEGREIKNKSEILALLKALFLPKRLSIIHCLGHQKGDSAEARGNRLADQAAREAAIKTPPDTSTLLIAGKRTADGSEFEKRTADGSEFESPKKKAKVE

SEQ ID NO: 2147 - protein, 2093 aa, synthetic construct
MPAAKRVKLDGGDKKYSIGLDIGTNSVGWAVITDEYKVPSKKFKVLGNTDRHSIKKNLIGALLFDSGETAEATRLKRTARRRYTRRKNRICYLQEIFSNEMAKVDDSFFHRLEESFLVEEDKKHERHPIFGNIVDEVAYHEKYPTIYHLRKKLVDSTDKADLRLIYLALAHMIKFRGHFLIEGDLNPDNSDVDKLFIQLVQTYNQLFEENPINASGVDAKAILSARLSKSRRLENLIAQLPGEKKNGLFGNLIALSLGLTPNFKSNFDLAEDAKLQLSKDTYDDDLDNLLAQIGDQYADLFLAAKNLSDAILLSDILRVNTEITKAPLSASMIKRYDEHHQDLTLLKALVRQQLPEKYKEIFFDQSKNGYAGYIDGGASQEEFYKFIKPILEKMDGTEELLVKLNREDLLRKQRTFDNGSIPHQIHLGELHAILRRQEDFYPFLKDNREKIEKILTFRIPYYVGPLARGNSRFAWMTRKSEETITPWNFEEVVDKGASAQSFIERMTNFDKNLPNEKVLPKHSLLYEYFTVYNELTKVKYVTEGMRKPAFLSGEQKKAIVDLLFKTNRKVTVKQLKEDYFKKIECFDSVEISGVEDRFNASLGTYHDLLKIIKDKDFLDNEENEDILEDIVLTLTLFEDREMIEERLKTYAHLFDDKVMKQLKRRRYTGWGRLSRKLINGIRDKQSGKTILDFLKSDGFANRNFMQLIHDDSLTFKEDIQKAQVSGQGDSLHEHIANLAGSPAIKKGILQTVKVVDELVKVMGRHKPENIVIEMARENQTTQKGQKNSRERMKRIEEGIKELGSQILKEHPVENTQLQNEKLYLYYLQNGRDMYVDQELDINRLSDYDVDHIVPQSFLKDDSIDNKVLTRSDKARGKSDNVPSEEVVKKMKNYWRQLLNAKLITQRKFDNLTKAERGGLSELDKAGFIKRQLVETRQITKHVAQILDSRMNTKYDENDKLIREVKVITLKSKLVSDFRKDFQFYKVREINNYHHAHDAYLNAVVGTALIKKYPKLESEFVYGDYKVYDVRKMIAKSEQEIGKATAKYFFYSNIMNFFKTEITLANGEIRKRPLIETNGETGEIVWDKGRDFATVRKVLSMPQVNIVKKTEVQTGGFSKESILPKRNSDKLIARKKDWDPKKYGGFDSPTVAYSVLVVAKVEKGKSKKLKSVKELLGITIMERSSFEKNPIDFLEAKGYKEVKKDLIIKLPKYSLFELENGRKRMLASAGELQKGNELALPSKYVNFLYLASHYEKLKGSPEDNEQKQLFVEQHKHYLDEIIEQISEFSKRVILADANLDKVLSAYNKHRDKPIREQAENIIHLFTLTNLGAPAAFKYFDTTIDRKRYTSTKEVLDATLIHQSITGLYETRIDLSQLGGDGGEAAAKPAPGGLGIEDEYRLHETSTEPDVSLGSTWLSDFPQAWAETGGMGLAVRQAPLIIPLKATSTPVSIQQYPMSHEARLGIKPHIQRLLDQGILVPCQSPWNTPLLPVKKPGTNDYRPVQDLREVNKRVEDIHPTVPNPYNLLSGLPPSHQWYTVLDLKDAFFCLRLHPTSQPLFAFEWRDPGMGISGQLTWTRLPQGFKNSPTLFNEALHRDLADFRIQHPDLILLQYVDDILLAATSELDCQQGTRALLQTLGDLGYRASAKKAQICQKQVKYLGYLLREGQRWLTEARKETVMGQPVPKTPRQLREFLGKAGFCRLFIPGFAEMAAPLYPLTKPGTLFSWGPDQQKAYQEIKQALLTAPALGLPDLTKPFELFVDEKQGYAKGVLTQKLGPWRRPVAYLSKKLDPVAAGWPPCLRMVAAIAVLTKDAGKLTMGQPLVILAPHAVEALVKQPPDRWLSNARMTHYQAMLLDTDRVQFGPVVALNPATLLPLPEEGAPHDCLEILAETHGTRPDLTDQPIPDADHTWYTDGSSFLQEGQRKAGAAVTTETEVIWAGALPAGTSAQRAELIALTQALKMAEGKRLNVYTDSRYAFATAHIHGEIYRRRGWLTSEGREIKNKSEILALLKALFLPKRLSIIHCLGHQKGDSAEARGNRLADQAAREAAIKTPPDTSTLLIAGKRTADGSEFEKRTADGSEFESPKKKAKVE

SEQ ID NO: 2148 - protein, 2091 aa, synthetic construct
MPAAKRVKLDGGDKKYSIGLDIGTNSVGWAVITDEYKVPSKKFKVLGNTDRHSIKKNLIGALLFDSGETAEATRLKRTARRRYTRRKNRICYLQEIFSNEMAKVDDSFFHRLEESFLVEEDKKHERHPIFGNIVDEVAYHEKYPTIYHLRKKLVDSTDKADLRLIYLALAHMIKFRGHFLIEGDLNPDNSDVDKLFIQLVQTYNQLFEENPINASGVDAKAILSARLSKSRRLENLIAQLPGEKKNGLFGNLIALSLGLTPNFKSNFDLAEDAKLQLSKDTYDDDLDNLLAQIGDQYADLFLAAKNLSDAILLSDILRVNTEITKAPLSASMIKRYDEHHQDLTLLKALVRQQLPEKYKEIFFDQSKNGYAGYIDGGASQEEFYKFIKPILEKMDGTEELLVKLNREDLLRKQRTFDNGSIPHQIHLGELHAILRRQEDFYPFLKDNREKIEKILTFRIPYYVGPLARGNSRFAWMTRKSEETITPWNFEEVVDKGASAQSFIERMTNFDKNLPNEKVLPKHSLLYEYFTVYNELTKVKYVTEGMRKPAFLSGEQKKAIVDLLFKTNRKVTVKQLKEDYFKKIECFDSVEISGVEDRFNASLGTYHDLLKIIKDKDFLDNEENEDILEDIVLTLTLFEDREMIEERLKTYAHLFDDKVMKQLKRRRYTGWGRLSRKLINGIRDKQSGKTILDFLKSDGFANRNFMQLIHDDSLTFKEDIQKAQVSGQGDSLHEHIANLAGSPAIKKGILQTVKVVDELVKVMGRHKPENIVIEMARENQTTQKGQKNSRERMKRIEEGIKELGSQILKEHPVENTQLQNEKLYLYYLQNGRDMYVDQELDINRLSDYDVDHIVPQSFLKDDSIDNKVLTRSDKARGKSDNVPSEEVVKKMKNYWRQLLNAKLITQRKFDNLTKAERGGLSELDKAGFIKRQLVETRQITKHVAQILDSRMNTKYDENDKLIREVKVITLKSKLVSDFRKDFQFYKVREINNYHHAHDAYLNAVVGTALIKKYPKLESEFVYGDYKVYDVRKMIAKSEQEIGKATAKYFFYSNIMNFFKTEITLANGEIRKRPLIETNGETGEIVWDKGRDFATVRKVLSMPQVNIVKKTEVQTGGFSKESILPKRNSDKLIARKKDWDPKKYGGFDSPTVAYSVLVVAKVEKGKSKKLKSVKELLGITIMERSSFEKNPIDFLEAKGYKEVKKDLIIKLPKYSLFELENGRKRMLASAGELQKGNELALPSKYVNFLYLASHYEKLKGSPEDNEQKQLFVEQHKHYLDEIIEQISEFSKRVILADANLDKVLSAYNKHRDKPIREQAENIIHLFTLTNLGAPAAFKYFDTTIDRKRYTSTKEVLDATLIHQSITGLYETRIDLSQLGGDGGGGSGGGGGLGIEDEYRLHETSTEPDVSLGSTWLSDFPQAWAETGGMGLAVRQAPLIIPLKATSTPVSIQQYPMSHEARLGIKPHIQRLLDQGILVPCQSPWNTPLLPVKKPGTNDYRPVQDLREVNKRVEDIHPTVPNPYNLLSGLPPSHQWYTVLDLKDAFFCLRLHPTSQPLFAFEWRDPGMGISGQLTWTRLPQGFKNSPTLFNEALHRDLADFRIQHPDLILLQYVDDILLAATSELDCQQGTRALLQTLGDLGYRASAKKAQICQKQVKYLGYLLREGQRWLTEARKETVMGQPVPKTPRQLREFLGKAGFCRLFIPGFAEMAAPLYPLTKPGTLFSWGPDQQKAYQEIKQALLTAPALGLPDLTKPFELFVDEKQGYAKGVLTQKLGPWRRPVAYLSKKLDPVAAGWPPCLRMVAAIAVLTKDAGKLTMGQPLVILAPHAVEALVKQPPDRWLSNARMTHYQAMLLDTDRVQFGPVVALNPATLLPLPEEGAPHDCLEILAETHGTRPDLTDQPIPDADHTWYTDGSSFLQEGQRKAGAAVTTETEVIWAGALPAGTSAQRAELIALTQALKMAEGKRLNVYTDSRYAFATAHIHGEIYRRRGWLTSEGREIKNKSEILALLKALFLPKRLSIIHCLGHQKGDSAEARGNRLADQAAREAAIKTPPDTSTLLIAGKRTADGSEFEKRTADGSEFESPKKKAKVE

SEQ ID NO: 2149 - protein, 2096 aa, synthetic construct
MPAAKRVKLDGGDKKYSIGLDIGTNSVGWAVITDEYKVPSKKFKVLGNTDRHSIKKNLIGALLFDSGETAEATRLKRTARRRYTRRKNRICYLQEIFSNEMAKVDDSFFHRLEESFLVEEDKKHERHPIFGNIVDEVAYHEKYPTIYHLRKKLVDSTDKADLRLIYLALAHMIKFRGHFLIEGDLNPDNSDVDKLFIQLVQTYNQLFEENPINASGVDAKAILSARLSKSRRLENLIAQLPGEKKNGLFGNLIALSLGLTPNFKSNFDLAEDAKLQLSKDTYDDDLDNLLAQIGDQYADLFLAAKNLSDAILLSDILRVNTEITKAPLSASMIKRYDEHHQDLTLLKALVRQQLPEKYKEIFFDQSKNGYAGYIDGGASQEEFYKFIKPILEKMDGTEELLVKLNREDLLRKQRTFDNGSIPHQIHLGELHAILRRQEDFYPFLKDNREKIEKILTFRIPYYVGPLARGNSRFAWMTRKSEETITPWNFEEVVDKGASAQSFIERMTNFDKNLPNEKVLPKHSLLYEYFTVYNELTKVKYVTEGMRKPAFLSGEQKKAIVDLLFKTNRKVTVKQLKEDYFKKIECFDSVEISGVEDRFNASLGTYHDLLKIIKDKDFLDNEENEDILEDIVLTLTLFEDREMIEERLKTYAHLFDDKVMKQLKRRRYTGWGRLSRKLINGIRDKQSGKTILDFLKSDGFANRNFMQLIHDDSLTFKEDIQKAQVSGQGDSLHEHIANLAGSPAIKKGILQTVKVVDELVKVMGRHKPENIVIEMARENQTTQKGQKNSRERMKRIEEGIKELGSQILKEHPVENTQLQNEKLYLYYLQNGRDMYVDQELDINRLSDYDVDHIVPQSFLKDDSIDNKVLTRSDKARGKSDNVPSEEVVKKMKNYWRQLLNAKLITQRKFDNLTKAERGGLSELDKAGFIKRQLVETRQITKHVAQILDSRMNTKYDENDKLIREVKVITLKSKLVSDFRKDFQFYKVREINNYHHAHDAYLNAVVGTALIKKYPKLESEFVYGDYKVYDVRKMIAKSEQEIGKATAKYFFYSNIMNFFKTEITLANGEIRKRPLIETNGETGEIVWDKGRDFATVRKVLSMPQVNIVKKTEVQTGGFSKESILPKRNSDKLIARKKDWDPKKYGGFDSPTVAYSVLVVAKVEKGKSKKLKSVKELLGITIMERSSFEKNPIDFLEAKGYKEVKKDLIIKLPKYSLFELENGRKRMLASAGELQKGNELALPSKYVNFLYLASHYEKLKGSPEDNEQKQLFVEQHKHYLDEIIEQISEFSKRVILADANLDKVLSAYNKHRDKPIREQAENIIHLFTLTNLGAPAAFKYFDTTIDRKRYTSTKEVLDATLIHQSITGLYETRIDLSQLGGDGGGSSPAPEAAAKGGLGIEDEYRLHETSTEPDVSLGSTWLSDFPQAWAETGGMGLAVRQAPLIIPLKATSTPVSIQQYPMSHEARLGIKPHIQRLLDQGILVPCQSPWNTPLLPVKKPGTNDYRPVQDLREVNKRVEDIHPTVPNPYNLLSGLPPSHQWYTVLDLKDAFFCLRLHPTSQPLFAFEWRDPGMGISGQLTWTRLPQGFKNSPTLFNEALHRDLADFRIQHPDLILLQYVDDILLAATSELDCQQGTRALLQTLGDLGYRASAKKAQICQKQVKYLGYLLREGQRWLTEARKETVMGQPVPKTPRQLREFLGKAGFCRLFIPGFAEMAAPLYPLTKPGTLFSWGPDQQKAYQEIKQALLTAPALGLPDLTKPFELFVDEKQGYAKGVLTQKLGPWRRPVAYLSKKLDPVAAGWPPCLRMVAAIAVLTKDAGKLTMGQPLVILAPHAVEALVKQPPDRWLSNARMTHYQAMLLDTDRVQFGPVVALNPATLLPLPEEGAPHDCLEILAETHGTRPDLTDQPIPDADHTWYTDGSSFLQEGQRKAGAAVTTETEVIWAGALPAGTSAQRAELIALTQALKMAEGKRLNVYTDSRYAFATAHIHGEIYRRRGWLTSEGREIKNKSEILALLKALFLPKRLSIIHCLGHQKGDSAEARGNRLADQAAREAAIKTPPDTSTLLIAGKRTADGSEFEKRTADGSEFESPKKKAKVE

SEQ ID NO: 2150 - protein, 2091 aa, synthetic construct; identical to SEQ ID NO: 2057

SEQ ID NO: 2151 - protein, 2094 aa, synthetic construct
MPAAKRVKLDGGDKKYSIGLDIGTNSVGWAVITDEYKVPSKKFKVLGNTDRHSIKKNLIGALLFDSGETAEATRLKRTARRRYTRRKNRICYLQEIFSNEMAKVDDSFFHRLEESFLVEEDKKHERHPIFGNIVDEVAYHEKYPTIYHLRKKLVDSTDKADLRLIYLALAHMIKFRGHFLIEGDLNPDNSDVDKLFIQLVQTYNQLFEENPINASGVDAKAILSARLSKSRRLENLIAQLPGEKKNGLFGNLIALSLGLTPNFKSNFDLAEDAKLQLSKDTYDDDLDNLLAQIGDQYADLFLAAKNLSDAILLSDILRVNTEITKAPLSASMIKRYDEHHQDLTLLKALVRQQLPEKYKEIFFDQSKNGYAGYIDGGASQEEFYKFIKPILEKMDGTEELLVKLNREDLLRKQRTFDNGSIPHQIHLGELHAILRRQEDFYPFLKDNREKIEKILTFRIPYYVGPLARGNSRFAWMTRKSEETITPWNFEEVVDKGASAQSFIERMTNFDKNLPNEKVLPKHSLLYEYFTVYNELTKVKYVTEGMRKPAFLSGEQKKAIVDLLFKTNRKVTVKQLKEDYFKKIECFDSVEISGVEDRFNASLGTYHDLLKIIKDKDFLDNEENEDILEDIVLTLTLFEDREMIEERLKTYAHLFDDKVMKQLKRRRYTGWGRLSRKLINGIRDKQSGKTILDFLKSDGFANRNFMQLIHDDSLTFKEDIQKAQVSGQGDSLHEHIANLAGSPAIKKGILQTVKVVDELVKVMGRHKPENIVIEMARENQTTQKGQKNSRERMKRIEEGIKELGSQILKEHPVENTQLQNEKLYLYYLQNGRDMYVDQELDINRLSDYDVDHIVPQSFLKDDSIDNKVLTRSDKARGKSDNVPSEEVVKKMKNYWRQLLNAKLITQRKFDNLTKAERGGLSELDKAGFIKRQLVETRQITKHVAQILDSRMNTKYDENDKLIREVKVITLKSKLVSDFRKDFQFYKVREINNYHHAHDAYLNAVVGTALIKKYPKLESEFVYGDYKVYDVRKMIAKSEQEIGKATAKYFFYSNIMNFFKTEITLANGEIRKRPLIETNGETGEIVWDKGRDFATVRKVLSMPQVNIVKKTEVQTGGFSKESILPKRNSDKLIARKKDWDPKKYGGFDSPTVAYSVLVVAKVEKGKSKKLKSVKELLGITIMERSSFEKNPIDFLEAKGYKEVKKDLIIKLPKYSLFELENGRKRMLASAGELQKGNELALPSKYVNFLYLASHYEKLKGSPEDNEQKQLFVEQHKHYLDEIIEQISEFSKRVILADANLDKVLSAYNKHRDKPIREQAENIIHLFTLTNLGAPAAFKYFDTTIDRKRYTSTKEVLDATLIHQSITGLYETRIDLSQLGGDGGPAPGGGGGSGGLGIEDEYRLHETSTEPDVSLGSTWLSDFPQAWAETGGMGLAVRQAPLIIPLKATSTPVSIQQYPMSHEARLGIKPHIQRLLDQGILVPCQSPWNTPLLPVKKPGTNDYRPVQDLREVNKRVEDIHPTVPNPYNLLSGLPPSHQWYTVLDLKDAFFCLRLHPTSQPLFAFEWRDPGMGISGQLTWTRLPQGFKNSPTLFNEALHRDLADFRIQHPDLILLQYVDDILLAATSELDCQQGTRALLQTLGDLGYRASAKKAQICQKQVKYLGYLLREGQRWLTEARKETVMGQPVPKTPRQLREFLGKAGFCRLFIPGFAEMAAPLYPLTKPGTLFSWGPDQQKAYQEIKQALLTAPALGLPDLTKPFELFVDEKQGYAKGVLTQKLGPWRRPVAYLSKKLDPVAAGWPPCLRMVAAIAVLTKDAGKLTMGQPLVILAPHAVEALVKQPPDRWLSNARMTHYQAMLLDTDRVQFGPVVALNPATLLPLPEEGAPHDCLEILAETHGTRPDLTDQPIPDADHTWYTDGSSFLQEGQRKAGAAVTTETEVIWAGALPAGTSAQRAELIALTQALKMAEGKRLNVYTDSRYAFATAHIHGEIYRRRGWLTSEGREIKNKSEILALLKALFLPKRLSIIHCLGHQKGDSAEARGNRLADQAAREAAIKTPPDTSTLLIAGKRTADGSEFEKRTADGSEFESPKKKAKVE

SEQ ID NO: 2152 - protein, 2093 aa, synthetic construct
MPAAKRVKLDGGDKKYSIGLDIGTNSVGWAVITDEYKVPSKKFKVLGNTDRHSIKKNLIGALLFDSGETAEATRLKRTARRRYTRRKNRICYLQEIFSNEMAKVDDSFFHRLEESFLVEEDKKHERHPIFGNIVDEVAYHEKYPTIYHLRKKLVDSTDKADLRLIYLALAHMIKFRGHFLIEGDLNPDNSDVDKLFIQLVQTYNQLFEENPINASGVDAKAILSARLSKSRRLENLIAQLPGEKKNGLFGNLIALSLGLTPNFKSNFDLAEDAKLQLSKDTYDDDLDNLLAQIGDQYADLFLAAKNLSDAILLSDILRVNTEITKAPLSASMIKRYDEHHQDLTLLKALVRQQLPEKYKEIFFDQSKNGYAGYIDGGASQEEFYKFIKPILEKMDGTEELLVKLNREDLLRKQRTFDNGSIPHQIHLGELHAILRRQEDFYPFLKDNREKIEKILTFRIPYYVGPLARGNSRFAWMTRKSEETITPWNFEEVVDKGASAQSFIERMTNFDKNLPNEKVLPKHSLLYEYFTVYNELTKVKYVTEGMRKPAFLSGEQKKAIVDLLFKTNRKVTVKQLKEDYFKKIECFDSVEISGVEDRFNASLGTYHDLLKIIKDKDFLDNEENEDILEDIVLTLTLFEDREMIEERLKTYAHLFDDKVMKQLKRRRYTGWGRLSRKLINGIRDKQSGKTILDFLKSDGFANRNFMQLIHDDSLTFKEDIQKAQVSGQGDSLHEHIANLAGSPAIKKGILQTVKVVDELVKVMGRHKPENIVIEMARENQTTQKGQKNSRERMKRIEEGIKELGSQILKEHPVENTQLQNEKLYLYYLQNGRDMYVDQELDINRLSDYDVDHIVPQSFLKDDSIDNKVLTRSDKARGKSDNVPSEEVVKKMKNYWRQLLNAKLITQRKFDNLTKAERGGLSELDKAGFIKRQLVETRQITKHVAQILDSRMNTKYDENDKLIREVKVITLKSKLVSDFRKDFQFYKVREINNYHHAHDAYLNAVVGTALIKKYPKLESEFVYGDYKVYDVRKMIAKSEQEIGKATAKYFFYSNIMNFFKTEITLANGEIRKRPLIETNGETGEIVWDKGRDFATVRKVLSMPQVNIVKKTEVQTGGFSKESILPKRNSDKLIARKKDWDPKKYGGFDSPTVAYSVLVVAKVEKGKSKKLKSVKELLGITIMERSSFEKNPIDFLEAKGYKEVKKDLIIKLPKYSLFELENGRKRMLASAGELQKGNELALPSKYVNFLYLASHYEKLKGSPEDNEQKQLFVEQHKHYLDEIIEQISEFSKRVILADANLDKVLSAYNKHRDKPIREQAENIIHLFTLTNLGAPAAFKYFDTTIDRKRYTSTKEVLDATLIHQSITGLYETRIDLSQLGGDGGEAAAKGGGGGLGIEDEYRLHETSTEPDVSLGSTWLSDFPQAWAETGGMGLAVRQAPLIIPLKATSTPVSIQQYPMSHEARLGIKPHIQRLLDQGILVPCQSPWNTPLLPVKKPGTNDYRPVQDLREVNKRVEDIHPTVPNPYNLLSGLPPSHQWYTVLDLKDAFFCLRLHPTSQPLFAFEWRDPGMGISGQLTWTRLPQGFKNSPTLFNEALHRDLADFRIQHPDLILLQYVDDILLAATSELDCQQGTRALLQTLGDLGYRASAKKAQICQKQVKYLGYLLREGQRWLTEARKETVMGQPVPKTPRQLREFLGKAGFCRLFIPGFAEMAAPLYPLTKPGTLFSWGPDQQKAYQEIKQALLTAPALGLPDLTKPFELFVDEKQGYAKGVLTQKLGPWRRPVAYLSKKLDPVAAGWPPCLRMVAAIAVLTKDAGKLTMGQPLVILAPHAVEALVKQPPDRWLSNARMTHYQAMLLDTDRVQFGPVVALNPATLLPLPEEGAPHDCLEILAETHGTRPDLTDQPIPDADHTWYTDGSSFLQEGQRKAGAAVTTETEVIWAGALPAGTSAQRAELIALTQALKMAEGKRLNVYTDSRYAFATAHIHGEIYRRRGWLTSEGREIKNKSEILALLKALFLPKRLSIIHCLGHQKGDSAEARGNRLADQAAREAAIKTPPDTSTLLIAGKRTADGSEFEKRTADGSEFESPKKKAKVE

SEQ ID NO: 2153 - protein, 2094 aa, synthetic construct
MPAAKRVKLDGGDKKYSIGLDIGTNSVGWAVITDEYKVPSKKFKVLGNTDRHSIKKNLIGALLFDSGETAEATRLKRTARRRYTRRKNRICYLQEIFSNEMAKVDDSFFHRLEESFLVEEDKKHERHPIFGNIVDEVAYHEKYPTIYHLRKKLVDSTDKADLRLIYLALAHMIKFRGHFLIEGDLNPDNSDVDKLFIQLVQTYNQLFEENPINASGVDAKAILSARLSKSRRLENLIAQLPGEKKNGLFGNLIALSLGLTPNFKSNFDLAEDAKLQLSKDTYDDDLDNLLAQIGDQYADLFLAAKNLSDAILLSDILRVNTEITKAPLSASMIKRYDEHHQDLTLLKALVRQQLPEKYKEIFFDQSKNGYAGYIDGGASQEEFYKFIKPILEKMDGTEELLVKLNREDLLRKQRTFDNGSIPHQIHLGELHAILRRQEDFYPFLKDNREKIEKILTFRIPYYVGPLARGNSRFAWMTRKSEETITPWNFEEVVDKGASAQSFIERMTNFDKNLPNEKVLPKHSLLYEYFTVYNELTKVKYVTEGMRKPAFLSGEQKKAIVDLLFKTNRKVTVKQLKEDYFKKIECFDSVEISGVEDRFNASLGTYHDLLKIIKDKDFLDNEENEDILEDIVLTLTLFEDREMIEERLKTYAHLFDDKVMKQLKRRRYTGWGRLSRKLINGIRDKQSGKTILDFLKSDGFANRNFMQLIHDDSLTFKEDIQKAQVSGQGDSLHEHIANLAGSPAIKKGILQTVKVVDELVKVMGRHKPENIVIEMARENQTTQKGQKNSRERMKRIEEGIKELGSQILKEHPVENTQLQNEKLYLYYLQNGRDMYVDQELDINRLSDYDVDHIVPQSFLKDDSIDNKVLTRSDKARGKSDNVPSEEVVKKMKNYWRQLLNAKLITQRKFDNLTKAERGGLSELDKAGFIKRQLVETRQITKHVAQILDSRMNTKYDENDKLIREVKVITLKSKLVSDFRKDFQFYKVREINNYHHAHDAYLNAVVGTALIKKYPKLESEFVYGDYKVYDVRKMIAKSEQEIGKATAKYFFYSNIMNFFKTEITLANGEIRKRPLIETNGETGEIVWDKGRDFATVRKVLSMPQVNIVKKTEVQTGGFSKESILPKRNSDKLIARKKDWDPKKYGGFDSPTVAYSVLVVAKVEKGKSKKLKSVKELLGITIMERSSFEKNPIDFLEAKGYKEVKKDLIIKLPKYSLFELENGRKRMLASAGELQKGNELALPSKYVNFLYLASHYEKLKGSPEDNEQKQLFVEQHKHYLDEIIEQISEFSKRVILADANLDKVLSAYNKHRDKPIREQAENIIHLFTLTNLGAPAAFKYFDTTIDRKRYTSTKEVLDATLIHQSITGLYETRIDLSQLGGDGGPAPGGSGGGGGLGIEDEYRLHETSTEPDVSLGSTWLSDFPQAWAETGGMGLAVRQAPLIIPLKATSTPVSIQQYPMSHEARLGIKPHIQRLLDQGILVPCQSPWNTPLLPVKKPGTNDYRPVQDLREVNKRVEDIHPTVPNPYNLLSGLPPSHQWYTVLDLKDAFFCLRLHPTSQPLFAFEWRDPGMGISGQLTWTRLPQGFKNSPTLFNEALHRDLADFRIQHPDLILLQYVDDILLAATSELDCQQGTRALLQTLGDLGYRASAKKAQICQKQVKYLGYLLREGQRWLTEARKETVMGQPVPKTPRQLREFLGKAGFCRLFIPGFAEMAAPLYPLTKPGTLFSWGPDQQKAYQEIKQALLTAPALGLPDLTKPFELFVDEKQGYAKGVLTQKLGPWRRPVAYLSKKLDPVAAGWPPCLRMVAAIAVLTKDAGKLTMGQPLVILAPHAVEALVKQPPDRWLSNARMTHYQAMLLDTDRVQFGPVVALNPATLLPLPEEGAPHDCLEILAETHGTRPDLTDQPIPDADHTWYTDGSSFLQEGQRKAGAAVTTETEVIWAGALPAGTSAQRAELIALTQALKMAEGKRLNVYTDSRYAFATAHIHGEIYRRRGWLTSEGREIKNKSEILALLKALFLPKRLSIIHCLGHQKGDSAEARGNRLADQAAREAAIKTPPDTSTLLIAGKRTADGSEFEKRTADGSEFESPKKKAKVE

SEQ ID NO: 2154 - protein, 2094 aa, synthetic construct
MPAAKRVKLDGGDKKYSIGLDIGTNSVGWAVITDEYKVPSKKFKVLGNTDRHSIKKNLIGALLFDSGETAEATRLKRTARRRYTRRKNRICYLQEIFSNEMAKVDDSFFHRLEESFLVEEDKKHERHPIFGNIVDEVAYHEKYPTIYHLRKKLVDSTDKADLRLIYLALAHMIKFRGHFLIEGDLNPDNSDVDKLFIQLVQTYNQLFEENPINASGVDAKAILSARLSKSRRLENLIAQLPGEKKNGLFGNLIALSLGLTPNFKSNFDLAEDAKLQLSKDTYDDDLDNLLAQIGDQYADLFLAAKNLSDAILLSDILRVNTEITKAPLSASMIKRYDEHHQDLTLLKALVRQQLPEKYKEIFFDQSKNGYAGYIDGGASQEEFYKFIKPILEKMDGTEELLVKLNREDLLRKQRTFDNGSIPHQIHLGELHAILRRQEDFYPFLKDNREKIEKILTFRIPYYVGPLARGNSRFAWMTRKSEETITPWNFEEVVDKGASAQSFIERMTNFDKNLPNEKVLPKHSLLYEYFTVYNELTKVKYVTEGMRKPAFLSGEQKKAIVDLLFKTNRKVTVKQLKEDYFKKIECFDSVEISGVEDRFNASLGTYHDLLKIIKDKDFLDNEENEDILEDIVLTLTLFEDREMIEERLKTYAHLFDDKVMKQLKRRRYTGWGRLSRKLINGIRDKQSGKTILDFLKSDGFANRNFMQLIHDDSLTFKEDIQKAQVSGQGDSLHEHIANLAGSPAIKKGILQTVKVVDELVKVMGRHKPENIVIEMARENQTTQKGQKNSRERMKRIEEGIKELGSQILKEHPVENTQLQNEKLYLYYLQNGRDMYVDQELDINRLSDYDVDHIVPQSFLKDDSIDNKVLTRSDKARGKSDNVPSEEVVKKMKNYWRQLLNAKLITQRKFDNLTKAERGGLSELDKAGFIKRQLVETRQITKHVAQILDSRMNTKYDENDKLIREVKVITLKSKLVSDFRKDFQFYKVREINNYHHAHDAYLNAVVGTALIKKYPKLESEFVYGDYKVYDVRKMIAKSEQEIGKATAKYFFYSNIMNFFKTEITLANGEIRKRPLIETNGETGEIVWDKGRDFATVRKVLSMPQVNIVKKTEVQTGGFSKESILPKRNSDKLIARKKDWDPKKYGGFDSPTVAYSVLVVAKVEKGKSKKLKSVKELLGITIMERSSFEKNPIDFLEAKGYKEVKKDLIIKLPKYSLFELENGRKRMLASAGELQKGNELALPSKYVNFLYLASHYEKLKGSPEDNEQKQLFVEQHKHYLDEIIEQISEFSKRVILADANLDKVLSAYNKHRDKPIREQAENIIHLFTLTNLGAPAAFKYFDTTIDRKRYTSTKEVLDATLIHQSITGLYETRIDLSQLGGDGGGGGPAPGGSGGLGIEDEYRLHETSTEPDVSLGSTWLSDFPQAWAETGGMGLAVRQAPLIIPLKATSTPVSIQQYPMSHEARLGIKPHIQRLLDQGILVPCQSPWNTPLLPVKKPGTNDYRPVQDLREVNKRVEDIHPTVPNPYNLLSGLPPSHQWYTVLDLKDAFFCLRLHPTSQPLFAFEWRDPGMGISGQLTWTRLPQGFKNSPTLFNEALHRDLADFRIQHPDLILLQYVDDILLAATSELDCQQGTRALLQTLGDLGYRASAKKAQICQKQVKYLGYLLREGQRWLTEARKETVMGQPVPKTPRQLREFLGKAGFCRLFIPGFAEMAAPLYPLTKPGTLFSWGPDQQKAYQEIKQALLTAPALGLPDLTKPFELFVDEKQGYAKGVLTQKLGPWRRPVAYLSKKLDPVAAGWPPCLRMVAAIAVLTKDAGKLTMGQPLVILAPHAVEALVKQPPDRWLSNARMTHYQAMLLDTDRVQFGPVVALNPATLLPLPEEGAPHDCLEILAETHGTRPDLTDQPIPDADHTWYTDGSSFLQEGQRKAGAAVTTETEVIWAGALPAGTSAQRAELIALTQALKMAEGKRLNVYTDSRYAFATAHIHGEIYRRRGWLTSEGREIKNKSEILALLKALFLPKRLSIIHCLGHQKGDSAEARGNRLADQAAREAAIKTPPDTSTLLIAGKRTADGSEFEKRTADGSEFESPKKKAKVE

SEQ ID NO: 2155 - protein, 2097 aa, synthetic construct; identical to SEQ ID NO: 2056

SEQ ID NO: 2156 - protein, 2094 aa, synthetic construct
MPAAKRVKLDGGDKKYSIGLDIGTNSVGWAVITDEYKVPSKKFKVLGNTDRHSIKKNLIGALLFDSGETAEATRLKRTARRRYTRRKNRICYLQEIFSNEMAKVDDSFFHRLEESFLVEEDKKHERHPIFGNIVDEVAYHEKYPTIYHLRKKLVDSTDKADLRLIYLALAHMIKFRGHFLIEGDLNPDNSDVDKLFIQLVQTYNQLFEENPINASGVDAKAILSARLSKSRRLENLIAQLPGEKKNGLFGNLIALSLGLTPNFKSNFDLAEDAKLQLSKDTYDDDLDNLLAQIGDQYADLFLAAKNLSDAILLSDILRVNTEITKAPLSASMIKRYDEHHQDLTLLKALVRQQLPEKYKEIFFDQSKNGYAGYIDGGASQEEFYKFIKPILEKMDGTEELLVKLNREDLLRKQRTFDNGSIPHQIHLGELHAILRRQEDFYPFLKDNREKIEKILTFRIPYYVGPLARGNSRFAWMTRKSEETITPWNFEEVVDKGASAQSFIERMTNFDKNLPNEKVLPKHSLLYEYFTVYNELTKVKYVTEGMRKPAFLSGEQKKAIVDLLFKTNRKVTVKQLKEDYFKKIECFDSVEISGVEDRFNASLGTYHDLLKIIKDKDFLDNEENEDILEDIVLTLTLFEDREMIEERLKTYAHLFDDKVMKQLKRRRYTGWGRLSRKLINGIRDKQSGKTILDFLKSDGFANRNFMQLIHDDSLTFKEDIQKAQVSGQGDSLHEHIANLAGSPAIKKGILQTVKVVDELVKVMGRHKPENIVIEMARENQTTQKGQKNSRERMKRIEEGIKELGSQILKEHPVENTQLQNEKLYLYYLQNGRDMYVDQELDINRLSDYDVDHIVPQSFLKDDSIDNKVLTRSDKARGKSDNVPSEEVVKKMKNYWRQLLNAKLITQRKFDNLTKAERGGLSELDKAGFIKRQLVETRQITKHVAQILDSRMNTKYDENDKLIREVKVITLKSKLVSDFRKDFQFYKVREINNYHHAHDAYLNAVVGTALIKKYPKLESEFVYGDYKVYDVRKMIAKSEQEIGKATAKYFFYSNIMNFFKTEITLANGEIRKRPLIETNGETGEIVWDKGRDFATVRKVLSMPQVNIVKKTEVQTGGFSKESILPKRNSDKLIARKKDWDPKKYGGFDSPTVAYSVLVVAKVEKGKSKKLKSVKELLGITIMERSSFEKNPIDFLEAKGYKEVKKDLIIKLPKYSLFELENGRKRMLASAGELQKGNELALPSKYVNFLYLASHYEKLKGSPEDNEQKQLFVEQHKHYLDEIIEQISEFSKRVILADANLDKVLSAYNKHRDKPIREQAENIIHLFTLTNLGAPAAFKYFDTTIDRKRYTSTKEVLDATLIHQSITGLYETRIDLSQLGGDGGGSSPAPGGSGGLGIEDEYRLHETSTEPDVSLGSTWLSDFPQAWAETGGMGLAVRQAPLIIPLKATSTPVSIQQYPMSHEARLGIKPHIQRLLDQGILVPCQSPWNTPLLPVKKPGTNDYRPVQDLREVNKRVEDIHPTVPNPYNLLSGLPPSHQWYTVLDLKDAFFCLRLHPTSQPLFAFEWRDPGMGISGQLTWTRLPQGFKNSPTLFNEALHRDLADFRIQHPDLILLQYVDDILLAATSELDCQQGTRALLQTLGDLGYRASAKKAQICQKQVKYLGYLLREGQRWLTEARKETVMGQPVPKTPRQLREFLGKAGFCRLFIPGFAEMAAPLYPLTKPGTLFSWGPDQQKAYQEIKQALLTAPALGLPDLTKPFELFVDEKQGYAKGVLTQKLGPWRRPVAYLSKKLDPVAAGWPPCLRMVAAIAVLTKDAGKLTMGQPLVILAPHAVEALVKQPPDRWLSNARMTHYQAMLLDTDRVQFGPVVALNPATLLPLPEEGAPHDCLEILAETHGTRPDLTDQPIPDADHTWYTDGSSFLQEGQRKAGAAVTTETEVIWAGALPAGTSAQRAELIALTQALKMAEGKRLNVYTDSRYAFATAHIHGEIYRRRGWLTSEGREIKNKSEILALLKALFLPKRLSIIHCLGHQKGDSAEARGNRLADQAAREAAIKTPPDTSTLLIAGKRTADGSEFEKRTADGSEFESPKKKAKVE

SEQ ID NO: 2157 - protein, 2095 aa, synthetic construct
MPAAKRVKLDGGDKKYSIGLDIGTNSVGWAVITDEYKVPSKKFKVLGNTDRHSIKKNLIGALLFDSGETAEATRLKRTARRRYTRRKNRICYLQEIFSNEMAKVDDSFFHRLEESFLVEEDKKHERHPIFGNIVDEVAYHEKYPTIYHLRKKLVDSTDKADLRLIYLALAHMIKFRGHFLIEGDLNPDNSDVDKLFIQLVQTYNQLFEENPINASGVDAKAILSARLSKSRRLENLIAQLPGEKKNGLFGNLIALSLGLTPNFKSNFDLAEDAKLQLSKDTYDDDLDNLLAQIGDQYADLFLAAKNLSDAILLSDILRVNTEITKAPLSASMIKRYDEHHQDLTLLKALVRQQLPEKYKEIFFDQSKNGYAGYIDGGASQEEFYKFIKPILEKMDGTEELLVKLNREDLLRKQRTFDNGSIPHQIHLGELHAILRRQEDFYPFLKDNREKIEKILTFRIPYYVGPLARGNSRFAWMTRKSEETITPWNFEEVVDKGASAQSFIERMTNFDKNLPNEKVLPKHSLLYEYFTVYNELTKVKYVTEGMRKPAFLSGEQKKAIVDLLFKTNRKVTVKQLKEDYFKKIECFDSVEISGVEDRFNASLGTYHDLLKIIKDKDFLDNEENEDILEDIVLTLTLFEDREMIEERLKTYAHLFDDKVMKQLKRRRYTGWGRLSRKLINGIRDKQSGKTILDFLKSDGFANRNFMQLIHDDSLTFKEDIQKAQVSGQGDSLHEHIANLAGSPAIKKGILQTVKVVDELVKVMGRHKPENIVIEMARENQTTQKGQKNSRERMKRIEEGIKELGSQILKEHPVENTQLQNEKLYLYYLQNGRDMYVDQELDINRLSDYDVDHIVPQSFLKDDSIDNKVLTRSDKARGKSDNVPSEEVVKKMKNYWRQLLNAKLITQRKFDNLTKAERGGLSELDKAGFIKRQLVETRQITKHVAQILDSRMNTKYDENDKLIREVKVITLKSKLVSDFRKDFQFYKVREINNYHHAHDAYLNAVVGTALIKKYPKLESEFVYGDYKVYDVRKMIAKSEQEIGKATAKYFFYSNIMNFFKTEITLANGEIRKRPLIETNGETGEIVWDKGRDFATVRKVLSMPQVNIVKKTEVQTGGFSKESILPKRNSDKLIARKKDWDPKKYGGFDSPTVAYSVLVVAKVEKGKSKKLKSVKELLGITIMERSSFEKNPIDFLEAKGYKEVKKDLIIKLPKYSLFELENGRKRMLASAGELQKGNELALPSKYVNFLYLASHYEKLKGSPEDNEQKQLFVEQHKHYLDEIIEQISEFSKRVILADANLDKVLSAYNKHRDKPIREQAENIIHLFTLTNLGAPAAFKYFDTTIDRKRYTSTKEVLDATLIHQSITGLYETRIDLSQLGGDGGGGGGSGGGGSGGLGIEDEYRLHETSTEPDVSLGSTWLSDFPQAWAETGGMGLAVRQAPLIIPLKATSTPVSIQQYPMSHEARLGIKPHIQRLLDQGILVPCQSPWNTPLLPVKKPGTNDYRPVQDLREVNKRVEDIHPTVPNPYNLLSGLPPSHQWYTVLDLKDAFFCLRLHPTSQPLFAFEWRDPGMGISGQLTWTRLPQGFKNSPTLFNEALHRDLADFRIQHPDLILLQYVDDILLAATSELDCQQGTRALLQTLGDLGYRASAKKAQICQKQVKYLGYLLREGQRWLTEARKETVMGQPVPKTPRQLREFLGKAGFCRLFIPGFAEMAAPLYPLTKPGTLFSWGPDQQKAYQEIKQALLTAPALGLPDLTKPFELFVDEKQGYAKGVLTQKLGPWRRPVAYLSKKLDPVAAGWPPCLRMVAAIAVLTKDAGKLTMGQPLVILAPHAVEALVKQPPDRWLSNARMTHYQAMLLDTDRVQFGPVVALNPATLLPLPEEGAPHDCLEILAETHGTRPDLTDQPIPDADHTWYTDGSSFLQEGQRKAGAAVTTETEVIWAGALPAGTSAQRAELIALTQALKMAEGKRLNVYTDSRYAFATAHIHGEIYRRRGWLTSEGREIKNKSEILALLKALFLPKRLSIIHCLGHQKGDSAEARGNRLADQAAREAAIKTPPDTSTLLIAGKRTADGSEFEKRTADGSEFESPKKKAKVE

SEQ ID NO: 2158 - protein, 2091 aa, synthetic construct
MPAAKRVKLDGGDKKYSIGLDIGTNSVGWAVITDEYKVPSKKFKVLGNTDRHSIKKNLIGALLFDSGETAEATRLKRTARRRYTRRKNRICYLQEIFSNEMAKVDDSFFHRLEESFLVEEDKKHERHPIFGNIVDEVAYHEKYPTIYHLRKKLVDSTDKADLRLIYLALAHMIKFRGHFLIEGDLNPDNSDVDKLFIQLVQTYNQLFEENPINASGVDAKAILSARLSKSRRLENLIAQLPGEKKNGLFGNLIALSLGLTPNFKSNFDLAEDAKLQLSKDTYDDDLDNLLAQIGDQYADLFLAAKNLSDAILLSDILRVNTEITKAPLSASMIKRYDEHHQDLTLLKALVRQQLPEKYKEIFFDQSKNGYAGYIDGGASQEEFYKFIKPILEKMDGTEELLVKLNREDLLRKQRTFDNGSIPHQIHLGELHAILRRQEDFYPFLKDNREKIEKILTFRIPYYVGPLARGNSRFAWMTRKSEETITPWNFEEVVDKGASAQSFIERMTNFDKNLPNEKVLPKHSLLYEYFTVYNELTKVKYVTEGMRKPAFLSGEQKKAIVDLLFKTNRKVTVKQLKEDYFKKIECFDSVEISGVEDRFNASLGTYHDLLKIIKDKDFLDNEENEDILEDIVLTLTLFEDREMIEERLKTYAHLFDDKVMKQLKRRRYTGWGRLSRKLINGIRDKQSGKTILDFLKSDGFANRNFMQLIHDDSLTFKEDIQKAQVSGQGDSLHEHIANLAGSPAIKKGILQTVKVVDELVKVMGRHKPENIVIEMARENQTTQKGQKNSRERMKRIEEGIKELGSQILKEHPVENTQLQNEKLYLYYLQNGRDMYVDQELDINRLSDYDVDHIVPQSFLKDDSIDNKVLTRSDKARGKSDNVPSEEVVKKMKNYWRQLLNAKLITQRKFDNLTKAERGGLSELDKAGFIKRQLVETRQITKHVAQILDSRMNTKYDENDKLIREVKVITLKSKLVSDFRKDFQFYKVREINNYHHAHDAYLNAVVGTALIKKYPKLESEFVYGDYKVYDVRKMIAKSEQEIGKATAKYFFYSNIMNFFKTEITLANGEIRKRPLIETNGETGEIVWDKGRDFATVRKVLSMPQVNIVKKTEVQTGGFSKESILPKRNSDKLIARKKDWDPKKYGGFDSPTVAYSVLVVAKVEKGKSKKLKSVKELLGITIMERSSFEKNPIDFLEAKGYKEVKKDLIIKLPKYSLFELENGRKRMLASAGELQKGNELALPSKYVNFLYLASHYEKLKGSPEDNEQKQLFVEQHKHYLDEIIEQISEFSKRVILADANLDKVLSAYNKHRDKPIREQAENIIHLFTLTNLGAPAAFKYFDTTIDRKRYTSTKEVLDATLIHQSITGLYETRIDLSQLGGDGGGGSGSSGGLGIEDEYRLHETSTEPDVSLGSTWLSDFPQAWAETGGMGLAVRQAPLIIPLKATSTPVSIQQYPMSHEARLGIKPHIQRLLDQGILVPCQSPWNTPLLPVKKPGTNDYRPVQDLREVNKRVEDIHPTVPNPYNLLSGLPPSHQWYTVLDLKDAFFCLRLHPTSQPLFAFEWRDPGMGISGQLTWTRLPQGFKNSPTLFNEALHRDLADFRIQHPDLILLQYVDDILLAATSELDCQQGTRALLQTLGDLGYRASAKKAQICQKQVKYLGYLLREGQRWLTEARKETVMGQPVPKTPRQLREFLGKAGFCRLFIPGFAEMAAPLYPLTKPGTLFSWGPDQQKAYQEIKQALLTAPALGLPDLTKPFELFVDEKQGYAKGVLTQKLGPWRRPVAYLSKKLDPVAAGWPPCLRMVAAIAVLTKDAGKLTMGQPLVILAPHAVEALVKQPPDRWLSNARMTHYQAMLLDTDRVQFGPVVALNPATLLPLPEEGAPHDCLEILAETHGTRPDLTDQPIPDADHTWYTDGSSFLQEGQRKAGAAVTTETEVIWAGALPAGTSAQRAELIALTQALKMAEGKRLNVYTDSRYAFATAHIHGEIYRRRGWLTSEGREIKNKSEILALLKALFLPKRLSIIHCLGHQKGDSAEARGNRLADQAAREAAIKTPPDTSTLLIAGKRTADGSEFEKRTADGSEFESPKKKAKVE

SEQ ID NO: 2159 - protein, 2096 aa, synthetic construct; identical to SEQ ID NO: 2055

SEQ ID NO: 2160 - protein, 2094 aa, synthetic construct
MPAAKRVKLDGGDKKYSIGLDIGTNSVGWAVITDEYKVPSKKFKVLGNTDRHSIKKNLIGALLFDSGETAEATRLKRTARRRYTRRKNRICYLQEIFSNEMAKVDDSFFHRLEESFLVEEDKKHERHPIFGNIVDEVAYHEKYPTIYHLRKKLVDSTDKADLRLIYLALAHMIKFRGHFLIEGDLNPDNSDVDKLFIQLVQTYNQLFEENPINASGVDAKAILSARLSKSRRLENLIAQLPGEKKNGLFGNLIALSLGLTPNFKSNFDLAEDAKLQLSKDTYDDDLDNLLAQIGDQYADLFLAAKNLSDAILLSDILRVNTEITKAPLSASMIKRYDEHHQDLTLLKALVRQQLPEKYKEIFFDQSKNGYAGYIDGGASQEEFYKFIKPILEKMDGTEELLVKLNREDLLRKQRTFDNGSIPHQIHLGELHAILRRQEDFYPFLKDNREKIEKILTFRIPYYVGPLARGNSRFAWMTRKSEETITPWNFEEVVDKGASAQSFIERMTNFDKNLPNEKVLPKHSLLYEYFTVYNELTKVKYVTEGMRKPAFLSGEQKKAIVDLLFKTNRKVTVKQLKEDYFKKIECFDSVEISGVEDRFNASLGTYHDLLKIIKDKDFLDNEENEDILEDIVLTLTLFEDREMIEERLKTYAHLFDDKVMKQLKRRRYTGWGRLSRKLINGIRDKQSGKTILDFLKSDGFANRNFMQLIHDDSLTFKEDIQKAQVSGQGDSLHEHIANLAGSPAIKKGILQTVKVVDELVKVMGRHKPENIVIEMARENQTTQKGQKNSRERMKRIEEGIKELGSQILKEHPVENTQLQNEKLYLYYLQNGRDMYVDQELDINRLSDYDVDHIVPQSFLKDDSIDNKVLTRSDKARGKSDNVPSEEVVKKMKNYWRQLLNAKLITQRKFDNLTKAERGGLSELDKAGFIKRQLVETRQITKHVAQILDSRMNTKYDENDKLIREVKVITLKSKLVSDFRKDFQFYKVREINNYHHAHDAYLNAVVGTALIKKYPKLESEFVYGDYKVYDVRKMIAKSEQEIGKATAKYFFYSNIMNFFKTEITLANGEIRKRPLIETNGETGEIVWDKGRDFATVRKVLSMPQVNIVKKTEVQTGGFSKESILPKRNSDKLIARKKDWDPKKYGGFDSPTVAYSVLVVAKVEKGKSKKLKSVKELLGITIMERSSFEKNPIDFLEAKGYKEVKKDLIIKLPKYSLFELENGRKRMLASAGELQKGNELALPSKYVNFLYLASHYEKLKGSPEDNEQKQLFVEQHKHYLDEIIEQISEFSKRVILADANLDKVLSAYNKHRDKPIREQAENIIHLFTLTNLGAPAAFKYFDTTIDRKRYTSTKEVLDATLIHQSITGLYETRIDLSQLGGDGGGGGGGSGSSGGLGIEDEYRLHETSTEPDVSLGSTWLSDFPQAWAETGGMGLAVRQAPLIIPLKATSTPVSIQQYPMSHEARLGIKPHIQRLLDQGILVPCQSPWNTPLLPVKKPGTNDYRPVQDLREVNKRVEDIHPTVPNPYNLLSGLPPSHQWYTVLDLKDAFFCLRLHPTSQPLFAFEWRDPGMGISGQLTWTRLPQGFKNSPTLFNEALHRDLADFRIQHPDLILLQYVDDILLAATSELDCQQGTRALLQTLGDLGYRASAKKAQICQKQVKYLGYLLREGQRWLTEARKETVMGQPVPKTPRQLREFLGKAGFCRLFIPGFAEMAAPLYPLTKPGTLFSWGPDQQKAYQEIKQALLTAPALGLPDLTKPFELFVDEKQGYAKGVLTQKLGPWRRPVAYLSKKLDPVAAGWPPCLRMVAAIAVLTKDAGKLTMGQPLVILAPHAVEALVKQPPDRWLSNARMTHYQAMLLDTDRVQFGPVVALNPATLLPLPEEGAPHDCLEILAETHGTRPDLTDQPIPDADHTWYTDGSSFLQEGQRKAGAAVTTETEVIWAGALPAGTSAQRAELIALTQALKMAEGKRLNVYTDSRYAFATAHIHGEIYRRRGWLTSEGREIKNKSEILALLKALFLPKRLSIIHCLGHQKGDSAEARGNRLADQAAREAAIKTPPDTSTLLIAGKRTADGSEFEKRTADGSEFESPKKKAKVE

SEQ ID NO: 2161 - protein, 2096 aa, synthetic construct
MPAAKRVKLDGGDKKYSIGLDIGTNSVGWAVITDEYKVPSKKFKVLGNTDRHSIKKNLIGALLFDSGETAEATRLKRTARRRYTRRKNRICYLQEIFSNEMAKVDDSFFHRLEESFLVEEDKKHERHPIFGNIVDEVAYHEKYPTIYHLRKKLVDSTDKADLRLIYLALAHMIKFRGHFLIEGDLNPDNSDVDKLFIQLVQTYNQLFEENPINASGVDAKAILSARLSKSRRLENLIAQLPGEKKNGLFGNLIALSLGLTPNFKSNFDLAEDAKLQLSKDTYDDDLDNLLAQIGDQYADLFLAAKNLSDAILLSDILRVNTEITKAPLSASMIKRYDEHHQDLTLLKALVRQQLPEKYKEIFFDQSKNGYAGYIDGGASQEEFYKFIKPILEKMDGTEELLVKLNREDLLRKQRTFDNGSIPHQIHLGELHAILRRQEDFYPFLKDNREKIEKILTFRIPYYVGPLARGNSRFAWMTRKSEETITPWNFEEVVDKGASAQSFIERMTNFDKNLPNEKVLPKHSLLYEYFTVYNELTKVKYVTEGMRKPAFLSGEQKKAIVDLLFKTNRKVTVKQLKEDYFKKIECFDSVEISGVEDRFNASLGTYHDLLKIIKDKDFLDNEENEDILEDIVLTLTLFEDREMIEERLKTYAHLFDDKVMKQLKRRRYTGWGRLSRKLINGIRDKQSGKTILDFLKSDGFANRNFMQLIHDDSLTFKEDIQKAQVSGQGDSLHEHIANLAGSPAIKKGILQTVKVVDELVKVMGRHKPENIVIEMARENQTTQKGQKNSRERMKRIEEGIKELGSQILKEHPVENTQLQNEKLYLYYLQNGRDMYVDQELDINRLSDYDVDHIVPQSFLKDDSIDNKVLTRSDKARGKSDNVPSEEVVKKMKNYWRQLLNAKLITQRKFDNLTKAERGGLSELDKAGFIKRQLVETRQITKHVAQILDSRMNTKYDENDKLIREVKVITLKSKLVSDFRKDFQFYKVREINNYHHAHDAYLNAVVGTALIKKYPKLESEFVYGDYKVYDVRKMIAKSEQEIGKATAKYFFYSNIMNFFKTEITLANGEIRKRPLIETNGETGEIVWDKGRDFATVRKVLSMPQVNIVKKTEVQTGGFSKESILPKRNSDKLIARKKDWDPKKYGGFDSPTVAYSVLVVAKVEKGKSKKLKSVKELLGITIMERSSFEKNPIDFLEAKGYKEVKKDLIIKLPKYSLFELENGRKRMLASAGELQKGNELALPSKYVNFLYLASHYEKLKGSPEDNEQKQLFVEQHKHYLDEIIEQISEFSKRVILADANLDKVLSAYNKHRDKPIREQAENIIHLFTLTNLGAPAAFKYFDTTIDRKRYTSTKEVLDATLIHQSITGLYETRIDLSQLGGDGGEAAAKGGGGGSGGLGIEDEYRLHETSTEPDVSLGSTWLSDFPQAWAETGGMGLAVRQAPLIIPLKATSTPVSIQQYPMSHEARLGIKPHIQRLLDQGILVPCQSPWNTPLLPVKKPGTNDYRPVQDLREVNKRVEDIHPTVPNPYNLLSGLPPSHQWYTVLDLKDAFFCLRLHPTSQPLFAFEWRDPGMGISGQLTWTRLPQGFKNSPTLFNEALHRDLADFRIQHPDLILLQYVDDILLAATSELDCQQGTRALLQTLGDLGYRASAKKAQICQKQVKYLGYLLREGQRWLTEARKETVMGQPVPKTPRQLREFLGKAGFCRLFIPGFAEMAAPLYPLTKPGTLFSWGPDQQKAYQEIKQALLTAPALGLPDLTKPFELFVDEKQGYAKGVLTQKLGPWRRPVAYLSKKLDPVAAGWPPCLRMVAAIAVLTKDAGKLTMGQPLVILAPHAVEALVKQPPDRWLSNARMTHYQAMLLDTDRVQFGPVVALNPATLLPLPEEGAPHDCLEILAETHGTRPDLTDQPIPDADHTWYTDGSSFLQEGQRKAGAAVTTETEVIWAGALPAGTSAQRAELIALTQALKMAEGKRLNVYTDSRYAFATAHIHGEIYRRRGWLTSEGREIKNKSEILALLKALFLPKRLSIIHCLGHQKGDSAEARGNRLADQAAREAAIKTPPDTSTLLIAGKRTADGSEFEKRTADGSEFESPKKKAKVE

SEQ ID NO: 2162 - protein, 2091 aa, synthetic construct
MPAAKRVKLDGGDKKYSIGLDIGTNSVGWAVITDEYKVPSKKFKVLGNTDRHSIKKNLIGALLFDSGETAEATRLKRTARRRYTRRKNRICYLQEIFSNEMAKVDDSFFHRLEESFLVEEDKKHERHPIFGNIVDEVAYHEKYPTIYHLRKKLVDSTDKADLRLIYLALAHMIKFRGHFLIEGDLNPDNSDVDKLFIQLVQTYNQLFEENPINASGVDAKAILSARLSKSRRLENLIAQLPGEKKNGLFGNLIALSLGLTPNFKSNFDLAEDAKLQLSKDTYDDDLDNLLAQIGDQYADLFLAAKNLSDAILLSDILRVNTEITKAPLSASMIKRYDEHHQDLTLLKALVRQQLPEKYKEIFFDQSKNGYAGYIDGGASQEEFYKFIKPILEKMDGTEELLVKLNREDLLRKQRTFDNGSIPHQIHLGELHAILRRQEDFYPFLKDNREKIEKILTFRIPYYVGPLARGNSRFAWMTRKSEETITPWNFEEVVDKGASAQSFIERMTNFDKNLPNEKVLPKHSLLYEYFTVYNELTKVKYVTEGMRKPAFLSGEQKKAIVDLLFKTNRKVTVKQLKEDYFKKIECFDSVEISGVEDRFNASLGTYHDLLKIIKDKDFLDNEENEDILEDIVLTLTLFEDREMIEERLKTYAHLFDDKVMKQLKRRRYTGWGRLSRKLINGIRDKQSGKTILDFLKSDGFANRNFMQLIHDDSLTFKEDIQKAQVSGQGDSLHEHIANLAGSPAIKKGILQTVKVVDELVKVMGRHKPENIVIEMARENQTTQKGQKNSRERMKRIEEGIKELGSQILKEHPVENTQLQNEKLYLYYLQNGRDMYVDQELDINRLSDYDVDHIVPQSFLKDDSIDNKVLTRSDKARGKSDNVPSEEVVKKMKNYWRQLLNAKLITQRKFDNLTKAERGGLSELDKAGFIKRQLVETRQITKHVAQILDSRMNTKYDENDKLIREVKVITLKSKLVSDFRKDFQFYKVREINNYHHAHDAYLNAVVGTALIKKYPKLESEFVYGDYKVYDVRKMIAKSEQEIGKATAKYFFYSNIMNFFKTEITLANGEIRKRPLIETNGETGEIVWDKGRDFATVRKVLSMPQVNIVKKTEVQTGGFSKESILPKRNSDKLIARKKDWDPKKYGGFDSPTVAYSVLVVAKVEKGKSKKLKSVKELLGITIMERSSFEKNPIDFLEAKGYKEVKKDLIIKLPKYSLFELENGRKRMLASAGELQKGNELALPSKYVNFLYLASHYEKLKGSPEDNEQKQLFVEQHKHYLDEIIEQISEFSKRVILADANLDKVLSAYNKHRDKPIREQAENIIHLFTLTNLGAPAAFKYFDTTIDRKRYTSTKEVLDATLIHQSITGLYETRIDLSQLGGDGGPAPGGSGGLGIEDEYRLHETSTEPDVSLGSTWLSDFPQAWAETGGMGLAVRQAPLIIPLKATSTPVSIQQYPMSHEARLGIKPHIQRLLDQGILVPCQSPWNTPLLPVKKPGTNDYRPVQDLREVNKRVEDIHPTVPNPYNLLSGLPPSHQWYTVLDLKDAFFCLRLHPTSQPLFAFEWRDPGMGISGQLTWTRLPQGFKNSPTLFNEALHRDLADFRIQHPDLILLQYVDDILLAATSELDCQQGTRALLQTLGDLGYRASAKKAQICQKQVKYLGYLLREGQRWLTEARKETVMGQPVPKTPRQLREFLGKAGFCRLFIPGFAEMAAPLYPLTKPGTLFSWGPDQQKAYQEIKQALLTAPALGLPDLTKPFELFVDEKQGYAKGVLTQKLGPWRRPVAYLSKKLDPVAAGWPPCLRMVAAIAVLTKDAGKLTMGQPLVILAPHAVEALVKQPPDRWLSNARMTHYQAMLLDTDRVQFGPVVALNPATLLPLPEEGAPHDCLEILAETHGTRPDLTDQPIPDADHTWYTDGSSFLQEGQRKAGAAVTTETEVIWAGALPAGTSAQRAELIALTQALKMAEGKRLNVYTDSRYAFATAHIHGEIYRRRGWLTSEGREIKNKSEILALLKALFLPKRLSIIHCLGHQKGDSAEARGNRLADQAAREAAIKTPPDTSTLLIAGKRTADGSEFEKRTADGSEFESPKKKAKVE

SEQ ID NO: 2163 - protein, 2096 aa, synthetic construct
MPAAKRVKLDGGDKKYSIGLDIGTNSVGWAVITDEYKVPSKKFKVLGNTDRHSIKKNLIGALLFDSGETAEATRLKRTARRRYTRRKNRICYLQEIFSNEMAKVDDSFFHRLEESFLVEEDKKHERHPIFGNIVDEVAYHEKYPTIYHLRKKLVDSTDKADLRLIYLALAHMIKFRGHFLIEGDLNPDNSDVDKLFIQLVQTYNQLFEENPINASGVDAKAILSARLSKSRRLENLIAQLPGEKKNGLFGNLIALSLGLTPNFKSNFDLAEDAKLQLSKDTYDDDLDNLLAQIGDQYADLFLAAKNLSDAILLSDILRVNTEITKAPLSASMIKRYDEHHQDLTLLKALVRQQLPEKYKEIFFDQSKNGYAGYIDGGASQEEFYKFIKPILEKMDGTEELLVKLNREDLLRKQRTFDNGSIPHQIHLGELHAILRRQEDFYPFLKDNREKIEKILTFRIPYYVGPLARGNSRFAWMTRKSEETITPWNFEEVVDKGASAQSFIERMTNFDKNLPNEKVLPKHSLLYEYFTVYNELTKVKYVTEGMRKPAFLSGEQKKAIVDLLFKTNRKVTVKQLKEDYFKKIECFDSVEISGVEDRFNASLGTYHDLLKIIKDKDFLDNEENEDILEDIVLTLTLFEDREMIEERLKTYAHLFDDKVMKQLKRRRYTGWGRLSRKLINGIRDKQSGKTILDFLKSDGFANRNFMQLIHDDSLTFKEDIQKAQVSGQGDSLHEHIANLAGSPAIKKGILQTVKVVDELVKVMGRHKPENIVIEMARENQTTQKGQKNSRERMKRIEEGIKELGSQILKEHPVENTQLQNEKLYLYYLQNGRDMYVDQELDINRLSDYDVDHIVPQSFLKDDSIDNKVLTRSDKARGKSDNVPSEEVVKKMKNYWRQLLNAKLITQRKFDNLTKAERGGLSELDKAGFIKRQLVETRQITKHVAQILDSRMNTKYDENDKLIREVKVITLKSKLVSDFRKDFQFYKVREINNYHHAHDAYLNAVVGTALIKKYPKLESEFVYGDYKVYDVRKMIAKSEQEIGKATAKYFFYSNIMNFFKTEITLANGEIRKRPLIETNGETGEIVWDKGRDFATVRKVLSMPQVNIVKKTEVQTGGFSKESILPKRNSDKLIARKKDWDPKKYGGFDSPTVAYSVLVVAKVEKGKSKKLKSVKELLGITIMERSSFEKNPIDFLEAKGYKEVKKDLIIKLPKYSLFELENGRKRMLASAGELQKGNELALPSKYVNFLYLASHYEKLKGSPEDNEQKQLFVEQHKHYLDEIIEQISEFSKRVILADANLDKVLSAYNKHRDKPIREQAENIIHLFTLTNLGAPAAFKYFDTTIDRKRYTSTKEVLDATLIHQSITGLYETRIDLSQLGGDGGEAAAKPAPGSSGGLGIEDEYRLHETSTEPDVSLGSTWLSDFPQAWAETGGMGLAVRQAPLIIPLKATSTPVSIQQYPMSHEARLGIKPHIQRLLDQGILVPCQSPWNTPLLPVKKPGTNDYRPVQDLREVNKRVEDIHPTVPNPYNLLSGLPPSHQWYTVLDLKDAFFCLRLHPTSQPLFAFEWRDPGMGISGQLTWTRLPQGFKNSPTLFNEALHRDLADFRIQHPDLILLQYVDDILLAATSELDCQQGTRALLQTLGDLGYRASAKKAQICQKQVKYLGYLLREGQRWLTEARKETVMGQPVPKTPRQLREFLGKAGFCRLFIPGFAEMAAPLYPLTKPGTLFSWGPDQQKAYQEIKQALLTAPALGLPDLTKPFELFVDEKQGYAKGVLTQKLGPWRRPVAYLSKKLDPVAAGWPPCLRMVAAIAVLTKDAGKLTMGQPLVILAPHAVEALVKQPPDRWLSNARMTHYQAMLLDTDRVQFGPVVALNPATLLPLPEEGAPHDCLEILAETHGTRPDLTDQPIPDADHTWYTDGSSFLQEGQRKAGAAVTTETEVIWAGALPAGTSAQRAELIALTQALKMAEGKRLNVYTDSRYAFATAHIHGEIYRRRGWLTSEGREIKNKSEILALLKALFLPKRLSIIHCLGHQKGDSAEARGNRLADQAAREAAIKTPPDTSTLLIAGKRTADGSEFEKRTADGSEFESPKKKAKVE

SEQ ID NO: 2164 - protein, 2100 aa, synthetic construct
MPAAKRVKLDGGDKKYSIGLDIGTNSVGWAVITDEYKVPSKKFKVLGNTDRHSIKKNLIGALLFDSGETAEATRLKRTARRRYTRRKNRICYLQEIFSNEMAKVDDSFFHRLEESFLVEEDKKHERHPIFGNIVDEVAYHEKYPTIYHLRKKLVDSTDKADLRLIYLALAHMIKFRGHFLIEGDLNPDNSDVDKLFIQLVQTYNQLFEENPINASGVDAKAILSARLSKSRRLENLIAQLPGEKKNGLFGNLIALSLGLTPNFKSNFDLAEDAKLQLSKDTYDDDLDNLLAQIGDQYADLFLAAKNLSDAILLSDILRVNTEITKAPLSASMIKRYDEHHQDLTLLKALVRQQLPEKYKEIFFDQSKNGYAGYIDGGASQEEFYKFIKPILEKMDGTEELLVKLNREDLLRKQRTFDNGSIPHQIHLGELHAILRRQEDFYPFLKDNREKIEKILTFRIPYYVGPLARGNSRFAWMTRKSEETITPWNFEEVVDKGASAQSFIERMTNFDKNLPNEKVLPKHSLLYEYFTVYNELTKVKYVTEGMRKPAFLSGEQKKAIVDLLFKTNRKVTVKQLKEDYFKKIECFDSVEISGVEDRFNASLGTYHDLLKIIKDKDFLDNEENEDILEDIVLTLTLFEDREMIEERLKTYAHLFDDKVMKQLKRRRYTGWGRLSRKLINGIRDKQSGKTILDFLKSDGFANRNFMQLIHDDSLTFKEDIQKAQVSGQGDSLHEHIANLAGSPAIKKGILQTVKVVDELVKVMGRHKPENIVIEMARENQTTQKGQKNSRERMKRIEEGIKELGSQILKEHPVENTQLQNEKLYLYYLQNGRDMYVDQELDINRLSDYDVDHIVPQSFLKDDSIDNKVLTRSDKARGKSDNVPSEEVVKKMKNYWRQLLNAKLITQRKFDNLTKAERGGLSELDKAGFIKRQLVETRQITKHVAQILDSRMNTKYDENDKLIREVKVITLKSKLVSDFRKDFQFYKVREINNYHHAHDAYLNAVVGTALIKKYPKLESEFVYGDYKVYDVRKMIAKSEQEIGKATAKYFFYSNIMNFFKTEITLANGEIRKRPLIETNGETGEIVWDKGRDFATVRKVLSMPQVNIVKKTEVQTGGFSKESILPKRNSDKLIARKKDWDPKKYGGFDSPTVAYSVLVVAKVEKGKSKKLKSVKELLGITIMERSSFEKNPIDFLEAKGYKEVKKDLIIKLPKYSLFELENGRKRMLASAGELQKGNELALPSKYVNFLYLASHYEKLKGSPEDNEQKQLFVEQHKHYLDEIIEQISEFSKRVILADANLDKVLSAYNKHRDKPIREQAENIIHLFTLTNLGAPAAFKYFDTTIDRKRYTSTKEVLDATLIHQSITGLYETRIDLSQLGGDGGGSSGSSGSSGSSGSSGGLGIEDEYRLHETSTEPDVSLGSTWLSDFPQAWAETGGMGLAVRQAPLIIPLKATSTPVSIQQYPMSHEARLGIKPHIQRLLDQGILVPCQSPWNTPLLPVKKPGTNDYRPVQDLREVNKRVEDIHPTVPNPYNLLSGLPPSHQWYTVLDLKDAFFCLRLHPTSQPLFAFEWRDPGMGISGQLTWTRLPQGFKNSPTLFNEALHRDLADFRIQHPDLILLQYVDDILLAATSELDCQQGTRALLQTLGDLGYRASAKKAQICQKQVKYLGYLLREGQRWLTEARKETVMGQPVPKTPRQLREFLGKAGFCRLFIPGFAEMAAPLYPLTKPGTLFSWGPDQQKAYQEIKQALLTAPALGLPDLTKPFELFVDEKQGYAKGVLTQKLGPWRRPVAYLSKKLDPVAAGWPPCLRMVAAIAVLTKDAGKLTMGQPLVILAPHAVEALVKQPPDRWLSNARMTHYQAMLLDTDRVQFGPVVALNPATLLPLPEEGAPHDCLEILAETHGTRPDLTDQPIPDADHTWYTDGSSFLQEGQRKAGAAVTTETEVIWAGALPAGTSAQRAELIALTQALKMAEGKRLNVYTDSRYAFATAHIHGEIYRRRGWLTSEGREIKNKSEILALLKALFLPKRLSIIHCLGHQKGDSAEARGNRLADQAAREAAIKTPPDTSTLLIAGKRTADGSEFEKRTADGSEFESPKKKAKVE

SEQ ID NO: 2165 - protein, 2094 aa, synthetic construct
MPAAKRVKLDGGDKKYSIGLDIGTNSVGWAVITDEYKVPSKKFKVLGNTDRHSIKKNLIGALLFDSGETAEATRLKRTARRRYTRRKNRICYLQEIFSNEMAKVDDSFFHRLEESFLVEEDKKHERHPIFGNIVDEVAYHEKYPTIYHLRKKLVDSTDKADLRLIYLALAHMIKFRGHFLIEGDLNPDNSDVDKLFIQLVQTYNQLFEENPINASGVDAKAILSARLSKSRRLENLIAQLPGEKKNGLFGNLIALSLGLTPNFKSNFDLAEDAKLQLSKDTYDDDLDNLLAQIGDQYADLFLAAKNLSDAILLSDILRVNTEITKAPLSASMIKRYDEHHQDLTLLKALVRQQLPEKYKEIFFDQSKNGYAGYIDGGASQEEFYKFIKPILEKMDGTEELLVKLNREDLLRKQRTFDNGSIPHQIHLGELHAILRRQEDFYPFLKDNREKIEKILTFRIPYYVGPLARGNSRFAWMTRKSEETITPWNFEEVVDKGASAQSFIERMTNFDKNLPNEKVLPKHSLLYEYFTVYNELTKVKYVTEGMRKPAFLSGEQKKAIVDLLFKTNRKVTVKQLKEDYFKKIECFDSVEISGVEDRFNASLGTYHDLLKIIKDKDFLDNEENEDILEDIVLTLTLFEDREMIEERLKTYAHLFDDKVMKQLKRRRYTGWGRLSRKLINGIRDKQSGKTILDFLKSDGFANRNFMQLIHDDSLTFKEDIQKAQVSGQGDSLHEHIANLAGSPAIKKGILQTVKVVDELVKVMGRHKPENIVIEMARENQTTQKGQKNSRERMKRIEEGIKELGSQILKEHPVENTQLQNEKLYLYYLQNGRDMYVDQELDINRLSDYDVDHIVPQSFLKDDSIDNKVLTRSDKARGKSDNVPSEEVVKKMKNYWRQLLNAKLITQRKFDNLTKAERGGLSELDKAGFIKRQLVETRQITKHVAQILDSRMNTKYDENDKLIREVKVITLKSKLVSDFRKDFQFYKVREINNYHHAHDAYLNAVVGTALIKKYPKLESEFVYGDYKVYDVRKMIAKSEQEIGKATAKYFFYSNIMNFFKTEITLANGEIRKRPLIETNGETGEIVWDKGRDFATVRKVLSMPQVNIVKKTEVQTGGFSKESILPKRNSDKLIARKKDWDPKKYGGFDSPTVAYSVLVVAKVEKGKSKKLKSVKELLGITIMERSSFEKNPIDFLEAKGYKEVKKDLIIKLPKYSLFELENGRKRMLASAGELQKGNELALPSKYVNFLYLASHYEKLKGSPEDNEQKQLFVEQHKHYLDEIIEQISEFSKRVILADANLDKVLSAYNKHRDKPIREQAENIIHLFTLTNLGAPAAFKYFDTTIDRKRYTSTKEVLDATLIHQSITGLYETRIDLSQLGGDGGGSSGGSGGGGGLGIEDEYRLHETSTEPDVSLGSTWLSDFPQAWAETGGMGLAVRQAPLIIPLKATSTPVSIQQYPMSHEARLGIKPHIQRLLDQGILVPCQSPWNTPLLPVKKPGTNDYRPVQDLREVNKRVEDIHPTVPNPYNLLSGLPPSHQWYTVLDLKDAFFCLRLHPTSQPLFAFEWRDPGMGISGQLTWTRLPQGFKNSPTLFNEALHRDLADFRIQHPDLILLQYVDDILLAATSELDCQQGTRALLQTLGDLGYRASAKKAQICQKQVKYLGYLLREGQRWLTEARKETVMGQPVPKTPRQLREFLGKAGFCRLFIPGFAEMAAPLYPLTKPGTLFSWGPDQQKAYQEIKQALLTAPALGLPDLTKPFELFVDEKQGYAKGVLTQKLGPWRRPVAYLSKKLDPVAAGWPPCLRMVAAIAVLTKDAGKLTMGQPLVILAPHAVEALVKQPPDRWLSNARMTHYQAMLLDTDRVQFGPVVALNPATLLPLPEEGAPHDCLEILAETHGTRPDLTDQPIPDADHTWYTDGSSFLQEGQRKAGAAVTTETEVIWAGALPAGTSAQRAELIALTQALKMAEGKRLNVYTDSRYAFATAHIHGEIYRRRGWLTSEGREIKNKSEILALLKALFLPKRLSIIHCLGHQKGDSAEARGNRLADQAAREAAIKTPPDTSTLLIAGKRTADGSEFEKRTADGSEFESPKKKAKVE

SEQ ID NO: 2166 - protein, 2094 aa, synthetic construct; identical to SEQ ID NO: 2051

SEQ ID NO: 2167 - protein, 2092 aa, synthetic construct
MPAAKRVKLDGGDKKYSIGLDIGTNSVGWAVITDEYKVPSKKFKVLGNTDRHSIKKNLIGALLFDSGETAEATRLKRTARRRYTRRKNRICYLQEIFSNEMAKVDDSFFHRLEESFLVEEDKKHERHPIFGNIVDEVAYHEKYPTIYHLRKKLVDSTDKADLRLIYLALAHMIKFRGHFLIEGDLNPDNSDVDKLFIQLVQTYNQLFEENPINASGVDAKAILSARLSKSRRLENLIAQLPGEKKNGLFGNLIALSLGLTPNFKSNFDLAEDAKLQLSKDTYDDDLDNLLAQIGDQYADLFLAAKNLSDAILLSDILRVNTEITKAPLSASMIKRYDEHHQDLTLLKALVRQQLPEKYKEIFFDQSKNGYAGYIDGGASQEEFYKFIKPILEKMDGTEELLVKLNREDLLRKQRTFDNGSIPHQIHLGELHAILRRQEDFYPFLKDNREKIEKILTFRIPYYVGPLARGNSRFAWMTRKSEETITPWNFEEVVDKGASAQSFIERMTNFDKNLPNEKVLPKHSLLYEYFTVYNELTKVKYVTEGMRKPAFLSGEQKKAIVDLLFKTNRKVTVKQLKEDYFKKIECFDSVEISGVEDRFNASLGTYHDLLKIIKDKDFLDNEENEDILEDIVLTLTLFEDREMIEERLKTYAHLFDDKVMKQLKRRRYTGWGRLSRKLINGIRDKQSGKTILDFLKSDGFANRNFMQLIHDDSLTFKEDIQKAQVSGQGDSLHEHIANLAGSPAIKKGILQTVKVVDELVKVMGRHKPENIVIEMARENQTTQKGQKNSRERMKRIEEGIKELGSQILKEHPVENTQLQNEKLYLYYLQNGRDMYVDQELDINRLSDYDVDHIVPQSFLKDDSIDNKVLTRSDKARGKSDNVPSEEVVKKMKNYWRQLLNAKLITQRKFDNLTKAERGGLSELDKAGFIKRQLVETRQITKHVAQILDSRMNTKYDENDKLIREVKVITLKSKLVSDFRKDFQFYKVREINNYHHAHDAYLNAVVGTALIKKYPKLESEFVYGDYKVYDVRKMIAKSEQEIGKATAKYFFYSNIMNFFKTEITLANGEIRKRPLIETNGETGEIVWDKGRDFATVRKVLSMPQVNIVKKTEVQTGGFSKESILPKRNSDKLIARKKDWDPKKYGGFDSPTVAYSVLVVAKVEKGKSKKLKSVKELLGITIMERSSFEKNPIDFLEAKGYKEVKKDLIIKLPKYSLFELENGRKRMLASAGELQKGNELALPSKYVNFLYLASHYEKLKGSPEDNEQKQLFVEQHKHYLDEIIEQISEFSKRVILADANLDKVLSAYNKHRDKPIREQAENIIHLFTLTNLGAPAAFKYFDTTIDRKRYTSTKEVLDATLIHQSITGLYETRIDLSQLGGDGGPAPAPAPGGLGIEDEYRLHETSTEPDVSLGSTWLSDFPQAWAETGGMGLAVRQAPLIIPLKATSTPVSIQQYPMSHEARLGIKPHIQRLLDQGILVPCQSPWNTPLLPVKKPGTNDYRPVQDLREVNKRVEDIHPTVPNPYNLLSGLPPSHQWYTVLDLKDAFFCLRLHPTSQPLFAFEWRDPGMGISGQLTWTRLPQGFKNSPTLFNEALHRDLADFRIQHPDLILLQYVDDILLAATSELDCQQGTRALLQTLGDLGYRASAKKAQICQKQVKYLGYLLREGQRWLTEARKETVMGQPVPKTPRQLREFLGKAGFCRLFIPGFAEMAAPLYPLTKPGTLFSWGPDQQKAYQEIKQALLTAPALGLPDLTKPFELFVDEKQGYAKGVLTQKLGPWRRPVAYLSKKLDPVAAGWPPCLRMVAAIAVLTKDAGKLTMGQPLVILAPHAVEALVKQPPDRWLSNARMTHYQAMLLDTDRVQFGPVVALNPATLLPLPEEGAPHDCLEILAETHGTRPDLTDQPIPDADHTWYTDGSSFLQEGQRKAGAAVTTETEVIWAGALPAGTSAQRAELIALTQALKMAEGKRLNVYTDSRYAFATAHIHGEIYRRRGWLTSEGREIKNKSEILALLKALFLPKRLSIIHCLGHQKGDSAEARGNRLADQAAREAAIKTPPDTSTLLIAGKRTADGSEFEKRTADGSEFESPKKKAKVE

SEQ ID NO: 2168 - protein, 2096 aa, synthetic construct
MPAAKRVKLDGGDKKYSIGLDIGTNSVGWAVITDEYKVPSKKFKVLGNTDRHSIKKNLIGALLFDSGETAEATRLKRTARRRYTRRKNRICYLQEIFSNEMAKVDDSFFHRLEESFLVEEDKKHERHPIFGNIVDEVAYHEKYPTIYHLRKKLVDSTDKADLRLIYLALAHMIKFRGHFLIEGDLNPDNSDVDKLFIQLVQTYNQLFEENPINASGVDAKAILSARLSKSRRLENLIAQLPGEKKNGLFGNLIALSLGLTPNFKSNFDLAEDAKLQLSKDTYDDDLDNLLAQIGDQYADLFLAAKNLSDAILLSDILRVNTEITKAPLSASMIKRYDEHHQDLTLLKALVRQQLPEKYKEIFFDQSKNGYAGYIDGGASQEEFYKFIKPILEKMDGTEELLVKLNREDLLRKQRTFDNGSIPHQIHLGELHAILRRQEDFYPFLKDNREKIEKILTFRIPYYVGPLARGNSRFAWMTRKSEETITPWNFEEVVDKGASAQSFIERMTNFDKNLPNEKVLPKHSLLYEYFTVYNELTKVKYVTEGMRKPAFLSGEQKKAIVDLLFKTNRKVTVKQLKEDYFKKIECFDSVEISGVEDRFNASLGTYHDLLKIIKDKDFLDNEENEDILEDIVLTLTLFEDREMIEERLKTYAHLFDDKVMKQLKRRRYTGWGRLSRKLINGIRDKQSGKTILDFLKSDGFANRNFMQLIHDDSLTFKEDIQKAQVSGQGDSLHEHIANLAGSPAIKKGILQTVKVVDELVKVMGRHKPENIVIEMARENQTTQKGQKNSRERMKRIEEGIKELGSQILKEHPVENTQLQNEKLYLYYLQNGRDMYVDQELDINRLSDYDVDHIVPQSFLKDDSIDNKVLTRSDKARGKSDNVPSEEVVKKMKNYWRQLLNAKLITQRKFDNLTKAERGGLSELDKAGFIKRQLVETRQITKHVAQILDSRMNTKYDENDKLIREVKVITLKSKLVSDFRKDFQFYKVREINNYHHAHDAYLNAVVGTALIKKYPKLESEFVYGDYKVYDVRKMIAKSEQEIGKATAKYFFYSNIMNFFKTEITLANGEIRKRPLIETNGETGEIVWDKGRDFATVRKVLSMPQVNIVKKTEVQTGGFSKESILPKRNSDKLIARKKDWDPKKYGGFDSPTVAYSVLVVAKVEKGKSKKLKSVKELLGITIMERSSFEKNPIDFLEAKGYKEVKKDLIIKLPKYSLFELENGRKRMLASAGELQKGNELALPSKYVNFLYLASHYEKLKGSPEDNEQKQLFVEQHKHYLDEIIEQISEFSKRVILADANLDKVLSAYNKHRDKPIREQAENIIHLFTLTNLGAPAAFKYFDTTIDRKRYTSTKEVLDATLIHQSITGLYETRIDLSQLGGDGGGGSEAAAKGSSGGLGIEDEYRLHETSTEPDVSLGSTWLSDFPQAWAETGGMGLAVRQAPLIIPLKATSTPVSIQQYPMSHEARLGIKPHIQRLLDQGILVPCQSPWNTPLLPVKKPGTNDYRPVQDLREVNKRVEDIHPTVPNPYNLLSGLPPSHQWYTVLDLKDAFFCLRLHPTSQPLFAFEWRDPGMGISGQLTWTRLPQGFKNSPTLFNEALHRDLADFRIQHPDLILLQYVDDILLAATSELDCQQGTRALLQTLGDLGYRASAKKAQICQKQVKYLGYLLREGQRWLTEARKETVMGQPVPKTPRQLREFLGKAGFCRLFIPGFAEMAAPLYPLTKPGTLFSWGPDQQKAYQEIKQALLTAPALGLPDLTKPFELFVDEKQGYAKGVLTQKLGPWRRPVAYLSKKLDPVAAGWPPCLRMVAAIAVLTKDAGKLTMGQPLVILAPHAVEALVKQPPDRWLSNARMTHYQAMLLDTDRVQFGPVVALNPATLLPLPEEGAPHDCLEILAETHGTRPDLTDQPIPDADHTWYTDGSSFLQEGQRKAGAAVTTETEVIWAGALPAGTSAQRAELIALTQALKMAEGKRLNVYTDSRYAFATAHIHGEIYRRRGWLTSEGREIKNKSEILALLKALFLPKRLSIIHCLGHQKGDSAEARGNRLADQAAREAAIKTPPDTSTLLIAGKRTADGSEFEKRTADGSEFESPKKKAKVE

SEQ ID NO: 2169 - protein, 2090 aa, synthetic construct
MPAAKRVKLDGGDKKYSIGLDIGTNSVGWAVITDEYKVPSKKFKVLGNTDRHSIKKNLIGALLFDSGETAEATRLKRTARRRYTRRKNRICYLQEIFSNEMAKVDDSFFHRLEESFLVEEDKKHERHPIFGNIVDEVAYHEKYPTIYHLRKKLVDSTDKADLRLIYLALAHMIKFRGHFLIEGDLNPDNSDVDKLFIQLVQTYNQLFEENPINASGVDAKAILSARLSKSRRLENLIAQLPGEKKNGLFGNLIALSLGLTPNFKSNFDLAEDAKLQLSKDTYDDDLDNLLAQIGDQYADLFLAAKNLSDAILLSDILRVNTEITKAPLSASMIKRYDEHHQDLTLLKALVRQQLPEKYKEIFFDQSKNGYAGYIDGGASQEEFYKFIKPILEKMDGTEELLVKLNREDLLRKQRTFDNGSIPHQIHLGELHAILRRQEDFYPFLKDNREKIEKILTFRIPYYVGPLARGNSRFAWMTRKSEETITPWNFEEVVDKGASAQSFIERMTNFDKNLPNEKVLPKHSLLYEYFTVYNELTKVKYVTEGMRKPAFLSGEQKKAIVDLLFKTNRKVTVKQLKEDYFKKIECFDSVEISGVEDRFNASLGTYHDLLKIIKDKDFLDNEENEDILEDIVLTLTLFEDREMIEERLKTYAHLFDDKVMKQLKRRRYTGWGRLSRKLINGIRDKQSGKTILDFLKSDGFANRNFMQLIHDDSLTFKEDIQKAQVSGQGDSLHEHIANLAGSPAIKKGILQTVKVVDELVKVMGRHKPENIVIEMARENQTTQKGQKNSRERMKRIEEGIKELGSQILKEHPVENTQLQNEKLYLYYLQNGRDMYVDQELDINRLSDYDVDHIVPQSFLKDDSIDNKVLTRSDKARGKSDNVPSEEVVKKMKNYWRQLLNAKLITQRKFDNLTKAERGGLSELDKAGFIKRQLVETRQITKHVAQILDSRMNTKYDENDKLIREVKVITLKSKLVSDFRKDFQFYKVREINNYHHAHDAYLNAVVGTALIKKYPKLESEFVYGDYKVYDVRKMIAKSEQEIGKATAKYFFYSNIMNFFKTEITLANGEIRKRPLIETNGETGEIVWDKGRDFATVRKVLSMPQVNIVKKTEVQTGGFSKESILPKRNSDKLIARKKDWDPKKYGGFDSPTVAYSVLVVAKVEKGKSKKLKSVKELLGITIMERSSFEKNPIDFLEAKGYKEVKKDLIIKLPKYSLFELENGRKRMLASAGELQKGNELALPSKYVNFLYLASHYEKLKGSPEDNEQKQLFVEQHKHYLDEIIEQISEFSKRVILADANLDKVLSAYNKHRDKPIREQAENIIHLFTLTNLGAPAAFKYFDTTIDRKRYTSTKEVLDATLIHQSITGLYETRIDLSQLGGDGGGGGGGGGLGIEDEYRLHETSTEPDVSLGSTWLSDFPQAWAETGGMGLAVRQAPLIIPLKATSTPVSIQQYPMSHEARLGIKPHIQRLLDQGILVPCQSPWNTPLLPVKKPGTNDYRPVQDLREVNKRVEDIHPTVPNPYNLLSGLPPSHQWYTVLDLKDAFFCLRLHPTSQPLFAFEWRDPGMGISGQLTWTRLPQGFKNSPTLFNEALHRDLADFRIQHPDLILLQYVDDILLAATSELDCQQGTRALLQTLGDLGYRASAKKAQICQKQVKYLGYLLREGQRWLTEARKETVMGQPVPKTPRQLREFLGKAGFCRLFIPGFAEMAAPLYPLTKPGTLFSWGPDQQKAYQEIKQALLTAPALGLPDLTKPFELFVDEKQGYAKGVLTQKLGPWRRPVAYLSKKLDPVAAGWPPCLRMVAAIAVLTKDAGKLTMGQPLVILAPHAVEALVKQPPDRWLSNARMTHYQAMLLDTDRVQFGPVVALNPATLLPLPEEGAPHDCLEILAETHGTRPDLTDQPIPDADHTWYTDGSSFLQEGQRKAGAAVTTETEVIWAGALPAGTSAQRAELIALTQALKMAEGKRLNVYTDSRYAFATAHIHGEIYRRRGWLTSEGREIKNKSEILALLKALFLPKRLSIIHCLGHQKGDSAEARGNRLADQAAREAAIKTPPDTSTLLIAGKRTADGSEFEKRTADGSEFESPKKKAKVE

SEQ ID NO: 2170 - protein, 2091 aa, synthetic construct
MPAAKRVKLDGGDKKYSIGLDIGTNSVGWAVITDEYKVPSKKFKVLGNTDRHSIKKNLIGALLFDSGETAEATRLKRTARRRYTRRKNRICYLQEIFSNEMAKVDDSFFHRLEESFLVEEDKKHERHPIFGNIVDEVAYHEKYPTIYHLRKKLVDSTDKADLRLIYLALAHMIKFRGHFLIEGDLNPDNSDVDKLFIQLVQTYNQLFEENPINASGVDAKAILSARLSKSRRLENLIAQLPGEKKNGLFGNLIALSLGLTPNFKSNFDLAEDAKLQLSKDTYDDDLDNLLAQIGDQYADLFLAAKNLSDAILLSDILRVNTEITKAPLSASMIKRYDEHHQDLTLLKALVRQQLPEKYKEIFFDQSKNGYAGYIDGGASQEEFYKFIKPILEKMDGTEELLVKLNREDLLRKQRTFDNGSIPHQIHLGELHAILRRQEDFYPFLKDNREKIEKILTFRIPYYVGPLARGNSRFAWMTRKSEETITPWNFEEVVDKGASAQSFIERMTNFDKNLPNEKVLPKHSLLYEYFTVYNELTKVKYVTEGMRKPAFLSGEQKKAIVDLLFKTNRKVTVKQLKEDYFKKIECFDSVEISGVEDRFNASLGTYHDLLKIIKDKDFLDNEENEDILEDIVLTLTLFEDREMIEERLKTYAHLFDDKVMKQLKRRRYTGWGRLSRKLINGIRDKQSGKTILDFLKSDGFANRNFMQLIHDDSLTFKEDIQKAQVSGQGDSLHEHIANLAGSPAIKKGILQTVKVVDELVKVMGRHKPENIVIEMARENQTTQKGQKNSRERMKRIEEGIKELGSQILKEHPVENTQLQNEKLYLYYLQNGRDMYVDQELDINRLSDYDVDHIVPQSFLKDDSIDNKVLTRSDKARGKSDNVPSEEVVKKMKNYWRQLLNAKLITQRKFDNLTKAERGGLSELDKAGFIKRQLVETRQITKHVAQILDSRMNTKYDENDKLIREVKVITLKSKLVSDFRKDFQFYKVREINNYHHAHDAYLNAVVGTALIKKYPKLESEFVYGDYKVYDVRKMIAKSEQEIGKATAKYFFYSNIMNFFKTEITLANGEIRKRPLIETNGETGEIVWDKGRDFATVRKVLSMPQVNIVKKTEVQTGGFSKESILPKRNSDKLIARKKDWDPKKYGGFDSPTVAYSVLVVAKVEKGKSKKLKSVKELLGITIMERSSFEKNPIDFLEAKGYKEVKKDLIIKLPKYSLFELENGRKRMLASAGELQKGNELALPSKYVNFLYLASHYEKLKGSPEDNEQKQLFVEQHKHYLDEIIEQISEFSKRVILADANLDKVLSAYNKHRDKPIREQAENIIHLFTLTNLGAPAAFKYFDTTIDRKRYTSTKEVLDATLIHQSITGLYETRIDLSQLGGDGGGSSGGGGGLGIEDEYRLHETSTEPDVSLGSTWLSDFPQAWAETGGMGLAVRQAPLIIPLKATSTPVSIQQYPMSHEARLGIKPHIQRLLDQGILVPCQSPWNTPLLPVKKPGTNDYRPVQDLREVNKRVEDIHPTVPNPYNLLSGLPPSHQWYTVLDLKDAFFCLRLHPTSQPLFAFEWRDPGMGISGQLTWTRLPQGFKNSPTLFNEALHRDLADFRIQHPDLILLQYVDDILLAATSELDCQQGTRALLQTLGDLGYRASAKKAQICQKQVKYLGYLLREGQRWLTEARKETVMGQPVPKTPRQLREFLGKAGFCRLFIPGFAEMAAPLYPLTKPGTLFSWGPDQQKAYQEIKQALLTAPALGLPDLTKPFELFVDEKQGYAKGVLTQKLGPWRRPVAYLSKKLDPVAAGWPPCLRMVAAIAVLTKDAGKLTMGQPLVILAPHAVEALVKQPPDRWLSNARMTHYQAMLLDTDRVQFGPVVALNPATLLPLPEEGAPHDCLEILAETHGTRPDLTDQPIPDADHTWYTDGSSFLQEGQRKAGAAVTTETEVIWAGALPAGTSAQRAELIALTQALKMAEGKRLNVYTDSRYAFATAHIHGEIYRRRGWLTSEGREIKNKSEILALLKALFLPKRLSIIHCLGHQKGDSAEARGNRLADQAAREAAIKTPPDTSTLLIAGKRTADGSEFEKRTADGSEFESPKKKAKVE

SEQ ID NO: 2171 - protein, 2091 aa, synthetic construct
MPAAKRVKLDGGDKKYSIGLDIGTNSVGWAVITDEYKVPSKKFKVLGNTDRHSIKKNLIGALLFDSGETAEATRLKRTARRRYTRRKNRICYLQEIFSNEMAKVDDSFFHRLEESFLVEEDKKHERHPIFGNIVDEVAYHEKYPTIYHLRKKLVDSTDKADLRLIYLALAHMIKFRGHFLIEGDLNPDNSDVDKLFIQLVQTYNQLFEENPINASGVDAKAILSARLSKSRRLENLIAQLPGEKKNGLFGNLIALSLGLTPNFKSNFDLAEDAKLQLSKDTYDDDLDNLLAQIGDQYADLFLAAKNLSDAILLSDILRVNTEITKAPLSASMIKRYDEHHQDLTLLKALVRQQLPEKYKEIFFDQSKNGYAGYIDGGASQEEFYKFIKPILEKMDGTEELLVKLNREDLLRKQRTFDNGSIPHQIHLGELHAILRRQEDFYPFLKDNREKIEKILTFRIPYYVGPLARGNSRFAWMTRKSEETITPWNFEEVVDKGASAQSFIERMTNFDKNLPNEKVLPKHSLLYEYFTVYNELTKVKYVTEGMRKPAFLSGEQKKAIVDLLFKTNRKVTVKQLKEDYFKKIECFDSVEISGVEDRFNASLGTYHDLLKIIKDKDFLDNEENEDILEDIVLTLTLFEDREMIEERLKTYAHLFDDKVMKQLKRRRYTGWGRLSRKLINGIRDKQSGKTILDFLKSDGFANRNFMQLIHDDSLTFKEDIQKAQVSGQGDSLHEHIANLAGSPAIKKGILQTVKVVDELVKVMGRHKPENIVIEMARENQTTQKGQKNSRERMKRIEEGIKELGSQILKEHPVENTQLQNEKLYLYYLQNGRDMYVDQELDINRLSDYDVDHIVPQSFLKDDSIDNKVLTRSDKARGKSDNVPSEEVVKKMKNYWRQLLNAKLITQRKFDNLTKAERGGLSELDKAGFIKRQLVETRQITKHVAQILDSRMNTKYDENDKLIREVKVITLKSKLVSDFRKDFQFYKVREINNYHHAHDAYLNAVVGTALIKKYPKLESEFVYGDYKVYDVRKMIAKSEQEIGKATAKYFFYSNIMNFFKTEITLANGEIRKRPLIETNGETGEIVWDKGRDFATVRKVLSMPQVNIVKKTEVQTGGFSKESILPKRNSDKLIARKKDWDPKKYGGFDSPTVAYSVLVVAKVEKGKSKKLKSVKELLGITIMERSSFEKNPIDFLEAKGYKEVKKDLIIKLPKYSLFELENGRKRMLASAGELQKGNELALPSKYVNFLYLASHYEKLKGSPEDNEQKQLFVEQHKHYLDEIIEQISEFSKRVILADANLDKVLSAYNKHRDKPIREQAENIIHLFTLTNLGAPAAFKYFDTTIDRKRYTSTKEVLDATLIHQSITGLYETRIDLSQLGGDGGGSSGGSGGLGIEDEYRLHETSTEPDVSLGSTWLSDFPQAWAETGGMGLAVRQAPLIIPLKATSTPVSIQQYPMSHEARLGIKPHIQRLLDQGILVPCQSPWNTPLLPVKKPGTNDYRPVQDLREVNKRVEDIHPTVPNPYNLLSGLPPSHQWYTVLDLKDAFFCLRLHPTSQPLFAFEWRDPGMGISGQLTWTRLPQGFKNSPTLFNEALHRDLADFRIQHPDLILLQYVDDILLAATSELDCQQGTRALLQTLGDLGYRASAKKAQICQKQVKYLGYLLREGQRWLTEARKETVMGQPVPKTPRQLREFLGKAGFCRLFIPGFAEMAAPLYPLTKPGTLFSWGPDQQKAYQEIKQALLTAPALGLPDLTKPFELFVDEKQGYAKGVLTQKLGPWRRPVAYLSKKLDPVAAGWPPCLRMVAAIAVLTKDAGKLTMGQPLVILAPHAVEALVKQPPDRWLSNARMTHYQAMLLDTDRVQFGPVVALNPATLLPLPEEGAPHDCLEILAETHGTRPDLTDQPIPDADHTWYTDGSSFLQEGQRKAGAAVTTETEVIWAGALPAGTSAQRAELIALTQALKMAEGKRLNVYTDSRYAFATAHIHGEIYRRRGWLTSEGREIKNKSEILALLKALFLPKRLSIIHCLGHQKGDSAEARGNRLADQAAREAAIKTPPDTSTLLIAGKRTADGSEFEKRTADGSEFESPKKKAKVE

SEQ ID NO: 2172 - protein, 2094 aa, synthetic construct
MPAAKRVKLDGGDKKYSIGLDIGTNSVGWAVITDEYKVPSKKFKVLGNTDRHSIKKNLIGALLFDSGETAEATRLKRTARRRYTRRKNRICYLQEIFSNEMAKVDDSFFHRLEESFLVEEDKKHERHPIFGNIVDEVAYHEKYPTIYHLRKKLVDSTDKADLRLIYLALAHMIKFRGHFLIEGDLNPDNSDVDKLFIQLVQTYNQLFEENPINASGVDAKAILSARLSKSRRLENLIAQLPGEKKNGLFGNLIALSLGLTPNFKSNFDLAEDAKLQLSKDTYDDDLDNLLAQIGDQYADLFLAAKNLSDAILLSDILRVNTEITKAPLSASMIKRYDEHHQDLTLLKALVRQQLPEKYKEIFFDQSKNGYAGYIDGGASQEEFYKFIKPILEKMDGTEELLVKLNREDLLRKQRTFDNGSIPHQIHLGELHAILRRQEDFYPFLKDNREKIEKILTFRIPYYVGPLARGNSRFAWMTRKSEETITPWNFEEVVDKGASAQSFIERMTNFDKNLPNEKVLPKHSLLYEYFTVYNELTKVKYVTEGMRKPAFLSGEQKKAIVDLLFKTNRKVTVKQLKEDYFKKIECFDSVEISGVEDRFNASLGTYHDLLKIIKDKDFLDNEENEDILEDIVLTLTLFEDREMIEERLKTYAHLFDDKVMKQLKRRRYTGWGRLSRKLINGIRDKQSGKTILDFLKSDGFANRNFMQLIHDDSLTFKEDIQKAQVSGQGDSLHEHIANLAGSPAIKKGILQTVKVVDELVKVMGRHKPENIVIEMARENQTTQKGQKNSRERMKRIEEGIKELGSQILKEHPVENTQLQNEKLYLYYLQNGRDMYVDQELDINRLSDYDVDHIVPQSFLKDDSIDNKVLTRSDKARGKSDNVPSEEVVKKMKNYWRQLLNAKLITQRKFDNLTKAERGGLSELDKAGFIKRQLVETRQITKHVAQILDSRMNTKYDENDKLIREVKVITLKSKLVSDFRKDFQFYKVREINNYHHAHDAYLNAVVGTALIKKYPKLESEFVYGDYKVYDVRKMIAKSEQEIGKATAKYFFYSNIMNFFKTEITLANGEIRKRPLIETNGETGEIVWDKGRDFATVRKVLSMPQVNIVKKTEVQTGGFSKESILPKRNSDKLIARKKDWDPKKYGGFDSPTVAYSVLVVAKVEKGKSKKLKSVKELLGITIMERSSFEKNPIDFLEAKGYKEVKKDLIIKLPKYSLFELENGRKRMLASAGELQKGNELALPSKYVNFLYLASHYEKLKGSPEDNEQKQLFVEQHKHYLDEIIEQISEFSKRVILADANLDKVLSAYNKHRDKPIREQAENIIHLFTLTNLGAPAAFKYFDTTIDRKRYTSTKEVLDATLIHQSITGLYETRIDLSQLGGDGGGGSGGGGSSGGLGIEDEYRLHETSTEPDVSLGSTWLSDFPQAWAETGGMGLAVRQAPLIIPLKATSTPVSIQQYPMSHEARLGIKPHIQRLLDQGILVPCQSPWNTPLLPVKKPGTNDYRPVQDLREVNKRVEDIHPTVPNPYNLLSGLPPSHQWYTVLDLKDAFFCLRLHPTSQPLFAFEWRDPGMGISGQLTWTRLPQGFKNSPTLFNEALHRDLADFRIQHPDLILLQYVDDILLAATSELDCQQGTRALLQTLGDLGYRASAKKAQICQKQVKYLGYLLREGQRWLTEARKETVMGQPVPKTPRQLREFLGKAGFCRLFIPGFAEMAAPLYPLTKPGTLFSWGPDQQKAYQEIKQALLTAPALGLPDLTKPFELFVDEKQGYAKGVLTQKLGPWRRPVAYLSKKLDPVAAGWPPCLRMVAAIAVLTKDAGKLTMGQPLVILAPHAVEALVKQPPDRWLSNARMTHYQAMLLDTDRVQFGPVVALNPATLLPLPEEGAPHDCLEILAETHGTRPDLTDQPIPDADHTWYTDGSSFLQEGQRKAGAAVTTETEVIWAGALPAGTSAQRAELIALTQALKMAEGKRLNVYTDSRYAFATAHIHGEIYRRRGWLTSEGREIKNKSEILALLKALFLPKRLSIIHCLGHQKGDSAEARGNRLADQAAREAAIKTPPDTSTLLIAGKRTADGSEFEKRTADGSEFESPKKKAKVE

SEQ ID NO: 2173 - protein, 2096 aa, synthetic construct
MPAAKRVKLDGGDKKYSIGLDIGTNSVGWAVITDEYKVPSKKFKVLGNTDRHSIKKNLIGALLFDSGETAEATRLKRTARRRYTRRKNRICYLQEIFSNEMAKVDDSFFHRLEESFLVEEDKKHERHPIFGNIVDEVAYHEKYPTIYHLRKKLVDSTDKADLRLIYLALAHMIKFRGHFLIEGDLNPDNSDVDKLFIQLVQTYNQLFEENPINASGVDAKAILSARLSKSRRLENLIAQLPGEKKNGLFGNLIALSLGLTPNFKSNFDLAEDAKLQLSKDTYDDDLDNLLAQIGDQYADLFLAAKNLSDAILLSDILRVNTEITKAPLSASMIKRYDEHHQDLTLLKALVRQQLPEKYKEIFFDQSKNGYAGYIDGGASQEEFYKFIKPILEKMDGTEELLVKLNREDLLRKQRTFDNGSIPHQIHLGELHAILRRQEDFYPFLKDNREKIEKILTFRIPYYVGPLARGNSRFAWMTRKSEETITPWNFEEVVDKGASAQSFIERMTNFDKNLPNEKVLPKHSLLYEYFTVYNELTKVKYVTEGMRKPAFLSGEQKKAIVDLLFKTNRKVTVKQLKEDYFKKIECFDSVEISGVEDRFNASLGTYHDLLKIIKDKDFLDNEENEDILEDIVLTLTLFEDREMIEERLKTYAHLFDDKVMKQLKRRRYTGWGRLSRKLINGIRDKQSGKTILDFLKSDGFANRNFMQLIHDDSLTFKEDIQKAQVSGQGDSLHEHIANLAGSPAIKKGILQTVKVVDELVKVMGRHKPENIVIEMARENQTTQKGQKNSRERMKRIEEGIKELGSQILKEHPVENTQLQNEKLYLYYLQNGRDMYVDQELDINRLSDYDVDHIVPQSFLKDDSIDNKVLTRSDKARGKSDNVPSEEVVKKMKNYWRQLLNAKLITQRKFDNLTKAERGGLSELDKAGFIKRQLVETRQITKHVAQILDSRMNTKYDENDKLIREVKVITLKSKLVSDFRKDFQFYKVREINNYHHAHDAYLNAVVGTALIKKYPKLESEFVYGDYKVYDVRKMIAKSEQEIGKATAKYFFYSNIMNFFKTEITLANGEIRKRPLIETNGETGEIVWDKGRDFATVRKVLSMPQVNIVKKTEVQTGGFSKESILPKRNSDKLIARKKDWDPKKYGGFDSPTVAYSVLVVAKVEKGKSKKLKSVKELLGITIMERSSFEKNPIDFLEAKGYKEVKKDLIIKLPKYSLFELENGRKRMLASAGELQKGNELALPSKYVNFLYLASHYEKLKGSPEDNEQKQLFVEQHKHYLDEIIEQISEFSKRVILADANLDKVLSAYNKHRDKPIREQAENIIHLFTLTNLGAPAAFKYFDTTIDRKRYTSTKEVLDATLIHQSITGLYETRIDLSQLGGDGGEAAAKGGGGSSGGLGIEDEYRLHETSTEPDVSLGSTWLSDFPQAWAETGGMGLAVRQAPLIIPLKATSTPVSIQQYPMSHEARLGIKPHIQRLLDQGILVPCQSPWNTPLLPVKKPGTNDYRPVQDLREVNKRVEDIHPTVPNPYNLLSGLPPSHQWYTVLDLKDAFFCLRLHPTSQPLFAFEWRDPGMGISGQLTWTRLPQGFKNSPTLFNEALHRDLADFRIQHPDLILLQYVDDILLAATSELDCQQGTRALLQTLGDLGYRASAKKAQICQKQVKYLGYLLREGQRWLTEARKETVMGQPVPKTPRQLREFLGKAGFCRLFIPGFAEMAAPLYPLTKPGTLFSWGPDQQKAYQEIKQALLTAPALGLPDLTKPFELFVDEKQGYAKGVLTQKLGPWRRPVAYLSKKLDPVAAGWPPCLRMVAAIAVLTKDAGKLTMGQPLVILAPHAVEALVKQPPDRWLSNARMTHYQAMLLDTDRVQFGPVVALNPATLLPLPEEGAPHDCLEILAETHGTRPDLTDQPIPDADHTWYTDGSSFLQEGQRKAGAAVTTETEVIWAGALPAGTSAQRAELIALTQALKMAEGKRLNVYTDSRYAFATAHIHGEIYRRRGWLTSEGREIKNKSEILALLKALFLPKRLSIIHCLGHQKGDSAEARGNRLADQAAREAAIKTPPDTSTLLIAGKRTADGSEFEKRTADGSEFESPKKKAKVE

SEQ ID NO: 2174 - protein, 2096 aa, synthetic construct
MPAAKRVKLDGGDKKYSIGLDIGTNSVGWAVITDEYKVPSKKFKVLGNTDRHSIKKNLIGALLFDSGETAEATRLKRTARRRYTRRKNRICYLQEIFSNEMAKVDDSFFHRLEESFLVEEDKKHERHPIFGNIVDEVAYHEKYPTIYHLRKKLVDSTDKADLRLIYLALAHMIKFRGHFLIEGDLNPDNSDVDKLFIQLVQTYNQLFEENPINASGVDAKAILSARLSKSRRLENLIAQLPGEKKNGLFGNLIALSLGLTPNFKSNFDLAEDAKLQLSKDTYDDDLDNLLAQIGDQYADLFLAAKNLSDAILLSDILRVNTEITKAPLSASMIKRYDEHHQDLTLLKALVRQQLPEKYKEIFFDQSKNGYAGYIDGGASQEEFYKFIKPILEKMDGTEELLVKLNREDLLRKQRTFDNGSIPHQIHLGELHAILRRQEDFYPFLKDNREKIEKILTFRIPYYVGPLARGNSRFAWMTRKSEETITPWNFEEVVDKGASAQSFIERMTNFDKNLPNEKVLPKHSLLYEYFTVYNELTKVKYVTEGMRKPAFLSGEQKKAIVDLLFKTNRKVTVKQLKEDYFKKIECFDSVEISGVEDRFNASLGTYHDLLKIIKDKDFLDNEENEDILEDIVLTLTLFEDREMIEERLKTYAHLFDDKVMKQLKRRRYTGWGRLSRKLINGIRDKQSGKTILDFLKSDGFANRNFMQLIHDDSLTFKEDIQKAQVSGQGDSLHEHIANLAGSPAIKKGILQTVKVVDELVKVMGRHKPENIVIEMARENQTTQKGQKNSRERMKRIEEGIKELGSQILKEHPVENTQLQNEKLYLYYLQNGRDMYVDQELDINRLSDYDVDHIVPQSFLKDDSIDNKVLTRSDKARGKSDNVPSEEVVKKMKNYWRQLLNAKLITQRKFDNLTKAERGGLSELDKAGFIKRQLVETRQITKHVAQILDSRMNTKYDENDKLIREVKVITLKSKLVSDFRKDFQFYKVREINNYHHAHDAYLNAVVGTALIKKYPKLESEFVYGDYKVYDVRKMIAKSEQEIGKATAKYFFYSNIMNFFKTEITLANGEIRKRPLIETNGETGEIVWDKGRDFATVRKVLSMPQVNIVKKTEVQTGGFSKESILPKRNSDKLIARKKDWDPKKYGGFDSPTVAYSVLVVAKVEKGKSKKLKSVKELLGITIMERSSFEKNPIDFLEAKGYKEVKKDLIIKLPKYSLFELENGRKRMLASAGELQKGNELALPSKYVNFLYLASHYEKLKGSPEDNEQKQLFVEQHKHYLDEIIEQISEFSKRVILADANLDKVLSAYNKHRDKPIREQAENIIHLFTLTNLGAPAAFKYFDTTIDRKRYTSTKEVLDATLIHQSITGLYETRIDLSQLGGDGGGGGEAAAKGSSGGLGIEDEYRLHETSTEPDVSLGSTWLSDFPQAWAETGGMGLAVRQAPLIIPLKATSTPVSIQQYPMSHEARLGIKPHIQRLLDQGILVPCQSPWNTPLLPVKKPGTNDYRPVQDLREVNKRVEDIHPTVPNPYNLLSGLPPSHQWYTVLDLKDAFFCLRLHPTSQPLFAFEWRDPGMGISGQLTWTRLPQGFKNSPTLFNEALHRDLADFRIQHPDLILLQYVDDILLAATSELDCQQGTRALLQTLGDLGYRASAKKAQICQKQVKYLGYLLREGQRWLTEARKETVMGQPVPKTPRQLREFLGKAGFCRLFIPGFAEMAAPLYPLTKPGTLFSWGPDQQKAYQEIKQALLTAPALGLPDLTKPFELFVDEKQGYAKGVLTQKLGPWRRPVAYLSKKLDPVAAGWPPCLRMVAAIAVLTKDAGKLTMGQPLVILAPHAVEALVKQPPDRWLSNARMTHYQAMLLDTDRVQFGPVVALNPATLLPLPEEGAPHDCLEILAETHGTRPDLTDQPIPDADHTWYTDGSSFLQEGQRKAGAAVTTETEVIWAGALPAGTSAQRAELIALTQALKMAEGKRLNVYTDSRYAFATAHIHGEIYRRRGWLTSEGREIKNKSEILALLKALFLPKRLSIIHCLGHQKGDSAEARGNRLADQAAREAAIKTPPDTSTLLIAGKRTADGSEFEKRTADGSEFESPKKKAKVE

SEQ ID NO: 2175 - protein, 2096 aa, synthetic construct
MPAAKRVKLDGGDKKYSIGLDIGTNSVGWAVITDEYKVPSKKFKVLGNTDRHSIKKNLIGALLFDSGETAEATRLKRTARRRYTRRKNRICYLQEIFSNEMAKVDDSFFHRLEESFLVEEDKKHERHPIFGNIVDEVAYHEKYPTIYHLRKKLVDSTDKADLRLIYLALAHMIKFRGHFLIEGDLNPDNSDVDKLFIQLVQTYNQLFEENPINASGVDAKAILSARLSKSRRLENLIAQLPGEKKNGLFGNLIALSLGLTPNFKSNFDLAEDAKLQLSKDTYDDDLDNLLAQIGDQYADLFLAAKNLSDAILLSDILRVNTEITKAPLSASMIKRYDEHHQDLTLLKALVRQQLPEKYKEIFFDQSKNGYAGYIDGGASQEEFYKFIKPILEKMDGTEELLVKLNREDLLRKQRTFDNGSIPHQIHLGELHAILRRQEDFYPFLKDNREKIEKILTFRIPYYVGPLARGNSRFAWMTRKSEETITPWNFEEVVDKGASAQSFIERMTNFDKNLPNEKVLPKHSLLYEYFTVYNELTKVKYVTEGMRKPAFLSGEQKKAIVDLLFKTNRKVTVKQLKEDYFKKIECFDSVEISGVEDRFNASLGTYHDLLKIIKDKDFLDNEENEDILEDIVLTLTLFEDREMIEERLKTYAHLFDDKVMKQLKRRRYTGWGRLSRKLINGIRDKQSGKTILDFLKSDGFANRNFMQLIHDDSLTFKEDIQKAQVSGQGDSLHEHIANLAGSPAIKKGILQTVKVVDELVKVMGRHKPENIVIEMARENQTTQKGQKNSRERMKRIEEGIKELGSQILKEHPVENTQLQNEKLYLYYLQNGRDMYVDQELDINRLSDYDVDHIVPQSFLKDDSIDNKVLTRSDKARGKSDNVPSEEVVKKMKNYWRQLLNAKLITQRKFDNLTKAERGGLSELDKAGFIKRQLVETRQITKHVAQILDSRMNTKYDENDKLIREVKVITLKSKLVSDFRKDFQFYKVREINNYHHAHDAYLNAVVGTALIKKYPKLESEFVYGDYKVYDVRKMIAKSEQEIGKATAKYFFYSNIMNFFKTEITLANGEIRKRPLIETNGETGEIVWDKGRDFATVRKVLSMPQVNIVKKTEVQTGGFSKESILPKRNSDKLIARKKDWDPKKYGGFDSPTVAYSVLVVAKVEKGKSKKLKSVKELLGITIMERSSFEKNPIDFLEAKGYKEVKKDLIIKLPKYSLFELENGRKRMLASAGELQKGNELALPSKYVNFLYLASHYEKLKGSPEDNEQKQLFVEQHKHYLDEIIEQISEFSKRVILADANLDKVLSAYNKHRDKPIREQAENIIHLFTLTNLGAPAAFKYFDTTIDRKRYTSTKEVLDATLIHQSITGLYETRIDLSQLGGDGGGGSGGGEAAAKGGLGIEDEYRLHETSTEPDVSLGSTWLSDFPQAWAETGGMGLAVRQAPLIIPLKATSTPVSIQQYPMSHEARLGIKPHIQRLLDQGILVPCQSPWNTPLLPVKKPGTNDYRPVQDLREVNKRVEDIHPTVPNPYNLLSGLPPSHQWYTVLDLKDAFFCLRLHPTSQPLFAFEWRDPGMGISGQLTWTRLPQGFKNSPTLFNEALHRDLADFRIQHPDLILLQYVDDILLAATSELDCQQGTRALLQTLGDLGYRASAKKAQICQKQVKYLGYLLREGQRWLTEARKETVMGQPVPKTPRQLREFLGKAGFCRLFIPGFAEMAAPLYPLTKPGTLFSWGPDQQKAYQEIKQALLTAPALGLPDLTKPFELFVDEKQGYAKGVLTQKLGPWRRPVAYLSKKLDPVAAGWPPCLRMVAAIAVLTKDAGKLTMGQPLVILAPHAVEALVKQPPDRWLSNARMTHYQAMLLDTDRVQFGPVVALNPATLLPLPEEGAPHDCLEILAETHGTRPDLTDQPIPDADHTWYTDGSSFLQEGQRKAGAAVTTETEVIWAGALPAGTSAQRAELIALTQALKMAEGKRLNVYTDSRYAFATAHIHGEIYRRRGWLTSEGREIKNKSEILALLKALFLPKRLSIIHCLGHQKGDSAEARGNRLADQAAREAAIKTPPDTSTLLIAGKRTADGSEFEKRTADGSEFESPKKKAKVE

SEQ ID NO: 2176 - protein, 2091 aa, synthetic construct
MPAAKRVKLDGGDKKYSIGLDIGTNSVGWAVITDEYKVPSKKFKVLGNTDRHSIKKNLIGALLFDSGETAEATRLKRTARRRYTRRKNRICYLQEIFSNEMAKVDDSFFHRLEESFLVEEDKKHERHPIFGNIVDEVAYHEKYPTIYHLRKKLVDSTDKADLRLIYLALAHMIKFRGHFLIEGDLNPDNSDVDKLFIQLVQTYNQLFEENPINASGVDAKAILSARLSKSRRLENLIAQLPGEKKNGLFGNLIALSLGLTPNFKSNFDLAEDAKLQLSKDTYDDDLDNLLAQIGDQYADLFLAAKNLSDAILLSDILRVNTEITKAPLSASMIKRYDEHHQDLTLLKALVRQQLPEKYKEIFFDQSKNGYAGYIDGGASQEEFYKFIKPILEKMDGTEELLVKLNREDLLRKQRTFDNGSIPHQIHLGELHAILRRQEDFYPFLKDNREKIEKILTFRIPYYVGPLARGNSRFAWMTRKSEETITPWNFEEVVDKGASAQSFIERMTNFDKNLPNEKVLPKHSLLYEYFTVYNELTKVKYVTEGMRKPAFLSGEQKKAIVDLLFKTNRKVTVKQLKEDYFKKIECFDSVEISGVEDRFNASLGTYHDLLKIIKDKDFLDNEENEDILEDIVLTLTLFEDREMIEERLKTYAHLFDDKVMKQLKRRRYTGWGRLSRKLINGIRDKQSGKTILDFLKSDGFANRNFMQLIHDDSLTFKEDIQKAQVSGQGDSLHEHIANLAGSPAIKKGILQTVKVVDELVKVMGRHKPENIVIEMARENQTTQKGQKNSRERMKRIEEGIKELGSQILKEHPVENTQLQNEKLYLYYLQNGRDMYVDQELDINRLSDYDVDHIVPQSFLKDDSIDNKVLTRSDKARGKSDNVPSEEVVKKMKNYWRQLLNAKLITQRKFDNLTKAERGGLSELDKAGFIKRQLVETRQITKHVAQILDSRMNTKYDENDKLIREVKVITLKSKLVSDFRKDFQFYKVREINNYHHAHDAYLNAVVGTALIKKYPKLESEFVYGDYKVYDVRKMIAKSEQEIGKATAKYFFYSNIMNFFKTEITLANGEIRKRPLIETNGETGEIVWDKGRDFATVRKVLSMPQVNIVKKTEVQTGGFSKESILPKRNSDKLIARKKDWDPKKYGGFDSPTVAYSVLVVAKVEKGKSKKLKSVKELLGITIMERSSFEKNPIDFLEAKGYKEVKKDLIIKLPKYSLFELENGRKRMLASAGELQKGNELALPSKYVNFLYLASHYEKLKGSPEDNEQKQLFVEQHKHYLDEIIEQISEFSKRVILADANLDKVLSAYNKHRDKPIREQAENIIHLFTLTNLGAPAAFKYFDTTIDRKRYTSTKEVLDATLIHQSITGLYETRIDLSQLGGDGGGSSGSSGGLGIEDEYRLHETSTEPDVSLGSTWLSDFPQAWAETGGMGLAVRQAPLIIPLKATSTPVSIQQYPMSHEARLGIKPHIQRLLDQGILVPCQSPWNTPLLPVKKPGTNDYRPVQDLREVNKRVEDIHPTVPNPYNLLSGLPPSHQWYTVLDLKDAFFCLRLHPTSQPLFAFEWRDPGMGISGQLTWTRLPQGFKNSPTLFNEALHRDLADFRIQHPDLILLQYVDDILLAATSELDCQQGTRALLQTLGDLGYRASAKKAQICQKQVKYLGYLLREGQRWLTEARKETVMGQPVPKTPRQLREFLGKAGFCRLFIPGFAEMAAPLYPLTKPGTLFSWGPDQQKAYQEIKQALLTAPALGLPDLTKPFELFVDEKQGYAKGVLTQKLGPWRRPVAYLSKKLDPVAAGWPPCLRMVAAIAVLTKDAGKLTMGQPLVILAPHAVEALVKQPPDRWLSNARMTHYQAMLLDTDRVQFGPVVALNPATLLPLPEEGAPHDCLEILAETHGTRPDLTDQPIPDADHTWYTDGSSFLQEGQRKAGAAVTTETEVIWAGALPAGTSAQRAELIALTQALKMAEGKRLNVYTDSRYAFATAHIHGEIYRRRGWLTSEGREIKNKSEILALLKALFLPKRLSIIHCLGHQKGDSAEARGNRLADQAAREAAIKTPPDTSTLLIAGKRTADGSEFEKRTADGSEFESPKKKAKVE

SEQ ID NO: 2177 - protein, 2096 aa, synthetic construct
MPAAKRVKLDGGDKKYSIGLDIGTNSVGWAVITDEYKVPSKKFKVLGNTDRHSIKKNLIGALLFDSGETAEATRLKRTARRRYTRRKNRICYLQEIFSNEMAKVDDSFFHRLEESFLVEEDKKHERHPIFGNIVDEVAYHEKYPTIYHLRKKLVDSTDKADLRLIYLALAHMIKFRGHFLIEGDLNPDNSDVDKLFIQLVQTYNQLFEENPINASGVDAKAILSARLSKSRRLENLIAQLPGEKKNGLFGNLIALSLGLTPNFKSNFDLAEDAKLQLSKDTYDDDLDNLLAQIGDQYADLFLAAKNLSDAILLSDILRVNTEITKAPLSASMIKRYDEHHQDLTLLKALVRQQLPEKYKEIFFDQSKNGYAGYIDGGASQEEFYKFIKPILEKMDGTEELLVKLNREDLLRKQRTFDNGSIPHQIHLGELHAILRRQEDFYPFLKDNREKIEKILTFRIPYYVGPLARGNSRFAWMTRKSEETITPWNFEEVVDKGASAQSFIERMTNFDKNLPNEKVLPKHSLLYEYFTVYNELTKVKYVTEGMRKPAFLSGEQKKAIVDLLFKTNRKVTVKQLKEDYFKKIECFDSVEISGVEDRFNASLGTYHDLLKIIKDKDFLDNEENEDILEDIVLTLTLFEDREMIEERLKTYAHLFDDKVMKQLKRRRYTGWGRLSRKLINGIRDKQSGKTILDFLKSDGFANRNFMQLIHDDSLTFKEDIQKAQVSGQGDSLHEHIANLAGSPAIKKGILQTVKVVDELVKVMGRHKPENIVIEMARENQTTQKGQKNSRERMKRIEEGIKELGSQILKEHPVENTQLQNEKLYLYYLQNGRDMYVDQELDINRLSDYDVDHIVPQSFLKDDSIDNKVLTRSDKARGKSDNVPSEEVVKKMKNYWRQLLNAKLITQRKFDNLTKAERGGLSELDKAGFIKRQLVETRQITKHVAQILDSRMNTKYDENDKLIREVKVITLKSKLVSDFRKDFQFYKVREINNYHHAHDAYLNAVVGTALIKKYPKLESEFVYGDYKVYDVRKMIAKSEQEIGKATAKYFFYSNIMNFFKTEITLANGEIRKRPLIETNGETGEIVWDKGRDFATVRKVLSMPQVNIVKKTEVQTGGFSKESILPKRNSDKLIARKKDWDPKKYGGFDSPTVAYSVLVVAKVEKGKSKKLKSVKELLGITIMERSSFEKNPIDFLEAKGYKEVKKDLIIKLPKYSLFELENGRKRMLASAGELQKGNELALPSKYVNFLYLASHYEKLKGSPEDNEQKQLFVEQHKHYLDEIIEQISEFSKRVILADANLDKVLSAYNKHRDKPIREQAENIIHLFTLTNLGAPAAFKYFDTTIDRKRYTSTKEVLDATLIHQSITGLYETRIDLSQLGGDGGGSSEAAAKGGSGGLGIEDEYRLHETSTEPDVSLGSTWLSDFPQAWAETGGMGLAVRQAPLIIPLKATSTPVSIQQYPMSHEARLGIKPHIQRLLDQGILVPCQSPWNTPLLPVKKPGTNDYRPVQDLREVNKRVEDIHPTVPNPYNLLSGLPPSHQWYTVLDLKDAFFCLRLHPTSQPLFAFEWRDPGMGISGQLTWTRLPQGFKNSPTLFNEALHRDLADFRIQHPDLILLQYVDDILLAATSELDCQQGTRALLQTLGDLGYRASAKKAQICQKQVKYLGYLLREGQRWLTEARKETVMGQPVPKTPRQLREFLGKAGFCRLFIPGFAEMAAPLYPLTKPGTLFSWGPDQQKAYQEIKQALLTAPALGLPDLTKPFELFVDEKQGYAKGVLTQKLGPWRRPVAYLSKKLDPVAAGWPPCLRMVAAIAVLTKDAGKLTMGQPLVILAPHAVEALVKQPPDRWLSNARMTHYQAMLLDTDRVQFGPVVALNPATLLPLPEEGAPHDCLEILAETHGTRPDLTDQPIPDADHTWYTDGSSFLQEGQRKAGAAVTTETEVIWAGALPAGTSAQRAELIALTQALKMAEGKRLNVYTDSRYAFATAHIHGEIYRRRGWLTSEGREIKNKSEILALLKALFLPKRLSIIHCLGHQKGDSAEARGNRLADQAAREAAIKTPPDTSTLLIAGKRTADGSEFEKRTADGSEFESPKKKAKVE

SEQ ID NO: 2178 - protein, 2096 aa, synthetic construct
MPAAKRVKLDGGDKKYSIGLDIGTNSVGWAVITDEYKVPSKKFKVLGNTDRHSIKKNLIGALLFDSGETAEATRLKRTARRRYTRRKNRICYLQEIFSNEMAKVDDSFFHRLEESFLVEEDKKHERHPIFGNIVDEVAYHEKYPTIYHLRKKLVDSTDKADLRLIYLALAHMIKFRGHFLIEGDLNPDNSDVDKLFIQLVQTYNQLFEENPINASGVDAKAILSARLSKSRRLENLIAQLPGEKKNGLFGNLIALSLGLTPNFKSNFDLAEDAKLQLSKDTYDDDLDNLLAQIGDQYADLFLAAKNLSDAILLSDILRVNTEITKAPLSASMIKRYDEHHQDLTLLKALVRQQLPEKYKEIFFDQSKNGYAGYIDGGASQEEFYKFIKPILEKMDGTEELLVKLNREDLLRKQRTFDNGSIPHQIHLGELHAILRRQEDFYPFLKDNREKIEKILTFRIPYYVGPLARGNSRFAWMTRKSEETITPWNFEEVVDKGASAQSFIERMTNFDKNLPNEKVLPKHSLLYEYFTVYNELTKVKYVTEGMRKPAFLSGEQKKAIVDLLFKTNRKVTVKQLKEDYFKKIECFDSVEISGVEDRFNASLGTYHDLLKIIKDKDFLDNEENEDILEDIVLTLTLFEDREMIEERLKTYAHLFDDKVMKQLKRRRYTGWGRLSRKLINGIRDKQSGKTILDFLKSDGFANRNFMQLIHDDSLTFKEDIQKAQVSGQGDSLHEHIANLAGSPAIKKGILQTVKVVDELVKVMGRHKPENIVIEMARENQTTQKGQKNSRERMKRIEEGIKELGSQILKEHPVENTQLQNEKLYLYYLQNGRDMYVDQELDINRLSDYDVDHIVPQSFLKDDSIDNKVLTRSDKARGKSDNVPSEEVVKKMKNYWRQLLNAKLITQRKFDNLTKAERGGLSELDKAGFIKRQLVETRQITKHVAQILDSRMNTKYDENDKLIREVKVITLKSKLVSDFRKDFQFYKVREINNYHHAHDAYLNAVVGTALIKKYPKLESEFVYGDYKVYDVRKMIAKSEQEIGKATAKYFFYSNIMNFFKTEITLANGEIRKRPLIETNGETGEIVWDKGRDFATVRKVLSMPQVNIVKKTEVQTGGFSKESILPKRNSDKLIARKKDWDPKKYGGFDSPTVAYSVLVVAKVEKGKSKKLKSVKELLGITIMERSSFEKNPIDFLEAKGYKEVKKDLIIKLPKYSLFELENGRKRMLASAGELQKGNELALPSKYVNFLYLASHYEKLKGSPEDNEQKQLFVEQHKHYLDEIIEQISEFSKRVILADANLDKVLSAYNKHRDKPIREQAENIIHLFTLTNLGAPAAFKYFDTTIDRKRYTSTKEVLDATLIHQSITGLYETRIDLSQLGGDGGPAPGGGEAAAKGGLGIEDEYRLHETSTEPDVSLGSTWLSDFPQAWAETGGMGLAVRQAPLIIPLKATSTPVSIQQYPMSHEARLGIKPHIQRLLDQGILVPCQSPWNTPLLPVKKPGTNDYRPVQDLREVNKRVEDIHPTVPNPYNLLSGLPPSHQWYTVLDLKDAFFCLRLHPTSQPLFAFEWRDPGMGISGQLTWTRLPQGFKNSPTLFNEALHRDLADFRIQHPDLILLQYVDDILLAATSELDCQQGTRALLQTLGDLGYRASAKKAQICQKQVKYLGYLLREGQRWLTEARKETVMGQPVPKTPRQLREFLGKAGFCRLFIPGFAEMAAPLYPLTKPGTLFSWGPDQQKAYQEIKQALLTAPALGLPDLTKPFELFVDEKQGYAKGVLTQKLGPWRRPVAYLSKKLDPVAAGWPPCLRMVAAIAVLTKDAGKLTMGQPLVILAPHAVEALVKQPPDRWLSNARMTHYQAMLLDTDRVQFGPVVALNPATLLPLPEEGAPHDCLEILAETHGTRPDLTDQPIPDADHTWYTDGSSFLQEGQRKAGAAVTTETEVIWAGALPAGTSAQRAELIALTQALKMAEGKRLNVYTDSRYAFATAHIHGEIYRRRGWLTSEGREIKNKSEILALLKALFLPKRLSIIHCLGHQKGDSAEARGNRLADQAAREAAIKTPPDTSTLLIAGKRTADGSEFEKRTADGSEFESPKKKAKVE

SEQ ID NO: 2179 - protein, 2091 aa, synthetic construct
MPAAKRVKLDGGDKKYSIGLDIGTNSVGWAVITDEYKVPSKKFKVLGNTDRHSIKKNLIGALLFDSGETAEATRLKRTARRRYTRRKNRICYLQEIFSNEMAKVDDSFFHRLEESFLVEEDKKHERHPIFGNIVDEVAYHEKYPTIYHLRKKLVDSTDKADLRLIYLALAHMIKFRGHFLIEGDLNPDNSDVDKLFIQLVQTYNQLFEENPINASGVDAKAILSARLSKSRRLENLIAQLPGEKKNGLFGNLIALSLGLTPNFKSNFDLAEDAKLQLSKDTYDDDLDNLLAQIGDQYADLFLAAKNLSDAILLSDILRVNTEITKAPLSASMIKRYDEHHQDLTLLKALVRQQLPEKYKEIFFDQSKNGYAGYIDGGASQEEFYKFIKPILEKMDGTEELLVKLNREDLLRKQRTFDNGSIPHQIHLGELHAILRRQEDFYPFLKDNREKIEKILTFRIPYYVGPLARGNSRFAWMTRKSEETITPWNFEEVVDKGASAQSFIERMTNFDKNLPNEKVLPKHSLLYEYFTVYNELTKVKYVTEGMRKPAFLSGEQKKAIVDLLFKTNRKVTVKQLKEDYFKKIECFDSVEISGVEDRFNASLGTYHDLLKIIKDKDFLDNEENEDILEDIVLTLTLFEDREMIEERLKTYAHLFDDKVMKQLKRRRYTGWGRLSRKLINGIRDKQSGKTILDFLKSDGFANRNFMQLIHDDSLTFKEDIQKAQVSGQGDSLHEHIANLAGSPAIKKGILQTVKVVDELVKVMGRHKPENIVIEMARENQTTQKGQKNSRERMKRIEEGIKELGSQILKEHPVENTQLQNEKLYLYYLQNGRDMYVDQELDINRLSDYDVDHIVPQSFLKDDSIDNKVLTRSDKARGKSDNVPSEEVVKKMKNYWRQLLNAKLITQRKFDNLTKAERGGLSELDKAGFIKRQLVETRQITKHVAQILDSRMNTKYDENDKLIREVKVITLKSKLVSDFRKDFQFYKVREINNYHHAHDAYLNAVVGTALIKKYPKLESEFVYGDYKVYDVRKMIAKSEQEIGKATAKYFFYSNIMNFFKTEITLANGEIRKRPLIETNGETGEIVWDKGRDFATVRKVLSMPQVNIVKKTEVQTGGFSKESILPKRNSDKLIARKKDWDPKKYGGFDSPTVAYSVLVVAKVEKGKSKKLKSVKELLGITIMERSSFEKNPIDFLEAKGYKEVKKDLIIKLPKYSLFELENGRKRMLASAGELQKGNELALPSKYVNFLYLASHYEKLKGSPEDNEQKQLFVEQHKHYLDEIIEQISEFSKRVILADANLDKVLSAYNKHRDKPIREQAENIIHLFTLTNLGAPAAFKYFDTTIDRKRYTSTKEVLDATLIHQSITGLYETRIDLSQLGGDGGGGGGSSGGLGIEDEYRLHETSTEPDVSLGSTWLSDFPQAWAETGGMGLAVRQAPLIIPLKATSTPVSIQQYPMSHEARLGIKPHIQRLLDQGILVPCQSPWNTPLLPVKKPGTNDYRPVQDLREVNKRVEDIHPTVPNPYNLLSGLPPSHQWYTVLDLKDAFFCLRLHPTSQPLFAFEWRDPGMGISGQLTWTRLPQGFKNSPTLFNEALHRDLADFRIQHPDLILLQYVDDILLAATSELDCQQGTRALLQTLGDLGYRASAKKAQICQKQVKYLGYLLREGQRWLTEARKETVMGQPVPKTPRQLREFLGKAGFCRLFIPGFAEMAAPLYPLTKPGTLFSWGPDQQKAYQEIKQALLTAPALGLPDLTKPFELFVDEKQGYAKGVLTQKLGPWRRPVAYLSKKLDPVAAGWPPCLRMVAAIAVLTKDAGKLTMGQPLVILAPHAVEALVKQPPDRWLSNARMTHYQAMLLDTDRVQFGPVVALNPATLLPLPEEGAPHDCLEILAETHGTRPDLTDQPIPDADHTWYTDGSSFLQEGQRKAGAAVTTETEVIWAGALPAGTSAQRAELIALTQALKMAEGKRLNVYTDSRYAFATAHIHGEIYRRRGWLTSEGREIKNKSEILALLKALFLPKRLSIIHCLGHQKGDSAEARGNRLADQAAREAAIKTPPDTSTLLIAGKRTADGSEFEKRTADGSEFESPKKKAKVE

SEQ ID NO: 2180 - protein, 2094 aa, synthetic construct
MPAAKRVKLDGGDKKYSIGLDIGTNSVGWAVITDEYKVPSKKFKVLGNTDRHSIKKNLIGALLFDSGETAEATRLKRTARRRYTRRKNRICYLQEIFSNEMAKVDDSFFHRLEESFLVEEDKKHERHPIFGNIVDEVAYHEKYPTIYHLRKKLVDSTDKADLRLIYLALAHMIKFRGHFLIEGDLNPDNSDVDKLFIQLVQTYNQLFEENPINASGVDAKAILSARLSKSRRLENLIAQLPGEKKNGLFGNLIALSLGLTPNFKSNFDLAEDAKLQLSKDTYDDDLDNLLAQIGDQYADLFLAAKNLSDAILLSDILRVNTEITKAPLSASMIKRYDEHHQDLTLLKALVRQQLPEKYKEIFFDQSKNGYAGYIDGGASQEEFYKFIKPILEKMDGTEELLVKLNREDLLRKQRTFDNGSIPHQIHLGELHAILRRQEDFYPFLKDNREKIEKILTFRIPYYVGPLARGNSRFAWMTRKSEETITPWNFEEVVDKGASAQSFIERMTNFDKNLPNEKVLPKHSLLYEYFTVYNELTKVKYVTEGMRKPAFLSGEQKKAIVDLLFKTNRKVTVKQLKEDYFKKIECFDSVEISGVEDRFNASLGTYHDLLKIIKDKDFLDNEENEDILEDIVLTLTLFEDREMIEERLKTYAHLFDDKVMKQLKRRRYTGWGRLSRKLINGIRDKQSGKTILDFLKSDGFANRNFMQLIHDDSLTFKEDIQKAQVSGQGDSLHEHIANLAGSPAIKKGILQTVKVVDELVKVMGRHKPENIVIEMARENQTTQKGQKNSRERMKRIEEGIKELGSQILKEHPVENTQLQNEKLYLYYLQNGRDMYVDQELDINRLSDYDVDHIVPQSFLKDDSIDNKVLTRSDKARGKSDNVPSEEVVKKMKNYWRQLLNAKLITQRKFDNLTKAERGGLSELDKAGFIKRQLVETRQITKHVAQILDSRMNTKYDENDKLIREVKVITLKSKLVSDFRKDFQFYKVREINNYHHAHDAYLNAVVGTALIKKYPKLESEFVYGDYKVYDVRKMIAKSEQEIGKATAKYFFYSNIMNFFKTEITLANGEIRKRPLIETNGETGEIVWDKGRDFATVRKVLSMPQVNIVKKTEVQTGGFSKESILPKRNSDKLIARKKDWDPKKYGGFDSPTVAYSVLVVAKVEKGKSKKLKSVKELLGITIMERSSFEKNPIDFLEAKGYKEVKKDLIIKLPKYSLFELENGRKRMLASAGELQKGNELALPSKYVNFLYLASHYEKLKGSPEDNEQKQLFVEQHKHYLDEIIEQISEFSKRVILADANLDKVLSAYNKHRDKPIREQAENIIHLFTLTNLGAPAAFKYFDTTIDRKRYTSTKEVLDATLIHQSITGLYETRIDLSQLGGDGGGGGPAPGSSGGLGIEDEYRLHETSTEPDVSLGSTWLSDFPQAWAETGGMGLAVRQAPLIIPLKATSTPVSIQQYPMSHEARLGIKPHIQRLLDQGILVPCQSPWNTPLLPVKKPGTNDYRPVQDLREVNKRVEDIHPTVPNPYNLLSGLPPSHQWYTVLDLKDAFFCLRLHPTSQPLFAFEWRDPGMGISGQLTWTRLPQGFKNSPTLFNEALHRDLADFRIQHPDLILLQYVDDILLAATSELDCQQGTRALLQTLGDLGYRASAKKAQICQKQVKYLGYLLREGQRWLTEARKETVMGQPVPKTPRQLREFLGKAGFCRLFIPGFAEMAAPLYPLTKPGTLFSWGPDQQKAYQEIKQALLTAPALGLPDLTKPFELFVDEKQGYAKGVLTQKLGPWRRPVAYLSKKLDPVAAGWPPCLRMVAAIAVLTKDAGKLTMGQPLVILAPHAVEALVKQPPDRWLSNARMTHYQAMLLDTDRVQFGPVVALNPATLLPLPEEGAPHDCLEILAETHGTRPDLTDQPIPDADHTWYTDGSSFLQEGQRKAGAAVTTETEVIWAGALPAGTSAQRAELIALTQALKMAEGKRLNVYTDSRYAFATAHIHGEIYRRRGWLTSEGREIKNKSEILALLKALFLPKRLSIIHCLGHQKGDSAEARGNRLADQAAREAAIKTPPDTSTLLIAGKRTADGSEFEKRTADGSEFESPKKKAKVE

SEQ ID NO: 2181 - protein, 2118 aa, synthetic construct
MPAAKRVKLDGGDKKYSIGLDIGTNSVGWAVITDEYKVPSKKFKVLGNTDRHSIKKNLIGALLFDSGETAEATRLKRTARRRYTRRKNRICYLQEIFSNEMAKVDDSFFHRLEESFLVEEDKKHERHPIFGNIVDEVAYHEKYPTIYHLRKKLVDSTDKADLRLIYLALAHMIKFRGHFLIEGDLNPDNSDVDKLFIQLVQTYNQLFEENPINASGVDAKAILSARLSKSRRLENLIAQLPGEKKNGLFGNLIALSLGLTPNFKSNFDLAEDAKLQLSKDTYDDDLDNLLAQIGDQYADLFLAAKNLSDAILLSDILRVNTEITKAPLSASMIKRYDEHHQDLTLLKALVRQQLPEKYKEIFFDQSKNGYAGYIDGGASQEEFYKFIKPILEKMDGTEELLVKLNREDLLRKQRTFDNGSIPHQIHLGELHAILRRQEDFYPFLKDNREKIEKILTFRIPYYVGPLARGNSRFAWMTRKSEETITPWNFEEVVDKGASAQSFIERMTNFDKNLPNEKVLPKHSLLYEYFTVYNELTKVKYVTEGMRKPAFLSGEQKKAIVDLLFKTNRKVTVKQLKEDYFKKIECFDSVEISGVEDRFNASLGTYHDLLKIIKDKDFLDNEENEDILEDIVLTLTLFEDREMIEERLKTYAHLFDDKVMKQLKRRRYTGWGRLSRKLINGIRDKQSGKTILDFLKSDGFANRNFMQLIHDDSLTFKEDIQKAQVSGQGDSLHEHIANLAGSPAIKKGILQTVKVVDELVKVMGRHKPENIVIEMARENQTTQKGQKNSRERMKRIEEGIKELGSQILKEHPVENTQLQNEKLYLYYLQNGRDMYVDQELDINRLSDYDVDHIVPQSFLKDDSIDNKVLTRSDKARGKSDNVPSEEVVKKMKNYWRQLLNAKLITQRKFDNLTKAERGGLSELDKAGFIKRQLVETRQITKHVAQILDSRMNTKYDENDKLIREVKVITLKSKLVSDFRKDFQFYKVREINNYHHAHDAYLNAVVGTALIKKYPKLESEFVYGDYKVYDVRKMIAKSEQEIGKATAKYFFYSNIMNFFKTEITLANGEIRKRPLIETNGETGEIVWDKGRDFATVRKVLSMPQVNIVKKTEVQTGGFSKESILPKRNSDKLIARKKDWDPKKYGGFDSPTVAYSVLVVAKVEKGKSKKLKSVKELLGITIMERSSFEKNPIDFLEAKGYKEVKKDLIIKLPKYSLFELENGRKRMLASAGELQKGNELALPSKYVNFLYLASHYEKLKGSPEDNEQKQLFVEQHKHYLDEIIEQISEFSKRVILADANLDKVLSAYNKHRDKPIREQAENIIHLFTLTNLGAPAAFKYFDTTIDRKRYTSTKEVLDATLIHQSITGLYETRIDLSQLGGDGGSGGSSGGSSGSETPGTSESATPESSGGSSGGSSGGLGIEDEYRLHETSTEPDVSLGSTWLSDFPQAWAETGGMGLAVRQAPLIIPLKATSTPVSIQQYPMSHEARLGIKPHIQRLLDQGILVPCQSPWNTPLLPVKKPGTNDYRPVQDLREVNKRVEDIHPTVPNPYNLLSGLPPSHQWYTVLDLKDAFFCLRLHPTSQPLFAFEWRDPGMGISGQLTWTRLPQGFKNSPTLFNEALHRDLADFRIQHPDLILLQYVDDILLAATSELDCQQGTRALLQTLGDLGYRASAKKAQICQKQVKYLGYLLREGQRWLTEARKETVMGQPVPKTPRQLREFLGKAGFCRLFIPGFAEMAAPLYPLTKPGTLFSWGPDQQKAYQEIKQALLTAPALGLPDLTKPFELFVDEKQGYAKGVLTQKLGPWRRPVAYLSKKLDPVAAGWPPCLRMVAAIAVLTKDAGKLTMGQPLVILAPHAVEALVKQPPDRWLSNARMTHYQAMLLDTDRVQFGPVVALNPATLLPLPEEGAPHDCLEILAETHGTRPDLTDQPIPDADHTWYTDGSSFLQEGQRKAGAAVTTETEVIWAGALPAGTSAQRAELIALTQALKMAEGKRLNVYTDSRYAFATAHIHGEIYRRRGWLTSEGREIKNKSEILALLKALFLPKRLSIIHCLGHQKGDSAEARGNRLADQAAREAAIKTPPDTSTLLIAGKRTADGSEFEKRTADGSEFESPKKKAKVE

SEQ ID NO: 2182 - protein, 2096 aa, synthetic construct
MPAAKRVKLDGGDKKYSIGLDIGTNSVGWAVITDEYKVPSKKFKVLGNTDRHSIKKNLIGALLFDSGETAEATRLKRTARRRYTRRKNRICYLQEIFSNEMAKVDDSFFHRLEESFLVEEDKKHERHPIFGNIVDEVAYHEKYPTIYHLRKKLVDSTDKADLRLIYLALAHMIKFRGHFLIEGDLNPDNSDVDKLFIQLVQTYNQLFEENPINASGVDAKAILSARLSKSRRLENLIAQLPGEKKNGLFGNLIALSLGLTPNFKSNFDLAEDAKLQLSKDTYDDDLDNLLAQIGDQYADLFLAAKNLSDAILLSDILRVNTEITKAPLSASMIKRYDEHHQDLTLLKALVRQQLPEKYKEIFFDQSKNGYAGYIDGGASQEEFYKFIKPILEKMDGTEELLVKLNREDLLRKQRTFDNGSIPHQIHLGELHAILRRQEDFYPFLKDNREKIEKILTFRIPYYVGPLARGNSRFAWMTRKSEETITPWNFEEVVDKGASAQSFIERMTNFDKNLPNEKVLPKHSLLYEYFTVYNELTKVKYVTEGMRKPAFLSGEQKKAIVDLLFKTNRKVTVKQLKEDYFKKIECFDSVEISGVEDRFNASLGTYHDLLKIIKDKDFLDNEENEDILEDIVLTLTLFEDREMIEERLKTYAHLFDDKVMKQLKRRRYTGWGRLSRKLINGIRDKQSGKTILDFLKSDGFANRNFMQLIHDDSLTFKEDIQKAQVSGQGDSLHEHIANLAGSPAIKKGILQTVKVVDELVKVMGRHKPENIVIEMARENQTTQKGQKNSRERMKRIEEGIKELGSQILKEHPVENTQLQNEKLYLYYLQNGRDMYVDQELDINRLSDYDVDHIVPQSFLKDDSIDNKVLTRSDKARGKSDNVPSEEVVKKMKNYWRQLLNAKLITQRKFDNLTKAERGGLSELDKAGFIKRQLVETRQITKHVAQILDSRMNTKYDENDKLIREVKVITLKSKLVSDFRKDFQFYKVREINNYHHAHDAYLNAVVGTALIKKYPKLESEFVYGDYKVYDVRKMIAKSEQEIGKATAKYFFYSNIMNFFKTEITLANGEIRKRPLIETNGETGEIVWDKGRDFATVRKVLSMPQVNIVKKTEVQTGGFSKESILPKRNSDKLIARKKDWDPKKYGGFDSPTVAYSVLVVAKVEKGKSKKLKSVKELLGITIMERSSFEKNPIDFLEAKGYKEVKKDLIIKLPKYSLFELENGRKRMLASAGELQKGNELALPSKYVNFLYLASHYEKLKGSPEDNEQKQLFVEQHKHYLDEIIEQISEFSKRVILADANLDKVLSAYNKHRDKPIREQAENIIHLFTLTNLGAPAAFKYFDTTIDRKRYTSTKEVLDATLIHQSITGLYETRIDLSQLGGDGGGSSGGGEAAAKGGTLGIEDEYRLHETSTEPDVSLGSTWLSDFPQAWAETGGMGLAVRQAPLIIPLKATSTPVSIQQYPMSHEARLGIKPHIQRLLDQGILVPCQSPWNTPLLPVKKPGTNDYRPVQDLREVNKRVEDIHPTVPNPYNLLSGLPPSHQWYTVLDLKDAFFCLRLHPTSQPLFAFEWRDPGMGISGQLTWTRLPQGFKNSPTLFDEALHRDLADFRIQHPDLILLQYVDDILLAATSELDCQQGTRALLQTLGDLGYRASAKKAQICQKQVKYLGYLLREGQRWLTEARKETVMGQPVPKTPRQLREFLGTAGFCRLWIPGFAEMAAPLYPLTKTGTLFSWGPDQQKAYQEIKQALLTAPALGLPDLTKPFELFVDEKQGYAKGVLTQKLGPWRRPVAYLSKKLDPVAAGWPPCLRMVAAIAVLTKDAGKLTMGQPLVILAPHAVEALVKQPPDRWLSNARMTHYQAMLLDTDRVQFGPVVALNPATLLPLPEEGAPHDCLEILAETHGTRPDLTDQPIPDADHTWYTDGSSFLQEGQRKAGAAVTTETEVIWAGALPAGTSAQRAELIALTQALKMAEGKRLNVYTDSRYAFATAHIHGEIYRRRGLLTSEGREIKNKSEILALLKALFLPKRLSIIHCLGHQKGDSAEARGNRLADQAAREAAIKTPPDTSTLLAGKRTADGSEFEKRTADGSEFESPKKKAKVE

SEQ ID NO: 2183 - protein, 2091 aa, synthetic construct
MPAAKRVKLDGGDKKYSIGLDIGTNSVGWAVITDEYKVPSKKFKVLGNTDRHSIKKNLIGALLFDSGETAEATRLKRTARRRYTRRKNRICYLQEIFSNEMAKVDDSFFHRLEESFLVEEDKKHERHPIFGNIVDEVAYHEKYPTIYHLRKKLVDSTDKADLRLIYLALAHMIKFRGHFLIEGDLNPDNSDVDKLFIQLVQTYNQLFEENPINASGVDAKAILSARLSKSRRLENLIAQLPGEKKNGLFGNLIALSLGLTPNFKSNFDLAEDAKLQLSKDTYDDDLDNLLAQIGDQYADLFLAAKNLSDAILLSDILRVNTEITKAPLSASMIKRYDEHHQDLTLLKALVRQQLPEKYKEIFFDQSKNGYAGYIDGGASQEEFYKFIKPILEKMDGTEELLVKLNREDLLRKQRTFDNGSIPHQIHLGELHAILRRQEDFYPFLKDNREKIEKILTFRIPYYVGPLARGNSRFAWMTRKSEETITPWNFEEVVDKGASAQSFIERMTNFDKNLPNEKVLPKHSLLYEYFTVYNELTKVKYVTEGMRKPAFLSGEQKKAIVDLLFKTNRKVTVKQLKEDYFKKIECFDSVEISGVEDRFNASLGTYHDLLKIIKDKDFLDNEENEDILEDIVLTLTLFEDREMIEERLKTYAHLFDDKVMKQLKRRRYTGWGRLSRKLINGIRDKQSGKTILDFLKSDGFANRNFMQLIHDDSLTFKEDIQKAQVSGQGDSLHEHIANLAGSPAIKKGILQTVKVVDELVKVMGRHKPENIVIEMARENQTTQKGQKNSRERMKRIEEGIKELGSQILKEHPVENTQLQNEKLYLYYLQNGRDMYVDQELDINRLSDYDVDHIVPQSFLKDDSIDNKVLTRSDKARGKSDNVPSEEVVKKMKNYWRQLLNAKLITQRKFDNLTKAERGGLSELDKAGFIKRQLVETRQITKHVAQILDSRMNTKYDENDKLIREVKVITLKSKLVSDFRKDFQFYKVREINNYHHAHDAYLNAVVGTALIKKYPKLESEFVYGDYKVYDVRKMIAKSEQEIGKATAKYFFYSNIMNFFKTEITLANGEIRKRPLIETNGETGEIVWDKGRDFATVRKVLSMPQVNIVKKTEVQTGGFSKESILPKRNSDKLIARKKDWDPKKYGGFDSPTVAYSVLVVAKVEKGKSKKLKSVKELLGITIMERSSFEKNPIDFLEAKGYKEVKKDLIIKLPKYSLFELENGRKRMLASAGELQKGNELALPSKYVNFLYLASHYEKLKGSPEDNEQKQLFVEQHKHYLDEIIEQISEFSKRVILADANLDKVLSAYNKHRDKPIREQAENIIHLFTLTNLGAPAAFKYFDTTIDRKRYTSTKEVLDATLIHQSITGLYETRIDLSQLGGDGGGSSPAPGGTLGIEDEYRLHETSTEPDVSLGSTWLSDFPQAWAETGGMGLAVRQAPLIIPLKATSTPVSIQQYPMSHEARLGIKPHIQRLLDQGILVPCQSPWNTPLLPVKKPGTNDYRPVQDLREVNKRVEDIHPTVPNPYNLLSGLPPSHQWYTVLDLKDAFFCLRLHPTSQPLFAFEWRDPGMGISGQLTWTRLPQGFKNSPTLFDEALHRDLADFRIQHPDLILLQYVDDILLAATSELDCQQGTRALLQTLGDLGYRASAKKAQICQKQVKYLGYLLREGQRWLTEARKETVMGQPVPKTPRQLREFLGTAGFCRLWIPGFAEMAAPLYPLTKTGTLFSWGPDQQKAYQEIKQALLTAPALGLPDLTKPFELFVDEKQGYAKGVLTQKLGPWRRPVAYLSKKLDPVAAGWPPCLRMVAAIAVLTKDAGKLTMGQPLVILAPHAVEALVKQPPDRWLSNARMTHYQAMLLDTDRVQFGPVVALNPATLLPLPEEGAPHDCLEILAETHGTRPDLTDQPIPDADHTWYTDGSSFLQEGQRKAGAAVTTETEVIWAGALPAGTSAQRAELIALTQALKMAEGKRLNVYTDSRYAFATAHIHGEIYRRRGLLTSEGREIKNKSEILALLKALFLPKRLSIIHCLGHQKGDSAEARGNRLADQAAREAAIKTPPDTSTLLAGKRTADGSEFEKRTADGSEFESPKKKAKVE

SEQ ID NO: 2184 - protein, 2096 aa, synthetic construct
MPAAKRVKLDGGDKKYSIGLDIGTNSVGWAVITDEYKVPSKKFKVLGNTDRHSIKKNLIGALLFDSGETAEATRLKRTARRRYTRRKNRICYLQEIFSNEMAKVDDSFFHRLEESFLVEEDKKHERHPIFGNIVDEVAYHEKYPTIYHLRKKLVDSTDKADLRLIYLALAHMIKFRGHFLIEGDLNPDNSDVDKLFIQLVQTYNQLFEENPINASGVDAKAILSARLSKSRRLENLIAQLPGEKKNGLFGNLIALSLGLTPNFKSNFDLAEDAKLQLSKDTYDDDLDNLLAQIGDQYADLFLAAKNLSDAILLSDILRVNTEITKAPLSASMIKRYDEHHQDLTLLKALVRQQLPEKYKEIFFDQSKNGYAGYIDGGASQEEFYKFIKPILEKMDGTEELLVKLNREDLLRKQRTFDNGSIPHQIHLGELHAILRRQEDFYPFLKDNREKIEKILTFRIPYYVGPLARGNSRFAWMTRKSEETITPWNFEEVVDKGASAQSFIERMTNFDKNLPNEKVLPKHSLLYEYFTVYNELTKVKYVTEGMRKPAFLSGEQKKAIVDLLFKTNRKVTVKQLKEDYFKKIECFDSVEISGVEDRFNASLGTYHDLLKIIKDKDFLDNEENEDILEDIVLTLTLFEDREMIEERLKTYAHLFDDKVMKQLKRRRYTGWGRLSRKLINGIRDKQSGKTILDFLKSDGFANRNFMQLIHDDSLTFKEDIQKAQVSGQGDSLHEHIANLAGSPAIKKGILQTVKVVDELVKVMGRHKPENIVIEMARENQTTQKGQKNSRERMKRIEEGIKELGSQILKEHPVENTQLQNEKLYLYYLQNGRDMYVDQELDINRLSDYDVDHIVPQSFLKDDSIDNKVLTRSDKARGKSDNVPSEEVVKKMKNYWRQLLNAKLITQRKFDNLTKAERGGLSELDKAGFIKRQLVETRQITKHVAQILDSRMNTKYDENDKLIREVKVITLKSKLVSDFRKDFQFYKVREINNYHHAHDAYLNAVVGTALIKKYPKLESEFVYGDYKVYDVRKMIAKSEQEIGKATAKYFFYSNIMNFFKTEITLANGEIRKRPLIETNGETGEIVWDKGRDFATVRKVLSMPQVNIVKKTEVQTGGFSKESILPKRNSDKLIARKKDWDPKKYGGFDSPTVAYSVLVVAKVEKGKSKKLKSVKELLGITIMERSSFEKNPIDFLEAKGYKEVKKDLIIKLPKYSLFELENGRKRMLASAGELQKGNELALPSKYVNFLYLASHYEKLKGSPEDNEQKQLFVEQHKHYLDEIIEQISEFSKRVILADANLDKVLSAYNKHRDKPIREQAENIIHLFTLTNLGAPAAFKYFDTTIDRKRYTSTKEVLDATLIHQSITGLYETRIDLSQLGGDGGGGGEAAAKGGSGGTLGIEDEYRLHETSTEPDVSLGSTWLSDFPQAWAETGGMGLAVRQAPLIIPLKATSTPVSIQQYPMSHEARLGIKPHIQRLLDQGILVPCQSPWNTPLLPVKKPGTNDYRPVQDLREVNKRVEDIHPTVPNPYNLLSGLPPSHQWYTVLDLKDAFFCLRLHPTSQPLFAFEWRDPGMGISGQLTWTRLPQGFKNSPTLFDEALHRDLADFRIQHPDLILLQYVDDILLAATSELDCQQGTRALLQTLGDLGYRASAKKAQICQKQVKYLGYLLREGQRWLTEARKETVMGQPVPKTPRQLREFLGTAGFCRLWIPGFAEMAAPLYPLTKTGTLFSWGPDQQKAYQEIKQALLTAPALGLPDLTKPFELFVDEKQGYAKGVLTQKLGPWRRPVAYLSKKLDPVAAGWPPCLRMVAAIAVLTKDAGKLTMGQPLVILAPHAVEALVKQPPDRWLSNARMTHYQAMLLDTDRVQFGPVVALNPATLLPLPEEGAPHDCLEILAETHGTRPDLTDQPIPDADHTWYTDGSSFLQEGQRKAGAAVTTETEVIWAGALPAGTSAQRAELIALTQALKMAEGKRLNVYTDSRYAFATAHIHGEIYRRRGLLTSEGREIKNKSEILALLKALFLPKRLSIIHCLGHQKGDSAEARGNRLADQAAREAAIKTPPDTSTLLAGKRTADGSEFEKRTADGSEFESPKKKAKVE

SEQ ID NO: 2185 - protein, 2096 aa, synthetic construct
MPAAKRVKLDGGDKKYSIGLDIGTNSVGWAVITDEYKVPSKKFKVLGNTDRHSIKKNLIGALLFDSGETAEATRLKRTARRRYTRRKNRICYLQEIFSNEMAKVDDSFFHRLEESFLVEEDKKHERHPIFGNIVDEVAYHEKYPTIYHLRKKLVDSTDKADLRLIYLALAHMIKFRGHFLIEGDLNPDNSDVDKLFIQLVQTYNQLFEENPINASGVDAKAILSARLSKSRRLENLIAQLPGEKKNGLFGNLIALSLGLTPNFKSNFDLAEDAKLQLSKDTYDDDLDNLLAQIGDQYADLFLAAKNLSDAILLSDILRVNTEITKAPLSASMIKRYDEHHQDLTLLKALVRQQLPEKYKEIFFDQSKNGYAGYIDGGASQEEFYKFIKPILEKMDGTEELLVKLNREDLLRKQRTFDNGSIPHQIHLGELHAILRRQEDFYPFLKDNREKIEKILTFRIPYYVGPLARGNSRFAWMTRKSEETITPWNFEEVVDKGASAQSFIERMTNFDKNLPNEKVLPKHSLLYEYFTVYNELTKVKYVTEGMRKPAFLSGEQKKAIVDLLFKTNRKVTVKQLKEDYFKKIECFDSVEISGVEDRFNASLGTYHDLLKIIKDKDFLDNEENEDILEDIVLTLTLFEDREMIEERLKTYAHLFDDKVMKQLKRRRYTGWGRLSRKLINGIRDKQSGKTILDFLKSDGFANRNFMQLIHDDSLTFKEDIQKAQVSGQGDSLHEHIANLAGSPAIKKGILQTVKVVDELVKVMGRHKPENIVIEMARENQTTQKGQKNSRERMKRIEEGIKELGSQILKEHPVENTQLQNEKLYLYYLQNGRDMYVDQELDINRLSDYDVDHIVPQSFLKDDSIDNKVLTRSDKARGKSDNVPSEEVVKKMKNYWRQLLNAKLITQRKFDNLTKAERGGLSELDKAGFIKRQLVETRQITKHVAQILDSRMNTKYDENDKLIREVKVITLKSKLVSDFRKDFQFYKVREINNYHHAHDAYLNAVVGTALIKKYPKLESEFVYGDYKVYDVRKMIAKSEQEIGKATAKYFFYSNIMNFFKTEITLANGEIRKRPLIETNGETGEIVWDKGRDFATVRKVLSMPQVNIVKKTEVQTGGFSKESILPKRNSDKLIARKKDWDPKKYGGFDSPTVAYSVLVVAKVEKGKSKKLKSVKELLGITIMERSSFEKNPIDFLEAKGYKEVKKDLIIKLPKYSLFELENGRKRMLASAGELQKGNELALPSKYVNFLYLASHYEKLKGSPEDNEQKQLFVEQHKHYLDEIIEQISEFSKRVILADANLDKVLSAYNKHRDKPIREQAENIIHLFTLTNLGAPAAFKYFDTTIDRKRYTSTKEVLDATLIHQSITGLYETRIDLSQLGGDGGEAAAKPAPGSSGGTLGIEDEYRLHETSTEPDVSLGSTWLSDFPQAWAETGGMGLAVRQAPLIIPLKATSTPVSIQQYPMSHEARLGIKPHIQRLLDQGILVPCQSPWNTPLLPVKKPGTNDYRPVQDLREVNKRVEDIHPTVPNPYNLLSGLPPSHQWYTVLDLKDAFFCLRLHPTSQPLFAFEWRDPGMGISGQLTWTRLPQGFKNSPTLFDEALHRDLADFRIQHPDLILLQYVDDILLAATSELDCQQGTRALLQTLGDLGYRASAKKAQICQKQVKYLGYLLREGQRWLTEARKETVMGQPVPKTPRQLREFLGTAGFCRLWIPGFAEMAAPLYPLTKTGTLFSWGPDQQKAYQEIKQALLTAPALGLPDLTKPFELFVDEKQGYAKGVLTQKLGPWRRPVAYLSKKLDPVAAGWPPCLRMVAAIAVLTKDAGKLTMGQPLVILAPHAVEALVKQPPDRWLSNARMTHYQAMLLDTDRVQFGPVVALNPATLLPLPEEGAPHDCLEILAETHGTRPDLTDQPIPDADHTWYTDGSSFLQEGQRKAGAAVTTETEVIWAGALPAGTSAQRAELIALTQALKMAEGKRLNVYTDSRYAFATAHIHGEIYRRRGLLTSEGREIKNKSEILALLKALFLPKRLSIIHCLGHQKGDSAEARGNRLADQAAREAAIKTPPDTSTLLAGKRTADGSEFEKRTADGSEFESPKKKAKVE

SEQ ID NO: 2186 - protein, 2096 aa, synthetic construct; identical to SEQ ID NO: 2069

SEQ ID NO: 2187 - protein, 2096 aa, synthetic construct
MPAAKRVKLDGGDKKYSIGLDIGTNSVGWAVITDEYKVPSKKFKVLGNTDRHSIKKNLIGALLFDSGETAEATRLKRTARRRYTRRKNRICYLQEIFSNEMAKVDDSFFHRLEESFLVEEDKKHERHPIFGNIVDEVAYHEKYPTIYHLRKKLVDSTDKADLRLIYLALAHMIKFRGHFLIEGDLNPDNSDVDKLFIQLVQTYNQLFEENPINASGVDAKAILSARLSKSRRLENLIAQLPGEKKNGLFGNLIALSLGLTPNFKSNFDLAEDAKLQLSKDTYDDDLDNLLAQIGDQYADLFLAAKNLSDAILLSDILRVNTEITKAPLSASMIKRYDEHHQDLTLLKALVRQQLPEKYKEIFFDQSKNGYAGYIDGGASQEEFYKFIKPILEKMDGTEELLVKLNREDLLRKQRTFDNGSIPHQIHLGELHAILRRQEDFYPFLKDNREKIEKILTFRIPYYVGPLARGNSRFAWMTRKSEETITPWNFEEVVDKGASAQSFIERMTNFDKNLPNEKVLPKHSLLYEYFTVYNELTKVKYVTEGMRKPAFLSGEQKKAIVDLLFKTNRKVTVKQLKEDYFKKIECFDSVEISGVEDRFNASLGTYHDLLKIIKDKDFLDNEENEDILEDIVLTLTLFEDREMIEERLKTYAHLFDDKVMKQLKRRRYTGWGRLSRKLINGIRDKQSGKTILDFLKSDGFANRNFMQLIHDDSLTFKEDIQKAQVSGQGDSLHEHIANLAGSPAIKKGILQTVKVVDELVKVMGRHKPENIVIEMARENQTTQKGQKNSRERMKRIEEGIKELGSQILKEHPVENTQLQNEKLYLYYLQNGRDMYVDQELDINRLSDYDVDHIVPQSFLKDDSIDNKVLTRSDKARGKSDNVPSEEVVKKMKNYWRQLLNAKLITQRKFDNLTKAERGGLSELDKAGFIKRQLVETRQITKHVAQILDSRMNTKYDENDKLIREVKVITLKSKLVSDFRKDFQFYKVREINNYHHAHDAYLNAVVGTALIKKYPKLESEFVYGDYKVYDVRKMIAKSEQEIGKATAKYFFYSNIMNFFKTEITLANGEIRKRPLIETNGETGEIVWDKGRDFATVRKVLSMPQVNIVKKTEVQTGGFSKESILPKRNSDKLIARKKDWDPKKYGGFDSPTVAYSVLVVAKVEKGKSKKLKSVKELLGITIMERSSFEKNPIDFLEAKGYKEVKKDLIIKLPKYSLFELENGRKRMLASAGELQKGNELALPSKYVNFLYLASHYEKLKGSPEDNEQKQLFVEQHKHYLDEIIEQISEFSKRVILADANLDKVLSAYNKHRDKPIREQAENIIHLFTLTNLGAPAAFKYFDTTIDRKRYTSTKEVLDATLIHQSITGLYETRIDLSQLGGDGGPAPAPAPAPAPGGTLGIEDEYRLHETSTEPDVSLGSTWLSDFPQAWAETGGMGLAVRQAPLIIPLKATSTPVSIQQYPMSHEARLGIKPHIQRLLDQGILVPCQSPWNTPLLPVKKPGTNDYRPVQDLREVNKRVEDIHPTVPNPYNLLSGLPPSHQWYTVLDLKDAFFCLRLHPTSQPLFAFEWRDPGMGISGQLTWTRLPQGFKNSPTLFNEALHRDLADFRIQHPDLILLQYVDDILLAATSELDCQQGTRALLQTLGDLGYRASAKKAQICQKQVKYLGYLLREGQRWLTEARKETVMGQPVPKTPRQLREFLGTAGFCRLWIPGFAEMAAPLYPLTKPGTLFSWGPDQQKAYQEIKQALLTAPALGLPDLTKPFELFVDEKQGYAKGVLTQKLGPWRRPVAYLSKKLDPVAAGWPPCLRMVAAIAVLTKDAGKLTMGQPLVILAPHAVEALVKQPPDRWLSNARMTHYQAMLLDTDRVQFGPVVALNPATLLPLPEEGAPHDCLEILAETHGTRPDLTDQPIPDADHTWYTDGSSFLQEGQRKAGAAVTTETEVIWAGALPAGTSAQRAELIALTQALKMAEGKRLNVYTDSRYAFATAHIHGEIYRRRGWLTSEGREIKNKSEILALLKALFLPKRLSIIHCLGHQKGDSAEARGNRLADQAAREAAIKTPPDTSTLLAGKRTADGSEFEKRTADGSEFESPKKKAKVE

SEQ ID NO: 2188 - protein, 2110 aa, synthetic construct
MPAAKRVKLDGGDKKYSIGLDIGTNSVGWAVITDEYKVPSKKFKVLGNTDRHSIKKNLIGALLFDSGETAEATRLKRTARRRYTRRKNRICYLQEIFSNEMAKVDDSFFHRLEESFLVEEDKKHERHPIFGNIVDEVAYHEKYPTIYHLRKKLVDSTDKADLRLIYLALAHMIKFRGHFLIEGDLNPDNSDVDKLFIQLVQTYNQLFEENPINASGVDAKAILSARLSKSRRLENLIAQLPGEKKNGLFGNLIALSLGLTPNFKSNFDLAEDAKLQLSKDTYDDDLDNLLAQIGDQYADLFLAAKNLSDAILLSDILRVNTEITKAPLSASMIKRYDEHHQDLTLLKALVRQQLPEKYKEIFFDQSKNGYAGYIDGGASQEEFYKFIKPILEKMDGTEELLVKLNREDLLRKQRTFDNGSIPHQIHLGELHAILRRQEDFYPFLKDNREKIEKILTFRIPYYVGPLARGNSRFAWMTRKSEETITPWNFEEVVDKGASAQSFIERMTNFDKNLPNEKVLPKHSLLYEYFTVYNELTKVKYVTEGMRKPAFLSGEQKKAIVDLLFKTNRKVTVKQLKEDYFKKIECFDSVEISGVEDRFNASLGTYHDLLKIIKDKDFLDNEENEDILEDIVLTLTLFEDREMIEERLKTYAHLFDDKVMKQLKRRRYTGWGRLSRKLINGIRDKQSGKTILDFLKSDGFANRNFMQLIHDDSLTFKEDIQKAQVSGQGDSLHEHIANLAGSPAIKKGILQTVKVVDELVKVMGRHKPENIVIEMARENQTTQKGQKNSRERMKRIEEGIKELGSQILKEHPVENTQLQNEKLYLYYLQNGRDMYVDQELDINRLSDYDVDHIVPQSFLKDDSIDNKVLTRSDKARGKSDNVPSEEVVKKMKNYWRQLLNAKLITQRKFDNLTKAERGGLSELDKAGFIKRQLVETRQITKHVAQILDSRMNTKYDENDKLIREVKVITLKSKLVSDFRKDFQFYKVREINNYHHAHDAYLNAVVGTALIKKYPKLESEFVYGDYKVYDVRKMIAKSEQEIGKATAKYFFYSNIMNFFKTEITLANGEIRKRPLIETNGETGEIVWDKGRDFATVRKVLSMPQVNIVKKTEVQTGGFSKESILPKRNSDKLIARKKDWDPKKYGGFDSPTVAYSVLVVAKVEKGKSKKLKSVKELLGITIMERSSFEKNPIDFLEAKGYKEVKKDLIIKLPKYSLFELENGRKRMLASAGELQKGNELALPSKYVNFLYLASHYEKLKGSPEDNEQKQLFVEQHKHYLDEIIEQISEFSKRVILADANLDKVLSAYNKHRDKPIREQAENIIHLFTLTNLGAPAAFKYFDTTIDRKRYTSTKEVLDATLIHQSITGLYETRIDLSQLGGDGGEAAAKEAAAKEAAAKEAAAKEAAAKGGTLGIEDEYRLHETSTEPDVSLGSTWLSDFPQAWAETGGMGLAVRQAPLIIPLKATSTPVSIQQYPMSHEARLGIKPHIQRLLDQGILVPCQSPWNTPLLPVKKPGTNDYRPVQDLREVNKRVEDIHPTVPNPYNLLSGLPPSHQWYTVLDLKDAFFCLRLHPTSQPLFAFEWRDPGMGISGQLTWTRLPQGFKNSPTLFNEALHRDLADFRIQHPDLILLQYVDDILLAATSELDCQQGTRALLQTLGDLGYRASAKKAQICQKQVKYLGYLLREGQRWLTEARKETVMGQPVPKTPRQLREFLGTAGFCRLWIPGFAEMAAPLYPLTKPGTLFSWGPDQQKAYQEIKQALLTAPALGLPDLTKPFELFVDEKQGYAKGVLTQKLGPWRRPVAYLSKKLDPVAAGWPPCLRMVAAIAVLTKDAGKLTMGQPLVILAPHAVEALVKQPPDRWLSNARMTHYQAMLLDTDRVQFGPVVALNPATLLPLPEEGAPHDCLEILAETHGTRPDLTDQPIPDADHTWYTDGSSFLQEGQRKAGAAVTTETEVIWAGALPAGTSAQRAELIALTQALKMAEGKRLNVYTDSRYAFATAHIHGEIYRRRGWLTSEGREIKNKSEILALLKALFLPKRLSIIHCLGHQKGDSAEARGNRLADQAAREAAIKTPPDTSTLLAGKRTADGSEFEKRTADGSEFESPKKKAKVE

SEQ ID NO: 2189 - protein, 2115 aa, synthetic construct
MPAAKRVKLDGGDKKYSIGLDIGTNSVGWAVITDEYKVPSKKFKVLGNTDRHSIKKNLIGALLFDSGETAEATRLKRTARRRYTRRKNRICYLQEIFSNEMAKVDDSFFHRLEESFLVEEDKKHERHPIFGNIVDEVAYHEKYPTIYHLRKKLVDSTDKADLRLIYLALAHMIKFRGHFLIEGDLNPDNSDVDKLFIQLVQTYNQLFEENPINASGVDAKAILSARLSKSRRLENLIAQLPGEKKNGLFGNLIALSLGLTPNFKSNFDLAEDAKLQLSKDTYDDDLDNLLAQIGDQYADLFLAAKNLSDAILLSDILRVNTEITKAPLSASMIKRYDEHHQDLTLLKALVRQQLPEKYKEIFFDQSKNGYAGYIDGGASQEEFYKFIKPILEKMDGTEELLVKLNREDLLRKQRTFDNGSIPHQIHLGELHAILRRQEDFYPFLKDNREKIEKILTFRIPYYVGPLARGNSRFAWMTRKSEETITPWNFEEVVDKGASAQSFIERMTNFDKNLPNEKVLPKHSLLYEYFTVYNELTKVKYVTEGMRKPAFLSGEQKKAIVDLLFKTNRKVTVKQLKEDYFKKIECFDSVEISGVEDRFNASLGTYHDLLKIIKDKDFLDNEENEDILEDIVLTLTLFEDREMIEERLKTYAHLFDDKVMKQLKRRRYTGWGRLSRKLINGIRDKQSGKTILDFLKSDGFANRNFMQLIHDDSLTFKEDIQKAQVSGQGDSLHEHIANLAGSPAIKKGILQTVKVVDELVKVMGRHKPENIVIEMARENQTTQKGQKNSRERMKRIEEGIKELGSQILKEHPVENTQLQNEKLYLYYLQNGRDMYVDQELDINRLSDYDVDHIVPQSFLKDDSIDNKVLTRSDKARGKSDNVPSEEVVKKMKNYWRQLLNAKLITQRKFDNLTKAERGGLSELDKAGFIKRQLVETRQITKHVAQILDSRMNTKYDENDKLIREVKVITLKSKLVSDFRKDFQFYKVREINNYHHAHDAYLNAVVGTALIKKYPKLESEFVYGDYKVYDVRKMIAKSEQEIGKATAKYFFYSNIMNFFKTEITLANGEIRKRPLIETNGETGEIVWDKGRDFATVRKVLSMPQVNIVKKTEVQTGGFSKESILPKRNSDKLIARKKDWDPKKYGGFDSPTVAYSVLVVAKVEKGKSKKLKSVKELLGITIMERSSFEKNPIDFLEAKGYKEVKKDLIIKLPKYSLFELENGRKRMLASAGELQKGNELALPSKYVNFLYLASHYEKLKGSPEDNEQKQLFVEQHKHYLDEIIEQISEFSKRVILADANLDKVLSAYNKHRDKPIREQAENIIHLFTLTNLGAPAAFKYFDTTIDRKRYTSTKEVLDATLIHQSITGLYETRIDLSQLGGDGGEAAAKEAAAKEAAAKEAAAKEAAAKEAAAKGGTLGIEDEYRLHETSTEPDVSLGSTWLSDFPQAWAETGGMGLAVRQAPLIIPLKATSTPVSIQQYPMSHEARLGIKPHIQRLLDQGILVPCQSPWNTPLLPVKKPGTNDYRPVQDLREVNKRVEDIHPTVPNPYNLLSGLPPSHQWYTVLDLKDAFFCLRLHPTSQPLFAFEWRDPGMGISGQLTWTRLPQGFKNSPTLFNEALHRDLADFRIQHPDLILLQYVDDILLAATSELDCQQGTRALLQTLGDLGYRASAKKAQICQKQVKYLGYLLREGQRWLTEARKETVMGQPVPKTPRQLREFLGTAGFCRLWIPGFAEMAAPLYPLTKPGTLFSWGPDQQKAYQEIKQALLTAPALGLPDLTKPFELFVDEKQGYAKGVLTQKLGPWRRPVAYLSKKLDPVAAGWPPCLRMVAAIAVLTKDAGKLTMGQPLVILAPHAVEALVKQPPDRWLSNARMTHYQAMLLDTDRVQFGPVVALNPATLLPLPEEGAPHDCLEILAETHGTRPDLTDQPIPDADHTWYTDGSSFLQEGQRKAGAAVTTETEVIWAGALPAGTSAQRAELIALTQALKMAEGKRLNVYTDSRYAFATAHIHGEIYRRRGWLTSEGREIKNKSEILALLKALFLPKRLSIIHCLGHQKGDSAEARGNRLADQAAREAAIKTPPDTSTLLAGKRTADGSEFEKRTADGSEFESPKKKAKVE

SEQ ID NO: 2190 - protein, 2096 aa, synthetic construct
MPAAKRVKLDGGDKKYSIGLDIGTNSVGWAVITDEYKVPSKKFKVLGNTDRHSIKKNLIGALLFDSGETAEATRLKRTARRRYTRRKNRICYLQEIFSNEMAKVDDSFFHRLEESFLVEEDKKHERHPIFGNIVDEVAYHEKYPTIYHLRKKLVDSTDKADLRLIYLALAHMIKFRGHFLIEGDLNPDNSDVDKLFIQLVQTYNQLFEENPINASGVDAKAILSARLSKSRRLENLIAQLPGEKKNGLFGNLIALSLGLTPNFKSNFDLAEDAKLQLSKDTYDDDLDNLLAQIGDQYADLFLAAKNLSDAILLSDILRVNTEITKAPLSASMIKRYDEHHQDLTLLKALVRQQLPEKYKEIFFDQSKNGYAGYIDGGASQEEFYKFIKPILEKMDGTEELLVKLNREDLLRKQRTFDNGSIPHQIHLGELHAILRRQEDFYPFLKDNREKIEKILTFRIPYYVGPLARGNSRFAWMTRKSEETITPWNFEEVVDKGASAQSFIERMTNFDKNLPNEKVLPKHSLLYEYFTVYNELTKVKYVTEGMRKPAFLSGEQKKAIVDLLFKTNRKVTVKQLKEDYFKKIECFDSVEISGVEDRFNASLGTYHDLLKIIKDKDFLDNEENEDILEDIVLTLTLFEDREMIEERLKTYAHLFDDKVMKQLKRRRYTGWGRLSRKLINGIRDKQSGKTILDFLKSDGFANRNFMQLIHDDSLTFKEDIQKAQVSGQGDSLHEHIANLAGSPAIKKGILQTVKVVDELVKVMGRHKPENIVIEMARENQTTQKGQKNSRERMKRIEEGIKELGSQILKEHPVENTQLQNEKLYLYYLQNGRDMYVDQELDINRLSDYDVDHIVPQSFLKDDSIDNKVLTRSDKARGKSDNVPSEEVVKKMKNYWRQLLNAKLITQRKFDNLTKAERGGLSELDKAGFIKRQLVETRQITKHVAQILDSRMNTKYDENDKLIREVKVITLKSKLVSDFRKDFQFYKVREINNYHHAHDAYLNAVVGTALIKKYPKLESEFVYGDYKVYDVRKMIAKSEQEIGKATAKYFFYSNIMNFFKTEITLANGEIRKRPLIETNGETGEIVWDKGRDFATVRKVLSMPQVNIVKKTEVQTGGFSKESILPKRNSDKLIARKKDWDPKKYGGFDSPTVAYSVLVVAKVEKGKSKKLKSVKELLGITIMERSSFEKNPIDFLEAKGYKEVKKDLIIKLPKYSLFELENGRKRMLASAGELQKGNELALPSKYVNFLYLASHYEKLKGSPEDNEQKQLFVEQHKHYLDEIIEQISEFSKRVILADANLDKVLSAYNKHRDKPIREQAENIIHLFTLTNLGAPAAFKYFDTTIDRKRYTSTKEVLDATLIHQSITGLYETRIDLSQLGGDGGEAAAKGSSGGSGGTLGIEDEYRLHETSTEPDVSLGSTWLSDFPQAWAETGGMGLAVRQAPLIIPLKATSTPVSIQQYPMSHEARLGIKPHIQRLLDQGILVPCQSPWNTPLLPVKKPGTNDYRPVQDLREVNKRVEDIHPTVPNPYNLLSGLPPSHQWYTVLDLKDAFFCLRLHPTSQPLFAFEWRDPGMGISGQLTWTRLPQGFKNSPTLFNEALHRDLADFRIQHPDLILLQYVDDILLAATSELDCQQGTRALLQTLGDLGYRASAKKAQICQKQVKYLGYLLREGQRWLTEARKETVMGQPVPKTPRQLREFLGTAGFCRLWIPGFAEMAAPLYPLTKPGTLFSWGPDQQKAYQEIKQALLTAPALGLPDLTKPFELFVDEKQGYAKGVLTQKLGPWRRPVAYLSKKLDPVAAGWPPCLRMVAAIAVLTKDAGKLTMGQPLVILAPHAVEALVKQPPDRWLSNARMTHYQAMLLDTDRVQFGPVVALNPATLLPLPEEGAPHDCLEILAETHGTRPDLTDQPIPDADHTWYTDGSSFLQEGQRKAGAAVTTETEVIWAGALPAGTSAQRAELIALTQALKMAEGKRLNVYTDSRYAFATAHIHGEIYRRRGWLTSEGREIKNKSEILALLKALFLPKRLSIIHCLGHQKGDSAEARGNRLADQAAREAAIKTPPDTSTLLAGKRTADGSEFEKRTADGSEFESPKKKAKVE

SEQ ID NO: 2191 - protein, 2105 aa, synthetic construct; identical to SEQ ID NO: 2070

SEQ ID NO: 2192 - protein, 2096 aa, synthetic construct
MPAAKRVKLDGGDKKYSIGLDIGTNSVGWAVITDEYKVPSKKFKVLGNTDRHSIKKNLIGALLFDSGETAEATRLKRTARRRYTRRKNRICYLQEIFSNEMAKVDDSFFHRLEESFLVEEDKKHERHPIFGNIVDEVAYHEKYPTIYHLRKKLVDSTDKADLRLIYLALAHMIKFRGHFLIEGDLNPDNSDVDKLFIQLVQTYNQLFEENPINASGVDAKAILSARLSKSRRLENLIAQLPGEKKNGLFGNLIALSLGLTPNFKSNFDLAEDAKLQLSKDTYDDDLDNLLAQIGDQYADLFLAAKNLSDAILLSDILRVNTEITKAPLSASMIKRYDEHHQDLTLLKALVRQQLPEKYKEIFFDQSKNGYAGYIDGGASQEEFYKFIKPILEKMDGTEELLVKLNREDLLRKQRTFDNGSIPHQIHLGELHAILRRQEDFYPFLKDNREKIEKILTFRIPYYVGPLARGNSRFAWMTRKSEETITPWNFEEVVDKGASAQSFIERMTNFDKNLPNEKVLPKHSLLYEYFTVYNELTKVKYVTEGMRKPAFLSGEQKKAIVDLLFKTNRKVTVKQLKEDYFKKIECFDSVEISGVEDRFNASLGTYHDLLKIIKDKDFLDNEENEDILEDIVLTLTLFEDREMIEERLKTYAHLFDDKVMKQLKRRRYTGWGRLSRKLINGIRDKQSGKTILDFLKSDGFANRNFMQLIHDDSLTFKEDIQKAQVSGQGDSLHEHIANLAGSPAIKKGILQTVKVVDELVKVMGRHKPENIVIEMARENQTTQKGQKNSRERMKRIEEGIKELGSQILKEHPVENTQLQNEKLYLYYLQNGRDMYVDQELDINRLSDYDVDHIVPQSFLKDDSIDNKVLTRSDKARGKSDNVPSEEVVKKMKNYWRQLLNAKLITQRKFDNLTKAERGGLSELDKAGFIKRQLVETRQITKHVAQILDSRMNTKYDENDKLIREVKVITLKSKLVSDFRKDFQFYKVREINNYHHAHDAYLNAVVGTALIKKYPKLESEFVYGDYKVYDVRKMIAKSEQEIGKATAKYFFYSNIMNFFKTEITLANGEIRKRPLIETNGETGEIVWDKGRDFATVRKVLSMPQVNIVKKTEVQTGGFSKESILPKRNSDKLIARKKDWDPKKYGGFDSPTVAYSVLVVAKVEKGKSKKLKSVKELLGITIMERSSFEKNPIDFLEAKGYKEVKKDLIIKLPKYSLFELENGRKRMLASAGELQKGNELALPSKYVNFLYLASHYEKLKGSPEDNEQKQLFVEQHKHYLDEIIEQISEFSKRVILADANLDKVLSAYNKHRDKPIREQAENIIHLFTLTNLGAPAAFKYFDTTIDRKRYTSTKEVLDATLIHQSITGLYETRIDLSQLGGDGGGGSPAPEAAAKGGTLGIEDEYRLHETSTEPDVSLGSTWLSDFPQAWAETGGMGLAVRQAPLIIPLKATSTPVSIQQYPMSHEARLGIKPHIQRLLDQGILVPCQSPWNTPLLPVKKPGTNDYRPVQDLREVNKRVEDIHPTVPNPYNLLSGLPPSHQWYTVLDLKDAFFCLRLHPTSQPLFAFEWRDPGMGISGQLTWTRLPQGFKNSPTLFNEALHRDLADFRIQHPDLILLQYVDDILLAATSELDCQQGTRALLQTLGDLGYRASAKKAQICQKQVKYLGYLLREGQRWLTEARKETVMGQPVPKTPRQLREFLGTAGFCRLWIPGFAEMAAPLYPLTKPGTLFSWGPDQQKAYQEIKQALLTAPALGLPDLTKPFELFVDEKQGYAKGVLTQKLGPWRRPVAYLSKKLDPVAAGWPPCLRMVAAIAVLTKDAGKLTMGQPLVILAPHAVEALVKQPPDRWLSNARMTHYQAMLLDTDRVQFGPVVALNPATLLPLPEEGAPHDCLEILAETHGTRPDLTDQPIPDADHTWYTDGSSFLQEGQRKAGAAVTTETEVIWAGALPAGTSAQRAELIALTQALKMAEGKRLNVYTDSRYAFATAHIHGEIYRRRGWLTSEGREIKNKSEILALLKALFLPKRLSIIHCLGHQKGDSAEARGNRLADQAAREAAIKTPPDTSTLLAGKRTADGSEFEKRTADGSEFESPKKKAKVE

SEQ ID NO: 2193 - protein, 2115 aa, synthetic construct
MPAAKRVKLDGGDKKYSIGLDIGTNSVGWAVITDEYKVPSKKFKVLGNTDRHSIKKNLIGALLFDSGETAEATRLKRTARRRYTRRKNRICYLQEIFSNEMAKVDDSFFHRLEESFLVEEDKKHERHPIFGNIVDEVAYHEKYPTIYHLRKKLVDSTDKADLRLIYLALAHMIKFRGHFLIEGDLNPDNSDVDKLFIQLVQTYNQLFEENPINASGVDAKAILSARLSKSRRLENLIAQLPGEKKNGLFGNLIALSLGLTPNFKSNFDLAEDAKLQLSKDTYDDDLDNLLAQIGDQYADLFLAAKNLSDAILLSDILRVNTEITKAPLSASMIKRYDEHHQDLTLLKALVRQQLPEKYKEIFFDQSKNGYAGYIDGGASQEEFYKFIKPILEKMDGTEELLVKLNREDLLRKQRTFDNGSIPHQIHLGELHAILRRQEDFYPFLKDNREKIEKILTFRIPYYVGPLARGNSRFAWMTRKSEETITPWNFEEVVDKGASAQSFIERMTNFDKNLPNEKVLPKHSLLYEYFTVYNELTKVKYVTEGMRKPAFLSGEQKKAIVDLLFKTNRKVTVKQLKEDYFKKIECFDSVEISGVEDRFNASLGTYHDLLKIIKDKDFLDNEENEDILEDIVLTLTLFEDREMIEERLKTYAHLFDDKVMKQLKRRRYTGWGRLSRKLINGIRDKQSGKTILDFLKSDGFANRNFMQLIHDDSLTFKEDIQKAQVSGQGDSLHEHIANLAGSPAIKKGILQTVKVVDELVKVMGRHKPENIVIEMARENQTTQKGQKNSRERMKRIEEGIKELGSQILKEHPVENTQLQNEKLYLYYLQNGRDMYVDQELDINRLSDYDVDHIVPQSFLKDDSIDNKVLTRSDKARGKSDNVPSEEVVKKMKNYWRQLLNAKLITQRKFDNLTKAERGGLSELDKAGFIKRQLVETRQITKHVAQILDSRMNTKYDENDKLIREVKVITLKSKLVSDFRKDFQFYKVREINNYHHAHDAYLNAVVGTALIKKYPKLESEFVYGDYKVYDVRKMIAKSEQEIGKATAKYFFYSNIMNFFKTEITLANGEIRKRPLIETNGETGEIVWDKGRDFATVRKVLSMPQVNIVKKTEVQTGGFSKESILPKRNSDKLIARKKDWDPKKYGGFDSPTVAYSVLVVAKVEKGKSKKLKSVKELLGITIMERSSFEKNPIDFLEAKGYKEVKKDLIIKLPKYSLFELENGRKRMLASAGELQKGNELALPSKYVNFLYLASHYEKLKGSPEDNEQKQLFVEQHKHYLDEIIEQISEFSKRVILADANLDKVLSAYNKHRDKPIREQAENIIHLFTLTNLGAPAAFKYFDTTIDRKRYTSTKEVLDATLIHQSITGLYETRIDLSQLGGDGGGGGGSGGGGSGGGGSGGGGSGGGGSGGGGSGGTLGIEDEYRLHETSTEPDVSLGSTWLSDFPQAWAETGGMGLAVRQAPLIIPLKATSTPVSIQQYPMSHEARLGIKPHIQRLLDQGILVPCQSPWNTPLLPVKKPGTNDYRPVQDLREVNKRVEDIHPTVPNPYNLLSGLPPSHQWYTVLDLKDAFFCLRLHPTSQPLFAFEWRDPGMGISGQLTWTRLPQGFKNSPTLFNEALHRDLADFRIQHPDLILLQYVDDILLAATSELDCQQGTRALLQTLGDLGYRASAKKAQICQKQVKYLGYLLREGQRWLTEARKETVMGQPVPKTPRQLREFLGTAGFCRLWIPGFAEMAAPLYPLTKPGTLFSWGPDQQKAYQEIKQALLTAPALGLPDLTKPFELFVDEKQGYAKGVLTQKLGPWRRPVAYLSKKLDPVAAGWPPCLRMVAAIAVLTKDAGKLTMGQPLVILAPHAVEALVKQPPDRWLSNARMTHYQAMLLDTDRVQFGPVVALNPATLLPLPEEGAPHDCLEILAETHGTRPDLTDQPIPDADHTWYTDGSSFLQEGQRKAGAAVTTETEVIWAGALPAGTSAQRAELIALTQALKMAEGKRLNVYTDSRYAFATAHIHGEIYRRRGWLTSEGREIKNKSEILALLKALFLPKRLSIIHCLGHQKGDSAEARGNRLADQAAREAAIKTPPDTSTLLAGKRTADGSEFEKRTADGSEFESPKKKAKVE

SEQ ID NO: 2194 - protein, 2131 aa, synthetic construct
MPAAKRVKLDGGDKKYSIGLDIGTNSVGWAVITDEYKVPSKKFKVLGNTDRHSIKKNLIGALLFDSGETAEATRLKRTARRRYTRRKNRICYLQEIFSNEMAKVDDSFFHRLEESFLVEEDKKHERHPIFGNIVDEVAYHEKYPTIYHLRKKLVDSTDKADLRLIYLALAHMIKFRGHFLIEGDLNPDNSDVDKLFIQLVQTYNQLFEENPINASGVDAKAILSARLSKSRRLENLIAQLPGEKKNGLFGNLIALSLGLTPNFKSNFDLAEDAKLQLSKDTYDDDLDNLLAQIGDQYADLFLAAKNLSDAILLSDILRVNTEITKAPLSASMIKRYDEHHQDLTLLKALVRQQLPEKYKEIFFDQSKNGYAGYIDGGASQEEFYKFIKPILEKMDGTEELLVKLNREDLLRKQRTFDNGSIPHQIHLGELHAILRRQEDFYPFLKDNREKIEKILTFRIPYYVGPLARGNSRFAWMTRKSEETITPWNFEEVVDKGASAQSFIERMTNFDKNLPNEKVLPKHSLLYEYFTVYNELTKVKYVTEGMRKPAFLSGEQKKAIVDLLFKTNRKVTVKQLKEDYFKKIECFDSVEISGVEDRFNASLGTYHDLLKIIKDKDFLDNEENEDILEDIVLTLTLFEDREMIEERLKTYAHLFDDKVMKQLKRRRYTGWGRLSRKLINGIRDKQSGKTILDFLKSDGFANRNFMQLIHDDSLTFKEDIQKAQVSGQGDSLHEHIANLAGSPAIKKGILQTVKVVDELVKVMGRHKPENIVIEMARENQTTQKGQKNSRERMKRIEEGIKELGSQILKEHPVENTQLQNEKLYLYYLQNGRDMYVDQELDINRLSDYDVDHIVPQSFLKDDSIDNKVLTRSDKARGKSDNVPSEEVVKKMKNYWRQLLNAKLITQRKFDNLTKAERGGLSELDKAGFIKRQLVETRQITKHVAQILDSRMNTKYDENDKLIREVKVITLKSKLVSDFRKDFQFYKVREINNYHHAHDAYLNAVVGTALIKKYPKLESEFVYGDYKVYDVRKMIAKSEQEIGKATAKYFFYSNIMNFFKTEITLANGEIRKRPLIETNGETGEIVWDKGRDFATVRKVLSMPQVNIVKKTEVQTGGFSKESILPKRNSDKLIARKKDWDPKKYGGFDSPTVAYSVLVVAKVEKGKSKKLKSVKELLGITIMERSSFEKNPIDFLEAKGYKEVKKDLIIKLPKYSLFELENGRKRMLASAGELQKGNELALPSKYVNFLYLASHYEKLKGSPEDNEQKQLFVEQHKHYLDEIIEQISEFSKRVILADANLDKVLSAYNKHRDKPIREQAENIIHLFTLTNLGAPAAFKYFDTTIDRKRYTSTKEVLDATLIHQSITGLYETRIDLSQLGGDGGAEAAAKEAAAKEAAAKEAAAKALEAEAAAKEAAAKEAAAKEAAAKAGGTLGIEDEYRLHETSTEPDVSLGSTWLSDFPQAWAETGGMGLAVRQAPLIIPLKATSTPVSIQQYPMSHEARLGIKPHIQRLLDQGILVPCQSPWNTPLLPVKKPGTNDYRPVQDLREVNKRVEDIHPTVPNPYNLLSGLPPSHQWYTVLDLKDAFFCLRLHPTSQPLFAFEWRDPGMGISGQLTWTRLPQGFKNSPTLFNEALHRDLADFRIQHPDLILLQYVDDILLAATSELDCQQGTRALLQTLGDLGYRASAKKAQICQKQVKYLGYLLREGQRWLTEARKETVMGQPVPKTPRQLREFLGTAGFCRLWIPGFAEMAAPLYPLTKPGTLFSWGPDQQKAYQEIKQALLTAPALGLPDLTKPFELFVDEKQGYAKGVLTQKLGPWRRPVAYLSKKLDPVAAGWPPCLRMVAAIAVLTKDAGKLTMGQPLVILAPHAVEALVKQPPDRWLSNARMTHYQAMLLDTDRVQFGPVVALNPATLLPLPEEGAPHDCLEILAETHGTRPDLTDQPIPDADHTWYTDGSSFLQEGQRKAGAAVTTETEVIWAGALPAGTSAQRAELIALTQALKMAEGKRLNVYTDSRYAFATAHIHGEIYRRRGWLTSEGREIKNKSEILALLKALFLPKRLSIIHCLGHQKGDSAEARGNRLADQAAREAAIKTPPDTSTLLAGKRTADGSEFEKRTADGSEFESPKKKAKVE

SEQ ID NO: 2195 - protein, 2096 aa, synthetic construct; identical to SEQ ID NO: 2076

SEQ ID NO: 2196 - protein, 2096 aa, synthetic construct
MPAAKRVKLDGGDKKYSIGLDIGTNSVGWAVITDEYKVPSKKFKVLGNTDRHSIKKNLIGALLFDSGETAEATRLKRTARRRYTRRKNRICYLQEIFSNEMAKVDDSFFHRLEESFLVEEDKKHERHPIFGNIVDEVAYHEKYPTIYHLRKKLVDSTDKADLRLIYLALAHMIKFRGHFLIEGDLNPDNSDVDKLFIQLVQTYNQLFEENPINASGVDAKAILSARLSKSRRLENLIAQLPGEKKNGLFGNLIALSLGLTPNFKSNFDLAEDAKLQLSKDTYDDDLDNLLAQIGDQYADLFLAAKNLSDAILLSDILRVNTEITKAPLSASMIKRYDEHHQDLTLLKALVRQQLPEKYKEIFFDQSKNGYAGYIDGGASQEEFYKFIKPILEKMDGTEELLVKLNREDLLRKQRTFDNGSIPHQIHLGELHAILRRQEDFYPFLKDNREKIEKILTFRIPYYVGPLARGNSRFAWMTRKSEETITPWNFEEVVDKGASAQSFIERMTNFDKNLPNEKVLPKHSLLYEYFTVYNELTKVKYVTEGMRKPAFLSGEQKKAIVDLLFKTNRKVTVKQLKEDYFKKIECFDSVEISGVEDRFNASLGTYHDLLKIIKDKDFLDNEENEDILEDIVLTLTLFEDREMIEERLKTYAHLFDDKVMKQLKRRRYTGWGRLSRKLINGIRDKQSGKTILDFLKSDGFANRNFMQLIHDDSLTFKEDIQKAQVSGQGDSLHEHIANLAGSPAIKKGILQTVKVVDELVKVMGRHKPENIVIEMARENQTTQKGQKNSRERMKRIEEGIKELGSQILKEHPVENTQLQNEKLYLYYLQNGRDMYVDQELDINRLSDYDVDHIVPQSFLKDDSIDNKVLTRSDKARGKSDNVPSEEVVKKMKNYWRQLLNAKLITQRKFDNLTKAERGGLSELDKAGFIKRQLVETRQITKHVAQILDSRMNTKYDENDKLIREVKVITLKSKLVSDFRKDFQFYKVREINNYHHAHDAYLNAVVGTALIKKYPKLESEFVYGDYKVYDVRKMIAKSEQEIGKATAKYFFYSNIMNFFKTEITLANGEIRKRPLIETNGETGEIVWDKGRDFATVRKVLSMPQVNIVKKTEVQTGGFSKESILPKRNSDKLIARKKDWDPKKYGGFDSPTVAYSVLVVAKVEKGKSKKLKSVKELLGITIMERSSFEKNPIDFLEAKGYKEVKKDLIIKLPKYSLFELENGRKRMLASAGELQKGNELALPSKYVNFLYLASHYEKLKGSPEDNEQKQLFVEQHKHYLDEIIEQISEFSKRVILADANLDKVLSAYNKHRDKPIREQAENIIHLFTLTNLGAPAAFKYFDTTIDRKRYTSTKEVLDATLIHQSITGLYETRIDLSQLGGDGGGGGGSSEAAAKGGTLGIEDEYRLHETSTEPDVSLGSTWLSDFPQAWAETGGMGLAVRQAPLIIPLKATSTPVSIQQYPMSHEARLGIKPHIQRLLDQGILVPCQSPWNTPLLPVKKPGTNDYRPVQDLREVNKRVEDIHPTVPNPYNLLSGLPPSHQWYTVLDLKDAFFCLRLHPTSQPLFAFEWRDPGMGISGQLTWTRLPQGFKNSPTLFNEALHRDLADFRIQHPDLILLQYVDDILLAATSELDCQQGTRALLQTLGDLGYRASAKKAQICQKQVKYLGYLLREGQRWLTEARKETVMGQPVPKTPRQLREFLGTAGFCRLWIPGFAEMAAPLYPLTKPGTLFSWGPDQQKAYQEIKQALLTAPALGLPDLTKPFELFVDEKQGYAKGVLTQKLGPWRRPVAYLSKKLDPVAAGWPPCLRMVAAIAVLTKDAGKLTMGQPLVILAPHAVEALVKQPPDRWLSNARMTHYQAMLLDTDRVQFGPVVALNPATLLPLPEEGAPHDCLEILAETHGTRPDLTDQPIPDADHTWYTDGSSFLQEGQRKAGAAVTTETEVIWAGALPAGTSAQRAELIALTQALKMAEGKRLNVYTDSRYAFATAHIHGEIYRRRGWLTSEGREIKNKSEILALLKALFLPKRLSIIHCLGHQKGDSAEARGNRLADQAAREAAIKTPPDTSTLLAGKRTADGSEFEKRTADGSEFESPKKKAKVE

SEQ ID NO: 2197 - protein, 2096 aa, synthetic construct
MPAAKRVKLDGGDKKYSIGLDIGTNSVGWAVITDEYKVPSKKFKVLGNTDRHSIKKNLIGALLFDSGETAEATRLKRTARRRYTRRKNRICYLQEIFSNEMAKVDDSFFHRLEESFLVEEDKKHERHPIFGNIVDEVAYHEKYPTIYHLRKKLVDSTDKADLRLIYLALAHMIKFRGHFLIEGDLNPDNSDVDKLFIQLVQTYNQLFEENPINASGVDAKAILSARLSKSRRLENLIAQLPGEKKNGLFGNLIALSLGLTPNFKSNFDLAEDAKLQLSKDTYDDDLDNLLAQIGDQYADLFLAAKNLSDAILLSDILRVNTEITKAPLSASMIKRYDEHHQDLTLLKALVRQQLPEKYKEIFFDQSKNGYAGYIDGGASQEEFYKFIKPILEKMDGTEELLVKLNREDLLRKQRTFDNGSIPHQIHLGELHAILRRQEDFYPFLKDNREKIEKILTFRIPYYVGPLARGNSRFAWMTRKSEETITPWNFEEVVDKGASAQSFIERMTNFDKNLPNEKVLPKHSLLYEYFTVYNELTKVKYVTEGMRKPAFLSGEQKKAIVDLLFKTNRKVTVKQLKEDYFKKIECFDSVEISGVEDRFNASLGTYHDLLKIIKDKDFLDNEENEDILEDIVLTLTLFEDREMIEERLKTYAHLFDDKVMKQLKRRRYTGWGRLSRKLINGIRDKQSGKTILDFLKSDGFANRNFMQLIHDDSLTFKEDIQKAQVSGQGDSLHEHIANLAGSPAIKKGILQTVKVVDELVKVMGRHKPENIVIEMARENQTTQKGQKNSRERMKRIEEGIKELGSQILKEHPVENTQLQNEKLYLYYLQNGRDMYVDQELDINRLSDYDVDHIVPQSFLKDDSIDNKVLTRSDKARGKSDNVPSEEVVKKMKNYWRQLLNAKLITQRKFDNLTKAERGGLSELDKAGFIKRQLVETRQITKHVAQILDSRMNTKYDENDKLIREVKVITLKSKLVSDFRKDFQFYKVREINNYHHAHDAYLNAVVGTALIKKYPKLESEFVYGDYKVYDVRKMIAKSEQEIGKATAKYFFYSNIMNFFKTEITLANGEIRKRPLIETNGETGEIVWDKGRDFATVRKVLSMPQVNIVKKTEVQTGGFSKESILPKRNSDKLIARKKDWDPKKYGGFDSPTVAYSVLVVAKVEKGKSKKLKSVKELLGITIMERSSFEKNPIDFLEAKGYKEVKKDLIIKLPKYSLFELENGRKRMLASAGELQKGNELALPSKYVNFLYLASHYEKLKGSPEDNEQKQLFVEQHKHYLDEIIEQISEFSKRVILADANLDKVLSAYNKHRDKPIREQAENIIHLFTLTNLGAPAAFKYFDTTIDRKRYTSTKEVLDATLIHQSITGLYETRIDLSQLGGDGGPAPEAAAKGGGGGTLGIEDEYRLHETSTEPDVSLGSTWLSDFPQAWAETGGMGLAVRQAPLIIPLKATSTPVSIQQYPMSHEARLGIKPHIQRLLDQGILVPCQSPWNTPLLPVKKPGTNDYRPVQDLREVNKRVEDIHPTVPNPYNLLSGLPPSHQWYTVLDLKDAFFCLRLHPTSQPLFAFEWRDPGMGISGQLTWTRLPQGFKNSPTLFNEALHRDLADFRIQHPDLILLQYVDDILLAATSELDCQQGTRALLQTLGDLGYRASAKKAQICQKQVKYLGYLLREGQRWLTEARKETVMGQPVPKTPRQLREFLGTAGFCRLWIPGFAEMAAPLYPLTKPGTLFSWGPDQQKAYQEIKQALLTAPALGLPDLTKPFELFVDEKQGYAKGVLTQKLGPWRRPVAYLSKKLDPVAAGWPPCLRMVAAIAVLTKDAGKLTMGQPLVILAPHAVEALVKQPPDRWLSNARMTHYQAMLLDTDRVQFGPVVALNPATLLPLPEEGAPHDCLEILAETHGTRPDLTDQPIPDADHTWYTDGSSFLQEGQRKAGAAVTTETEVIWAGALPAGTSAQRAELIALTQALKMAEGKRLNVYTDSRYAFATAHIHGEIYRRRGWLTSEGREIKNKSEILALLKALFLPKRLSIIHCLGHQKGDSAEARGNRLADQAAREAAIKTPPDTSTLLAGKRTADGSEFEKRTADGSEFESPKKKAKVE

SEQ ID NO: 2198 - protein, 2090 aa, synthetic construct
MPAAKRVKLDGGDKKYSIGLDIGTNSVGWAVITDEYKVPSKKFKVLGNTDRHSIKKNLIGALLFDSGETAEATRLKRTARRRYTRRKNRICYLQEIFSNEMAKVDDSFFHRLEESFLVEEDKKHERHPIFGNIVDEVAYHEKYPTIYHLRKKLVDSTDKADLRLIYLALAHMIKFRGHFLIEGDLNPDNSDVDKLFIQLVQTYNQLFEENPINASGVDAKAILSARLSKSRRLENLIAQLPGEKKNGLFGNLIALSLGLTPNFKSNFDLAEDAKLQLSKDTYDDDLDNLLAQIGDQYADLFLAAKNLSDAILLSDILRVNTEITKAPLSASMIKRYDEHHQDLTLLKALVRQQLPEKYKEIFFDQSKNGYAGYIDGGASQEEFYKFIKPILEKMDGTEELLVKLNREDLLRKQRTFDNGSIPHQIHLGELHAILRRQEDFYPFLKDNREKIEKILTFRIPYYVGPLARGNSRFAWMTRKSEETITPWNFEEVVDKGASAQSFIERMTNFDKNLPNEKVLPKHSLLYEYFTVYNELTKVKYVTEGMRKPAFLSGEQKKAIVDLLFKTNRKVTVKQLKEDYFKKIECFDSVEISGVEDRFNASLGTYHDLLKIIKDKDFLDNEENEDILEDIVLTLTLFEDREMIEERLKTYAHLFDDKVMKQLKRRRYTGWGRLSRKLINGIRDKQSGKTILDFLKSDGFANRNFMQLIHDDSLTFKEDIQKAQVSGQGDSLHEHIANLAGSPAIKKGILQTVKVVDELVKVMGRHKPENIVIEMARENQTTQKGQKNSRERMKRIEEGIKELGSQILKEHPVENTQLQNEKLYLYYLQNGRDMYVDQELDINRLSDYDVDHIVPQSFLKDDSIDNKVLTRSDKARGKSDNVPSEEVVKKMKNYWRQLLNAKLITQRKFDNLTKAERGGLSELDKAGFIKRQLVETRQITKHVAQILDSRMNTKYDENDKLIREVKVITLKSKLVSDFRKDFQFYKVREINNYHHAHDAYLNAVVGTALIKKYPKLESEFVYGDYKVYDVRKMIAKSEQEIGKATAKYFFYSNIMNFFKTEITLANGEIRKRPLIETNGETGEIVWDKGRDFATVRKVLSMPQVNIVKKTEVQTGGFSKESILPKRNSDKLIARKKDWDPKKYGGFDSPTVAYSVLVVAKVEKGKSKKLKSVKELLGITIMERSSFEKNPIDFLEAKGYKEVKKDLIIKLPKYSLFELENGRKRMLASAGELQKGNELALPSKYVNFLYLASHYEKLKGSPEDNEQKQLFVEQHKHYLDEIIEQISEFSKRVILADANLDKVLSAYNKHRDKPIREQAENIIHLFTLTNLGAPAAFKYFDTTIDRKRYTSTKEVLDATLIHQSITGLYETRIDLSQLGGDGGEAAAKGGTLGIEDEYRLHETSTEPDVSLGSTWLSDFPQAWAETGGMGLAVRQAPLIIPLKATSTPVSIQQYPMSHEARLGIKPHIQRLLDQGILVPCQSPWNTPLLPVKKPGTNDYRPVQDLREVNKRVEDIHPTVPNPYNLLSGLPPSHQWYTVLDLKDAFFCLRLHPTSQPLFAFEWRDPGMGISGQLTWTRLPQGFKNSPTLFNEALHRDLADFRIQHPDLILLQYVDDILLAATSELDCQQGTRALLQTLGDLGYRASAKKAQICQKQVKYLGYLLREGQRWLTEARKETVMGQPVPKTPRQLREFLGTAGFCRLWIPGFAEMAAPLYPLTKPGTLFSWGPDQQKAYQEIKQALLTAPALGLPDLTKPFELFVDEKQGYAKGVLTQKLGPWRRPVAYLSKKLDPVAAGWPPCLRMVAAIAVLTKDAGKLTMGQPLVILAPHAVEALVKQPPDRWLSNARMTHYQAMLLDTDRVQFGPVVALNPATLLPLPEEGAPHDCLEILAETHGTRPDLTDQPIPDADHTWYTDGSSFLQEGQRKAGAAVTTETEVIWAGALPAGTSAQRAELIALTQALKMAEGKRLNVYTDSRYAFATAHIHGEIYRRRGWLTSEGREIKNKSEILALLKALFLPKRLSIIHCLGHQKGDSAEARGNRLADQAAREAAIKTPPDTSTLLAGKRTADGSEFEKRTADGSEFESPKKKAKVE

SEQ ID NO: 2199 - protein, 2096 aa, synthetic construct
MPAAKRVKLDGGDKKYSIGLDIGTNSVGWAVITDEYKVPSKKFKVLGNTDRHSIKKNLIGALLFDSGETAEATRLKRTARRRYTRRKNRICYLQEIFSNEMAKVDDSFFHRLEESFLVEEDKKHERHPIFGNIVDEVAYHEKYPTIYHLRKKLVDSTDKADLRLIYLALAHMIKFRGHFLIEGDLNPDNSDVDKLFIQLVQTYNQLFEENPINASGVDAKAILSARLSKSRRLENLIAQLPGEKKNGLFGNLIALSLGLTPNFKSNFDLAEDAKLQLSKDTYDDDLDNLLAQIGDQYADLFLAAKNLSDAILLSDILRVNTEITKAPLSASMIKRYDEHHQDLTLLKALVRQQLPEKYKEIFFDQSKNGYAGYIDGGASQEEFYKFIKPILEKMDGTEELLVKLNREDLLRKQRTFDNGSIPHQIHLGELHAILRRQEDFYPFLKDNREKIEKILTFRIPYYVGPLARGNSRFAWMTRKSEETITPWNFEEVVDKGASAQSFIERMTNFDKNLPNEKVLPKHSLLYEYFTVYNELTKVKYVTEGMRKPAFLSGEQKKAIVDLLFKTNRKVTVKQLKEDYFKKIECFDSVEISGVEDRFNASLGTYHDLLKIIKDKDFLDNEENEDILEDIVLTLTLFEDREMIEERLKTYAHLFDDKVMKQLKRRRYTGWGRLSRKLINGIRDKQSGKTILDFLKSDGFANRNFMQLIHDDSLTFKEDIQKAQVSGQGDSLHEHIANLAGSPAIKKGILQTVKVVDELVKVMGRHKPENIVIEMARENQTTQKGQKNSRERMKRIEEGIKELGSQILKEHPVENTQLQNEKLYLYYLQNGRDMYVDQELDINRLSDYDVDHIVPQSFLKDDSIDNKVLTRSDKARGKSDNVPSEEVVKKMKNYWRQLLNAKLITQRKFDNLTKAERGGLSELDKAGFIKRQLVETRQITKHVAQILDSRMNTKYDENDKLIREVKVITLKSKLVSDFRKDFQFYKVREINNYHHAHDAYLNAVVGTALIKKYPKLESEFVYGDYKVYDVRKMIAKSEQEIGKATAKYFFYSNIMNFFKTEITLANGEIRKRPLIETNGETGEIVWDKGRDFATVRKVLSMPQVNIVKKTEVQTGGFSKESILPKRNSDKLIARKKDWDPKKYGGFDSPTVAYSVLVVAKVEKGKSKKLKSVKELLGITIMERSSFEKNPIDFLEAKGYKEVKKDLIIKLPKYSLFELENGRKRMLASAGELQKGNELALPSKYVNFLYLASHYEKLKGSPEDNEQKQLFVEQHKHYLDEIIEQISEFSKRVILADANLDKVLSAYNKHRDKPIREQAENIIHLFTLTNLGAPAAFKYFDTTIDRKRYTSTKEVLDATLIHQSITGLYETRIDLSQLGGDGGGGSEAAAKGSSGGTLGIEDEYRLHETSTEPDVSLGSTWLSDFPQAWAETGGMGLAVRQAPLIIPLKATSTPVSIQQYPMSHEARLGIKPHIQRLLDQGILVPCQSPWNTPLLPVKKPGTNDYRPVQDLREVNKRVEDIHPTVPNPYNLLSGLPPSHQWYTVLDLKDAFFCLRLHPTSQPLFAFEWRDPGMGISGQLTWTRLPQGFKNSPTLFNEALHRDLADFRIQHPDLILLQYVDDILLAATSELDCQQGTRALLQTLGDLGYRASAKKAQICQKQVKYLGYLLREGQRWLTEARKETVMGQPVPKTPRQLREFLGTAGFCRLWIPGFAEMAAPLYPLTKPGTLFSWGPDQQKAYQEIKQALLTAPALGLPDLTKPFELFVDEKQGYAKGVLTQKLGPWRRPVAYLSKKLDPVAAGWPPCLRMVAAIAVLTKDAGKLTMGQPLVILAPHAVEALVKQPPDRWLSNARMTHYQAMLLDTDRVQFGPVVALNPATLLPLPEEGAPHDCLEILAETHGTRPDLTDQPIPDADHTWYTDGSSFLQEGQRKAGAAVTTETEVIWAGALPAGTSAQRAELIALTQALKMAEGKRLNVYTDSRYAFATAHIHGEIYRRRGWLTSEGREIKNKSEILALLKALFLPKRLSIIHCLGHQKGDSAEARGNRLADQAAREAAIKTPPDTSTLLAGKRTADGSEFEKRTADGSEFESPKKKAKVE

SEQ ID NO: 2200 - protein, 2096 aa, synthetic construct
MPAAKRVKLDGGDKKYSIGLDIGTNSVGWAVITDEYKVPSKKFKVLGNTDRHSIKKNLIGALLFDSGETAEATRLKRTARRRYTRRKNRICYLQEIFSNEMAKVDDSFFHRLEESFLVEEDKKHERHPIFGNIVDEVAYHEKYPTIYHLRKKLVDSTDKADLRLIYLALAHMIKFRGHFLIEGDLNPDNSDVDKLFIQLVQTYNQLFEENPINASGVDAKAILSARLSKSRRLENLIAQLPGEKKNGLFGNLIALSLGLTPNFKSNFDLAEDAKLQLSKDTYDDDLDNLLAQIGDQYADLFLAAKNLSDAILLSDILRVNTEITKAPLSASMIKRYDEHHQDLTLLKALVRQQLPEKYKEIFFDQSKNGYAGYIDGGASQEEFYKFIKPILEKMDGTEELLVKLNREDLLRKQRTFDNGSIPHQIHLGELHAILRRQEDFYPFLKDNREKIEKILTFRIPYYVGPLARGNSRFAWMTRKSEETITPWNFEEVVDKGASAQSFIERMTNFDKNLPNEKVLPKHSLLYEYFTVYNELTKVKYVTEGMRKPAFLSGEQKKAIVDLLFKTNRKVTVKQLKEDYFKKIECFDSVEISGVEDRFNASLGTYHDLLKIIKDKDFLDNEENEDILEDIVLTLTLFEDREMIEERLKTYAHLFDDKVMKQLKRRRYTGWGRLSRKLINGIRDKQSGKTILDFLKSDGFANRNFMQLIHDDSLTFKEDIQKAQVSGQGDSLHEHIANLAGSPAIKKGILQTVKVVDELVKVMGRHKPENIVIEMARENQTTQKGQKNSRERMKRIEEGIKELGSQILKEHPVENTQLQNEKLYLYYLQNGRDMYVDQELDINRLSDYDVDHIVPQSFLKDDSIDNKVLTRSDKARGKSDNVPSEEVVKKMKNYWRQLLNAKLITQRKFDNLTKAERGGLSELDKAGFIKRQLVETRQITKHVAQILDSRMNTKYDENDKLIREVKVITLKSKLVSDFRKDFQFYKVREINNYHHAHDAYLNAVVGTALIKKYPKLESEFVYGDYKVYDVRKMIAKSEQEIGKATAKYFFYSNIMNFFKTEITLANGEIRKRPLIETNGETGEIVWDKGRDFATVRKVLSMPQVNIVKKTEVQTGGFSKESILPKRNSDKLIARKKDWDPKKYGGFDSPTVAYSVLVVAKVEKGKSKKLKSVKELLGITIMERSSFEKNPIDFLEAKGYKEVKKDLIIKLPKYSLFELENGRKRMLASAGELQKGNELALPSKYVNFLYLASHYEKLKGSPEDNEQKQLFVEQHKHYLDEIIEQISEFSKRVILADANLDKVLSAYNKHRDKPIREQAENIIHLFTLTNLGAPAAFKYFDTTIDRKRYTSTKEVLDATLIHQSITGLYETRIDLSQLGGDGGEAAAKGGSGSSGGTLGIEDEYRLHETSTEPDVSLGSTWLSDFPQAWAETGGMGLAVRQAPLIIPLKATSTPVSIQQYPMSHEARLGIKPHIQRLLDQGILVPCQSPWNTPLLPVKKPGTNDYRPVQDLREVNKRVEDIHPTVPNPYNLLSGLPPSHQWYTVLDLKDAFFCLRLHPTSQPLFAFEWRDPGMGISGQLTWTRLPQGFKNSPTLFNEALHRDLADFRIQHPDLILLQYVDDILLAATSELDCQQGTRALLQTLGDLGYRASAKKAQICQKQVKYLGYLLREGQRWLTEARKETVMGQPVPKTPRQLREFLGTAGFCRLWIPGFAEMAAPLYPLTKPGTLFSWGPDQQKAYQEIKQALLTAPALGLPDLTKPFELFVDEKQGYAKGVLTQKLGPWRRPVAYLSKKLDPVAAGWPPCLRMVAAIAVLTKDAGKLTMGQPLVILAPHAVEALVKQPPDRWLSNARMTHYQAMLLDTDRVQFGPVVALNPATLLPLPEEGAPHDCLEILAETHGTRPDLTDQPIPDADHTWYTDGSSFLQEGQRKAGAAVTTETEVIWAGALPAGTSAQRAELIALTQALKMAEGKRLNVYTDSRYAFATAHIHGEIYRRRGWLTSEGREIKNKSEILALLKALFLPKRLSIIHCLGHQKGDSAEARGNRLADQAAREAAIKTPPDTSTLLAGKRTADGSEFEKRTADGSEFESPKKKAKVE

SEQ ID NO: 2201 - protein, 2096 aa, synthetic construct; identical to SEQ ID NO: 2071

SEQ ID NO: 2202 - protein, 2096 aa, synthetic construct; identical to SEQ ID NO: 2075

SEQ ID NO: 2203 - protein, 2091 aa, synthetic construct
MPAAKRVKLDGGDKKYSIGLDIGTNSVGWAVITDEYKVPSKKFKVLGNTDRHSIKKNLIGALLFDSGETAEATRLKRTARRRYTRRKNRICYLQEIFSNEMAKVDDSFFHRLEESFLVEEDKKHERHPIFGNIVDEVAYHEKYPTIYHLRKKLVDSTDKADLRLIYLALAHMIKFRGHFLIEGDLNPDNSDVDKLFIQLVQTYNQLFEENPINASGVDAKAILSARLSKSRRLENLIAQLPGEKKNGLFGNLIALSLGLTPNFKSNFDLAEDAKLQLSKDTYDDDLDNLLAQIGDQYADLFLAAKNLSDAILLSDILRVNTEITKAPLSASMIKRYDEHHQDLTLLKALVRQQLPEKYKEIFFDQSKNGYAGYIDGGASQEEFYKFIKPILEKMDGTEELLVKLNREDLLRKQRTFDNGSIPHQIHLGELHAILRRQEDFYPFLKDNREKIEKILTFRIPYYVGPLARGNSRFAWMTRKSEETITPWNFEEVVDKGASAQSFIERMTNFDKNLPNEKVLPKHSLLYEYFTVYNELTKVKYVTEGMRKPAFLSGEQKKAIVDLLFKTNRKVTVKQLKEDYFKKIECFDSVEISGVEDRFNASLGTYHDLLKIIKDKDFLDNEENEDILEDIVLTLTLFEDREMIEERLKTYAHLFDDKVMKQLKRRRYTGWGRLSRKLINGIRDKQSGKTILDFLKSDGFANRNFMQLIHDDSLTFKEDIQKAQVSGQGDSLHEHIANLAGSPAIKKGILQTVKVVDELVKVMGRHKPENIVIEMARENQTTQKGQKNSRERMKRIEEGIKELGSQILKEHPVENTQLQNEKLYLYYLQNGRDMYVDQELDINRLSDYDVDHIVPQSFLKDDSIDNKVLTRSDKARGKSDNVPSEEVVKKMKNYWRQLLNAKLITQRKFDNLTKAERGGLSELDKAGFIKRQLVETRQITKHVAQILDSRMNTKYDENDKLIREVKVITLKSKLVSDFRKDFQFYKVREINNYHHAHDAYLNAVVGTALIKKYPKLESEFVYGDYKVYDVRKMIAKSEQEIGKATAKYFFYSNIMNFFKTEITLANGEIRKRPLIETNGETGEIVWDKGRDFATVRKVLSMPQVNIVKKTEVQTGGFSKESILPKRNSDKLIARKKDWDPKKYGGFDSPTVAYSVLVVAKVEKGKSKKLKSVKELLGITIMERSSFEKNPIDFLEAKGYKEVKKDLIIKLPKYSLFELENGRKRMLASAGELQKGNELALPSKYVNFLYLASHYEKLKGSPEDNEQKQLFVEQHKHYLDEIIEQISEFSKRVILADANLDKVLSAYNKHRDKPIREQAENIIHLFTLTNLGAPAAFKYFDTTIDRKRYTSTKEVLDATLIHQSITGLYETRIDLSQLGGDGGGSSGGGGGTLGIEDEYRLHETSTEPDVSLGSTWLSDFPQAWAETGGMGLAVRQAPLIIPLKATSTPVSIQQYPMSHEARLGIKPHIQRLLDQGILVPCQSPWNTPLLPVKKPGTNDYRPVQDLREVNKRVEDIHPTVPNPYNLLSGLPPSHQWYTVLDLKDAFFCLRLHPTSQPLFAFEWRDPGMGISGQLTWTRLPQGFKNSPTLFNEALHRDLADFRIQHPDLILLQYVDDILLAATSELDCQQGTRALLQTLGDLGYRASAKKAQICQKQVKYLGYLLREGQRWLTEARKETVMGQPVPKTPRQLREFLGTAGFCRLWIPGFAEMAAPLYPLTKPGTLFSWGPDQQKAYQEIKQALLTAPALGLPDLTKPFELFVDEKQGYAKGVLTQKLGPWRRPVAYLSKKLDPVAAGWPPCLRMVAAIAVLTKDAGKLTMGQPLVILAPHAVEALVKQPPDRWLSNARMTHYQAMLLDTDRVQFGPVVALNPATLLPLPEEGAPHDCLEILAETHGTRPDLTDQPIPDADHTWYTDGSSFLQEGQRKAGAAVTTETEVIWAGALPAGTSAQRAELIALTQALKMAEGKRLNVYTDSRYAFATAHIHGEIYRRRGWLTSEGREIKNKSEILALLKALFLPKRLSIIHCLGHQKGDSAEARGNRLADQAAREAAIKTPPDTSTLLAGKRTADGSEFEKRTADGSEFESPKKKAKVE

SEQ ID NO: 2204 - protein, 2098 aa, synthetic construct
MPAAKRVKLDGGDKKYSIGLDIGTNSVGWAVITDEYKVPSKKFKVLGNTDRHSIKKNLIGALLFDSGETAEATRLKRTARRRYTRRKNRICYLQEIFSNEMAKVDDSFFHRLEESFLVEEDKKHERHPIFGNIVDEVAYHEKYPTIYHLRKKLVDSTDKADLRLIYLALAHMIKFRGHFLIEGDLNPDNSDVDKLFIQLVQTYNQLFEENPINASGVDAKAILSARLSKSRRLENLIAQLPGEKKNGLFGNLIALSLGLTPNFKSNFDLAEDAKLQLSKDTYDDDLDNLLAQIGDQYADLFLAAKNLSDAILLSDILRVNTEITKAPLSASMIKRYDEHHQDLTLLKALVRQQLPEKYKEIFFDQSKNGYAGYIDGGASQEEFYKFIKPILEKMDGTEELLVKLNREDLLRKQRTFDNGSIPHQIHLGELHAILRRQEDFYPFLKDNREKIEKILTFRIPYYVGPLARGNSRFAWMTRKSEETITPWNFEEVVDKGASAQSFIERMTNFDKNLPNEKVLPKHSLLYEYFTVYNELTKVKYVTEGMRKPAFLSGEQKKAIVDLLFKTNRKVTVKQLKEDYFKKIECFDSVEISGVEDRFNASLGTYHDLLKIIKDKDFLDNEENEDILEDIVLTLTLFEDREMIEERLKTYAHLFDDKVMKQLKRRRYTGWGRLSRKLINGIRDKQSGKTILDFLKSDGFANRNFMQLIHDDSLTFKEDIQKAQVSGQGDSLHEHIANLAGSPAIKKGILQTVKVVDELVKVMGRHKPENIVIEMARENQTTQKGQKNSRERMKRIEEGIKELGSQILKEHPVENTQLQNEKLYLYYLQNGRDMYVDQELDINRLSDYDVDHIVPQSFLKDDSIDNKVLTRSDKARGKSDNVPSEEVVKKMKNYWRQLLNAKLITQRKFDNLTKAERGGLSELDKAGFIKRQLVETRQITKHVAQILDSRMNTKYDENDKLIREVKVITLKSKLVSDFRKDFQFYKVREINNYHHAHDAYLNAVVGTALIKKYPKLESEFVYGDYKVYDVRKMIAKSEQEIGKATAKYFFYSNIMNFFKTEITLANGEIRKRPLIETNGETGEIVWDKGRDFATVRKVLSMPQVNIVKKTEVQTGGFSKESILPKRNSDKLIARKKDWDPKKYGGFDSPTVAYSVLVVAKVEKGKSKKLKSVKELLGITIMERSSFEKNPIDFLEAKGYKEVKKDLIIKLPKYSLFELENGRKRMLASAGELQKGNELALPSKYVNFLYLASHYEKLKGSPEDNEQKQLFVEQHKHYLDEIIEQISEFSKRVILADANLDKVLSAYNKHRDKPIREQAENIIHLFTLTNLGAPAAFKYFDTTIDRKRYTSTKEVLDATLIHQSITGLYETRIDLSQLGGDGGPAPAPAPAPAPAPGGTLGIEDEYRLHETSTEPDVSLGSTWLSDFPQAWAETGGMGLAVRQAPLIIPLKATSTPVSIQQYPMSHEARLGIKPHIQRLLDQGILVPCQSPWNTPLLPVKKPGTNDYRPVQDLREVNKRVEDIHPTVPNPYNLLSGLPPSHQWYTVLDLKDAFFCLRLHPTSQPLFAFEWRDPGMGISGQLTWTRLPQGFKNSPTLFNEALHRDLADFRIQHPDLILLQYVDDILLAATSELDCQQGTRALLQTLGDLGYRASAKKAQICQKQVKYLGYLLREGQRWLTEARKETVMGQPVPKTPRQLREFLGTAGFCRLWIPGFAEMAAPLYPLTKPGTLFSWGPDQQKAYQEIKQALLTAPALGLPDLTKPFELFVDEKQGYAKGVLTQKLGPWRRPVAYLSKKLDPVAAGWPPCLRMVAAIAVLTKDAGKLTMGQPLVILAPHAVEALVKQPPDRWLSNARMTHYQAMLLDTDRVQFGPVVALNPATLLPLPEEGAPHDCLEILAETHGTRPDLTDQPIPDADHTWYTDGSSFLQEGQRKAGAAVTTETEVIWAGALPAGTSAQRAELIALTQALKMAEGKRLNVYTDSRYAFATAHIHGEIYRRRGWLTSEGREIKNKSEILALLKALFLPKRLSIIHCLGHQKGDSAEARGNRLADQAAREAAIKTPPDTSTLLAGKRTADGSEFEKRTADGSEFESPKKKAKVE

SEQ ID NO: 2205 - protein, 2094 aa, synthetic construct
MPAAKRVKLDGGDKKYSIGLDIGTNSVGWAVITDEYKVPSKKFKVLGNTDRHSIKKNLIGALLFDSGETAEATRLKRTARRRYTRRKNRICYLQEIFSNEMAKVDDSFFHRLEESFLVEEDKKHERHPIFGNIVDEVAYHEKYPTIYHLRKKLVDSTDKADLRLIYLALAHMIKFRGHFLIEGDLNPDNSDVDKLFIQLVQTYNQLFEENPINASGVDAKAILSARLSKSRRLENLIAQLPGEKKNGLFGNLIALSLGLTPNFKSNFDLAEDAKLQLSKDTYDDDLDNLLAQIGDQYADLFLAAKNLSDAILLSDILRVNTEITKAPLSASMIKRYDEHHQDLTLLKALVRQQLPEKYKEIFFDQSKNGYAGYIDGGASQEEFYKFIKPILEKMDGTEELLVKLNREDLLRKQRTFDNGSIPHQIHLGELHAILRRQEDFYPFLKDNREKIEKILTFRIPYYVGPLARGNSRFAWMTRKSEETITPWNFEEVVDKGASAQSFIERMTNFDKNLPNEKVLPKHSLLYEYFTVYNELTKVKYVTEGMRKPAFLSGEQKKAIVDLLFKTNRKVTVKQLKEDYFKKIECFDSVEISGVEDRFNASLGTYHDLLKIIKDKDFLDNEENEDILEDIVLTLTLFEDREMIEERLKTYAHLFDDKVMKQLKRRRYTGWGRLSRKLINGIRDKQSGKTILDFLKSDGFANRNFMQLIHDDSLTFKEDIQKAQVSGQGDSLHEHIANLAGSPAIKKGILQTVKVVDELVKVMGRHKPENIVIEMARENQTTQKGQKNSRERMKRIEEGIKELGSQILKEHPVENTQLQNEKLYLYYLQNGRDMYVDQELDINRLSDYDVDHIVPQSFLKDDSIDNKVLTRSDKARGKSDNVPSEEVVKKMKNYWRQLLNAKLITQRKFDNLTKAERGGLSELDKAGFIKRQLVETRQITKHVAQILDSRMNTKYDENDKLIREVKVITLKSKLVSDFRKDFQFYKVREINNYHHAHDAYLNAVVGTALIKKYPKLESEFVYGDYKVYDVRKMIAKSEQEIGKATAKYFFYSNIMNFFKTEITLANGEIRKRPLIETNGETGEIVWDKGRDFATVRKVLSMPQVNIVKKTEVQTGGFSKESILPKRNSDKLIARKKDWDPKKYGGFDSPTVAYSVLVVAKVEKGKSKKLKSVKELLGITIMERSSFEKNPIDFLEAKGYKEVKKDLIIKLPKYSLFELENGRKRMLASAGELQKGNELALPSKYVNFLYLASHYEKLKGSPEDNEQKQLFVEQHKHYLDEIIEQISEFSKRVILADANLDKVLSAYNKHRDKPIREQAENIIHLFTLTNLGAPAAFKYFDTTIDRKRYTSTKEVLDATLIHQSITGLYETRIDLSQLGGDGGGGSGSSGGGGGTLGIEDEYRLHETSTEPDVSLGSTWLSDFPQAWAETGGMGLAVRQAPLIIPLKATSTPVSIQQYPMSHEARLGIKPHIQRLLDQGILVPCQSPWNTPLLPVKKPGTNDYRPVQDLREVNKRVEDIHPTVPNPYNLLSGLPPSHQWYTVLDLKDAFFCLRLHPTSQPLFAFEWRDPGMGISGQLTWTRLPQGFKNSPTLFNEALHRDLADFRIQHPDLILLQYVDDILLAATSELDCQQGTRALLQTLGDLGYRASAKKAQICQKQVKYLGYLLREGQRWLTEARKETVMGQPVPKTPRQLREFLGTAGFCRLWIPGFAEMAAPLYPLTKPGTLFSWGPDQQKAYQEIKQALLTAPALGLPDLTKPFELFVDEKQGYAKGVLTQKLGPWRRPVAYLSKKLDPVAAGWPPCLRMVAAIAVLTKDAGKLTMGQPLVILAPHAVEALVKQPPDRWLSNARMTHYQAMLLDTDRVQFGPVVALNPATLLPLPEEGAPHDCLEILAETHGTRPDLTDQPIPDADHTWYTDGSSFLQEGQRKAGAAVTTETEVIWAGALPAGTSAQRAELIALTQALKMAEGKRLNVYTDSRYAFATAHIHGEIYRRRGWLTSEGREIKNKSEILALLKALFLPKRLSIIHCLGHQKGDSAEARGNRLADQAAREAAIKTPPDTSTLLAGKRTADGSEFEKRTADGSEFESPKKKAKVE

SEQ ID NO: 2206 - protein, 2093 aa, synthetic construct
MPAAKRVKLDGGDKKYSIGLDIGTNSVGWAVITDEYKVPSKKFKVLGNTDRHSIKKNLIGALLFDSGETAEATRLKRTARRRYTRRKNRICYLQEIFSNEMAKVDDSFFHRLEESFLVEEDKKHERHPIFGNIVDEVAYHEKYPTIYHLRKKLVDSTDKADLRLIYLALAHMIKFRGHFLIEGDLNPDNSDVDKLFIQLVQTYNQLFEENPINASGVDAKAILSARLSKSRRLENLIAQLPGEKKNGLFGNLIALSLGLTPNFKSNFDLAEDAKLQLSKDTYDDDLDNLLAQIGDQYADLFLAAKNLSDAILLSDILRVNTEITKAPLSASMIKRYDEHHQDLTLLKALVRQQLPEKYKEIFFDQSKNGYAGYIDGGASQEEFYKFIKPILEKMDGTEELLVKLNREDLLRKQRTFDNGSIPHQIHLGELHAILRRQEDFYPFLKDNREKIEKILTFRIPYYVGPLARGNSRFAWMTRKSEETITPWNFEEVVDKGASAQSFIERMTNFDKNLPNEKVLPKHSLLYEYFTVYNELTKVKYVTEGMRKPAFLSGEQKKAIVDLLFKTNRKVTVKQLKEDYFKKIECFDSVEISGVEDRFNASLGTYHDLLKIIKDKDFLDNEENEDILEDIVLTLTLFEDREMIEERLKTYAHLFDDKVMKQLKRRRYTGWGRLSRKLINGIRDKQSGKTILDFLKSDGFANRNFMQLIHDDSLTFKEDIQKAQVSGQGDSLHEHIANLAGSPAIKKGILQTVKVVDELVKVMGRHKPENIVIEMARENQTTQKGQKNSRERMKRIEEGIKELGSQILKEHPVENTQLQNEKLYLYYLQNGRDMYVDQELDINRLSDYDVDHIVPQSFLKDDSIDNKVLTRSDKARGKSDNVPSEEVVKKMKNYWRQLLNAKLITQRKFDNLTKAERGGLSELDKAGFIKRQLVETRQITKHVAQILDSRMNTKYDENDKLIREVKVITLKSKLVSDFRKDFQFYKVREINNYHHAHDAYLNAVVGTALIKKYPKLESEFVYGDYKVYDVRKMIAKSEQEIGKATAKYFFYSNIMNFFKTEITLANGEIRKRPLIETNGETGEIVWDKGRDFATVRKVLSMPQVNIVKKTEVQTGGFSKESILPKRNSDKLIARKKDWDPKKYGGFDSPTVAYSVLVVAKVEKGKSKKLKSVKELLGITIMERSSFEKNPIDFLEAKGYKEVKKDLIIKLPKYSLFELENGRKRMLASAGELQKGNELALPSKYVNFLYLASHYEKLKGSPEDNEQKQLFVEQHKHYLDEIIEQISEFSKRVILADANLDKVLSAYNKHRDKPIREQAENIIHLFTLTNLGAPAAFKYFDTTIDRKRYTSTKEVLDATLIHQSITGLYETRIDLSQLGGDGGPAPEAAAKGGTLGIEDEYRLHETSTEPDVSLGSTWLSDFPQAWAETGGMGLAVRQAPLIIPLKATSTPVSIQQYPMSHEARLGIKPHIQRLLDQGILVPCQSPWNTPLLPVKKPGTNDYRPVQDLREVNKRVEDIHPTVPNPYNLLSGLPPSHQWYTVLDLKDAFFCLRLHPTSQPLFAFEWRDPGMGISGQLTWTRLPQGFKNSPTLFNEALHRDLADFRIQHPDLILLQYVDDILLAATSELDCQQGTRALLQTLGDLGYRASAKKAQICQKQVKYLGYLLREGQRWLTEARKETVMGQPVPKTPRQLREFLGTAGFCRLWIPGFAEMAAPLYPLTKPGTLFSWGPDQQKAYQEIKQALLTAPALGLPDLTKPFELFVDEKQGYAKGVLTQKLGPWRRPVAYLSKKLDPVAAGWPPCLRMVAAIAVLTKDAGKLTMGQPLVILAPHAVEALVKQPPDRWLSNARMTHYQAMLLDTDRVQFGPVVALNPATLLPLPEEGAPHDCLEILAETHGTRPDLTDQPIPDADHTWYTDGSSFLQEGQRKAGAAVTTETEVIWAGALPAGTSAQRAELIALTQALKMAEGKRLNVYTDSRYAFATAHIHGEIYRRRGWLTSEGREIKNKSEILALLKALFLPKRLSIIHCLGHQKGDSAEARGNRLADQAAREAAIKTPPDTSTLLAGKRTADGSEFEKRTADGSEFESPKKKAKVE

SEQ ID NO: 2207 - protein, 2096 aa, synthetic construct; identical to SEQ ID NO: 2074

SEQ ID NO: 2208 - protein, 2093 aa, synthetic construct
MPAAKRVKLDGGDKKYSIGLDIGTNSVGWAVITDEYKVPSKKFKVLGNTDRHSIKKNLIGALLFDSGETAEATRLKRTARRRYTRRKNRICYLQEIFSNEMAKVDDSFFHRLEESFLVEEDKKHERHPIFGNIVDEVAYHEKYPTIYHLRKKLVDSTDKADLRLIYLALAHMIKFRGHFLIEGDLNPDNSDVDKLFIQLVQTYNQLFEENPINASGVDAKAILSARLSKSRRLENLIAQLPGEKKNGLFGNLIALSLGLTPNFKSNFDLAEDAKLQLSKDTYDDDLDNLLAQIGDQYADLFLAAKNLSDAILLSDILRVNTEITKAPLSASMIKRYDEHHQDLTLLKALVRQQLPEKYKEIFFDQSKNGYAGYIDGGASQEEFYKFIKPILEKMDGTEELLVKLNREDLLRKQRTFDNGSIPHQIHLGELHAILRRQEDFYPFLKDNREKIEKILTFRIPYYVGPLARGNSRFAWMTRKSEETITPWNFEEVVDKGASAQSFIERMTNFDKNLPNEKVLPKHSLLYEYFTVYNELTKVKYVTEGMRKPAFLSGEQKKAIVDLLFKTNRKVTVKQLKEDYFKKIECFDSVEISGVEDRFNASLGTYHDLLKIIKDKDFLDNEENEDILEDIVLTLTLFEDREMIEERLKTYAHLFDDKVMKQLKRRRYTGWGRLSRKLINGIRDKQSGKTILDFLKSDGFANRNFMQLIHDDSLTFKEDIQKAQVSGQGDSLHEHIANLAGSPAIKKGILQTVKVVDELVKVMGRHKPENIVIEMARENQTTQKGQKNSRERMKRIEEGIKELGSQILKEHPVENTQLQNEKLYLYYLQNGRDMYVDQELDINRLSDYDVDHIVPQSFLKDDSIDNKVLTRSDKARGKSDNVPSEEVVKKMKNYWRQLLNAKLITQRKFDNLTKAERGGLSELDKAGFIKRQLVETRQITKHVAQILDSRMNTKYDENDKLIREVKVITLKSKLVSDFRKDFQFYKVREINNYHHAHDAYLNAVVGTALIKKYPKLESEFVYGDYKVYDVRKMIAKSEQEIGKATAKYFFYSNIMNFFKTEITLANGEIRKRPLIETNGETGEIVWDKGRDFATVRKVLSMPQVNIVKKTEVQTGGFSKESILPKRNSDKLIARKKDWDPKKYGGFDSPTVAYSVLVVAKVEKGKSKKLKSVKELLGITIMERSSFEKNPIDFLEAKGYKEVKKDLIIKLPKYSLFELENGRKRMLASAGELQKGNELALPSKYVNFLYLASHYEKLKGSPEDNEQKQLFVEQHKHYLDEIIEQISEFSKRVILADANLDKVLSAYNKHRDKPIREQAENIIHLFTLTNLGAPAAFKYFDTTIDRKRYTSTKEVLDATLIHQSITGLYETRIDLSQLGGDGGGGGEAAAKGGTLGIEDEYRLHETSTEPDVSLGSTWLSDFPQAWAETGGMGLAVRQAPLIIPLKATSTPVSIQQYPMSHEARLGIKPHIQRLLDQGILVPCQSPWNTPLLPVKKPGTNDYRPVQDLREVNKRVEDIHPTVPNPYNLLSGLPPSHQWYTVLDLKDAFFCLRLHPTSQPLFAFEWRDPGMGISGQLTWTRLPQGFKNSPTLFNEALHRDLADFRIQHPDLILLQYVDDILLAATSELDCQQGTRALLQTLGDLGYRASAKKAQICQKQVKYLGYLLREGQRWLTEARKETVMGQPVPKTPRQLREFLGTAGFCRLWIPGFAEMAAPLYPLTKPGTLFSWGPDQQKAYQEIKQALLTAPALGLPDLTKPFELFVDEKQGYAKGVLTQKLGPWRRPVAYLSKKLDPVAAGWPPCLRMVAAIAVLTKDAGKLTMGQPLVILAPHAVEALVKQPPDRWLSNARMTHYQAMLLDTDRVQFGPVVALNPATLLPLPEEGAPHDCLEILAETHGTRPDLTDQPIPDADHTWYTDGSSFLQEGQRKAGAAVTTETEVIWAGALPAGTSAQRAELIALTQALKMAEGKRLNVYTDSRYAFATAHIHGEIYRRRGWLTSEGREIKNKSEILALLKALFLPKRLSIIHCLGHQKGDSAEARGNRLADQAAREAAIKTPPDTSTLLAGKRTADGSEFEKRTADGSEFESPKKKAKVE

SEQ ID NO: 2209 - protein, 2096 aa, synthetic construct
MPAAKRVKLDGGDKKYSIGLDIGTNSVGWAVITDEYKVPSKKFKVLGNTDRHSIKKNLIGALLFDSGETAEATRLKRTARRRYTRRKNRICYLQEIFSNEMAKVDDSFFHRLEESFLVEEDKKHERHPIFGNIVDEVAYHEKYPTIYHLRKKLVDSTDKADLRLIYLALAHMIKFRGHFLIEGDLNPDNSDVDKLFIQLVQTYNQLFEENPINASGVDAKAILSARLSKSRRLENLIAQLPGEKKNGLFGNLIALSLGLTPNFKSNFDLAEDAKLQLSKDTYDDDLDNLLAQIGDQYADLFLAAKNLSDAILLSDILRVNTEITKAPLSASMIKRYDEHHQDLTLLKALVRQQLPEKYKEIFFDQSKNGYAGYIDGGASQEEFYKFIKPILEKMDGTEELLVKLNREDLLRKQRTFDNGSIPHQIHLGELHAILRRQEDFYPFLKDNREKIEKILTFRIPYYVGPLARGNSRFAWMTRKSEETITPWNFEEVVDKGASAQSFIERMTNFDKNLPNEKVLPKHSLLYEYFTVYNELTKVKYVTEGMRKPAFLSGEQKKAIVDLLFKTNRKVTVKQLKEDYFKKIECFDSVEISGVEDRFNASLGTYHDLLKIIKDKDFLDNEENEDILEDIVLTLTLFEDREMIEERLKTYAHLFDDKVMKQLKRRRYTGWGRLSRKLINGIRDKQSGKTILDFLKSDGFANRNFMQLIHDDSLTFKEDIQKAQVSGQGDSLHEHIANLAGSPAIKKGILQTVKVVDELVKVMGRHKPENIVIEMARENQTTQKGQKNSRERMKRIEEGIKELGSQILKEHPVENTQLQNEKLYLYYLQNGRDMYVDQELDINRLSDYDVDHIVPQSFLKDDSIDNKVLTRSDKARGKSDNVPSEEVVKKMKNYWRQLLNAKLITQRKFDNLTKAERGGLSELDKAGFIKRQLVETRQITKHVAQILDSRMNTKYDENDKLIREVKVITLKSKLVSDFRKDFQFYKVREINNYHHAHDAYLNAVVGTALIKKYPKLESEFVYGDYKVYDVRKMIAKSEQEIGKATAKYFFYSNIMNFFKTEITLANGEIRKRPLIETNGETGEIVWDKGRDFATVRKVLSMPQVNIVKKTEVQTGGFSKESILPKRNSDKLIARKKDWDPKKYGGFDSPTVAYSVLVVAKVEKGKSKKLKSVKELLGITIMERSSFEKNPIDFLEAKGYKEVKKDLIIKLPKYSLFELENGRKRMLASAGELQKGNELALPSKYVNFLYLASHYEKLKGSPEDNEQKQLFVEQHKHYLDEIIEQISEFSKRVILADANLDKVLSAYNKHRDKPIREQAENIIHLFTLTNLGAPAAFKYFDTTIDRKRYTSTKEVLDATLIHQSITGLYETRIDLSQLGGDGGEAAAKGGGGGSGGTLGIEDEYRLHETSTEPDVSLGSTWLSDFPQAWAETGGMGLAVRQAPLIIPLKATSTPVSIQQYPMSHEARLGIKPHIQRLLDQGILVPCQSPWNTPLLPVKKPGTNDYRPVQDLREVNKRVEDIHPTVPNPYNLLSGLPPSHQWYTVLDLKDAFFCLRLHPTSQPLFAFEWRDPGMGISGQLTWTRLPQGFKNSPTLFNEALHRDLADFRIQHPDLILLQYVDDILLAATSELDCQQGTRALLQTLGDLGYRASAKKAQICQKQVKYLGYLLREGQRWLTEARKETVMGQPVPKTPRQLREFLGTAGFCRLWIPGFAEMAAPLYPLTKPGTLFSWGPDQQKAYQEIKQALLTAPALGLPDLTKPFELFVDEKQGYAKGVLTQKLGPWRRPVAYLSKKLDPVAAGWPPCLRMVAAIAVLTKDAGKLTMGQPLVILAPHAVEALVKQPPDRWLSNARMTHYQAMLLDTDRVQFGPVVALNPATLLPLPEEGAPHDCLEILAETHGTRPDLTDQPIPDADHTWYTDGSSFLQEGQRKAGAAVTTETEVIWAGALPAGTSAQRAELIALTQALKMAEGKRLNVYTDSRYAFATAHIHGEIYRRRGWLTSEGREIKNKSEILALLKALFLPKRLSIIHCLGHQKGDSAEARGNRLADQAAREAAIKTPPDTSTLLAGKRTADGSEFEKRTADGSEFESPKKKAKVE

SEQ ID NO: 2210 - protein, 2110 aa, synthetic construct
MPAAKRVKLDGGDKKYSIGLDIGTNSVGWAVITDEYKVPSKKFKVLGNTDRHSIKKNLIGALLFDSGETAEATRLKRTARRRYTRRKNRICYLQEIFSNEMAKVDDSFFHRLEESFLVEEDKKHERHPIFGNIVDEVAYHEKYPTIYHLRKKLVDSTDKADLRLIYLALAHMIKFRGHFLIEGDLNPDNSDVDKLFIQLVQTYNQLFEENPINASGVDAKAILSARLSKSRRLENLIAQLPGEKKNGLFGNLIALSLGLTPNFKSNFDLAEDAKLQLSKDTYDDDLDNLLAQIGDQYADLFLAAKNLSDAILLSDILRVNTEITKAPLSASMIKRYDEHHQDLTLLKALVRQQLPEKYKEIFFDQSKNGYAGYIDGGASQEEFYKFIKPILEKMDGTEELLVKLNREDLLRKQRTFDNGSIPHQIHLGELHAILRRQEDFYPFLKDNREKIEKILTFRIPYYVGPLARGNSRFAWMTRKSEETITPWNFEEVVDKGASAQSFIERMTNFDKNLPNEKVLPKHSLLYEYFTVYNELTKVKYVTEGMRKPAFLSGEQKKAIVDLLFKTNRKVTVKQLKEDYFKKIECFDSVEISGVEDRFNASLGTYHDLLKIIKDKDFLDNEENEDILEDIVLTLTLFEDREMIEERLKTYAHLFDDKVMKQLKRRRYTGWGRLSRKLINGIRDKQSGKTILDFLKSDGFANRNFMQLIHDDSLTFKEDIQKAQVSGQGDSLHEHIANLAGSPAIKKGILQTVKVVDELVKVMGRHKPENIVIEMARENQTTQKGQKNSRERMKRIEEGIKELGSQILKEHPVENTQLQNEKLYLYYLQNGRDMYVDQELDINRLSDYDVDHIVPQSFLKDDSIDNKVLTRSDKARGKSDNVPSEEVVKKMKNYWRQLLNAKLITQRKFDNLTKAERGGLSELDKAGFIKRQLVETRQITKHVAQILDSRMNTKYDENDKLIREVKVITLKSKLVSDFRKDFQFYKVREINNYHHAHDAYLNAVVGTALIKKYPKLESEFVYGDYKVYDVRKMIAKSEQEIGKATAKYFFYSNIMNFFKTEITLANGEIRKRPLIETNGETGEIVWDKGRDFATVRKVLSMPQVNIVKKTEVQTGGFSKESILPKRNSDKLIARKKDWDPKKYGGFDSPTVAYSVLVVAKVEKGKSKKLKSVKELLGITIMERSSFEKNPIDFLEAKGYKEVKKDLIIKLPKYSLFELENGRKRMLASAGELQKGNELALPSKYVNFLYLASHYEKLKGSPEDNEQKQLFVEQHKHYLDEIIEQISEFSKRVILADANLDKVLSAYNKHRDKPIREQAENIIHLFTLTNLGAPAAFKYFDTTIDRKRYTSTKEVLDATLIHQSITGLYETRIDLSQLGGDGGGGGGSGGGGSGGGGSGGGGSGGGGSGGTLGIEDEYRLHETSTEPDVSLGSTWLSDFPQAWAETGGMGLAVRQAPLIIPLKATSTPVSIQQYPMSHEARLGIKPHIQRLLDQGILVPCQSPWNTPLLPVKKPGTNDYRPVQDLREVNKRVEDIHPTVPNPYNLLSGLPPSHQWYTVLDLKDAFFCLRLHPTSQPLFAFEWRDPGMGISGQLTWTRLPQGFKNSPTLFNEALHRDLADFRIQHPDLILLQYVDDILLAATSELDCQQGTRALLQTLGDLGYRASAKKAQICQKQVKYLGYLLREGQRWLTEARKETVMGQPVPKTPRQLREFLGTAGFCRLWIPGFAEMAAPLYPLTKPGTLFSWGPDQQKAYQEIKQALLTAPALGLPDLTKPFELFVDEKQGYAKGVLTQKLGPWRRPVAYLSKKLDPVAAGWPPCLRMVAAIAVLTKDAGKLTMGQPLVILAPHAVEALVKQPPDRWLSNARMTHYQAMLLDTDRVQFGPVVALNPATLLPLPEEGAPHDCLEILAETHGTRPDLTDQPIPDADHTWYTDGSSFLQEGQRKAGAAVTTETEVIWAGALPAGTSAQRAELIALTQALKMAEGKRLNVYTDSRYAFATAHIHGEIYRRRGWLTSEGREIKNKSEILALLKALFLPKRLSIIHCLGHQKGDSAEARGNRLADQAAREAAIKTPPDTSTLLAGKRTADGSEFEKRTADGSEFESPKKKAKVE

SEQ ID NO: 2211 - protein, 2096 aa, synthetic construct
MPAAKRVKLDGGDKKYSIGLDIGTNSVGWAVITDEYKVPSKKFKVLGNTDRHSIKKNLIGALLFDSGETAEATRLKRTARRRYTRRKNRICYLQEIFSNEMAKVDDSFFHRLEESFLVEEDKKHERHPIFGNIVDEVAYHEKYPTIYHLRKKLVDSTDKADLRLIYLALAHMIKFRGHFLIEGDLNPDNSDVDKLFIQLVQTYNQLFEENPINASGVDAKAILSARLSKSRRLENLIAQLPGEKKNGLFGNLIALSLGLTPNFKSNFDLAEDAKLQLSKDTYDDDLDNLLAQIGDQYADLFLAAKNLSDAILLSDILRVNTEITKAPLSASMIKRYDEHHQDLTLLKALVRQQLPEKYKEIFFDQSKNGYAGYIDGGASQEEFYKFIKPILEKMDGTEELLVKLNREDLLRKQRTFDNGSIPHQIHLGELHAILRRQEDFYPFLKDNREKIEKILTFRIPYYVGPLARGNSRFAWMTRKSEETITPWNFEEVVDKGASAQSFIERMTNFDKNLPNEKVLPKHSLLYEYFTVYNELTKVKYVTEGMRKPAFLSGEQKKAIVDLLFKTNRKVTVKQLKEDYFKKIECFDSVEISGVEDRFNASLGTYHDLLKIIKDKDFLDNEENEDILEDIVLTLTLFEDREMIEERLKTYAHLFDDKVMKQLKRRRYTGWGRLSRKLINGIRDKQSGKTILDFLKSDGFANRNFMQLIHDDSLTFKEDIQKAQVSGQGDSLHEHIANLAGSPAIKKGILQTVKVVDELVKVMGRHKPENIVIEMARENQTTQKGQKNSRERMKRIEEGIKELGSQILKEHPVENTQLQNEKLYLYYLQNGRDMYVDQELDINRLSDYDVDHIVPQSFLKDDSIDNKVLTRSDKARGKSDNVPSEEVVKKMKNYWRQLLNAKLITQRKFDNLTKAERGGLSELDKAGFIKRQLVETRQITKHVAQILDSRMNTKYDENDKLIREVKVITLKSKLVSDFRKDFQFYKVREINNYHHAHDAYLNAVVGTALIKKYPKLESEFVYGDYKVYDVRKMIAKSEQEIGKATAKYFFYSNIMNFFKTEITLANGEIRKRPLIETNGETGEIVWDKGRDFATVRKVLSMPQVNIVKKTEVQTGGFSKESILPKRNSDKLIARKKDWDPKKYGGFDSPTVAYSVLVVAKVEKGKSKKLKSVKELLGITIMERSSFEKNPIDFLEAKGYKEVKKDLIIKLPKYSLFELENGRKRMLASAGELQKGNELALPSKYVNFLYLASHYEKLKGSPEDNEQKQLFVEQHKHYLDEIIEQISEFSKRVILADANLDKVLSAYNKHRDKPIREQAENIIHLFTLTNLGAPAAFKYFDTTIDRKRYTSTKEVLDATLIHQSITGLYETRIDLSQLGGDGGEAAAKGSSPAPGGTLGIEDEYRLHETSTEPDVSLGSTWLSDFPQAWAETGGMGLAVRQAPLIIPLKATSTPVSIQQYPMSHEARLGIKPHIQRLLDQGILVPCQSPWNTPLLPVKKPGTNDYRPVQDLREVNKRVEDIHPTVPNPYNLLSGLPPSHQWYTVLDLKDAFFCLRLHPTSQPLFAFEWRDPGMGISGQLTWTRLPQGFKNSPTLFNEALHRDLADFRIQHPDLILLQYVDDILLAATSELDCQQGTRALLQTLGDLGYRASAKKAQICQKQVKYLGYLLREGQRWLTEARKETVMGQPVPKTPRQLREFLGTAGFCRLWIPGFAEMAAPLYPLTKPGTLFSWGPDQQKAYQEIKQALLTAPALGLPDLTKPFELFVDEKQGYAKGVLTQKLGPWRRPVAYLSKKLDPVAAGWPPCLRMVAAIAVLTKDAGKLTMGQPLVILAPHAVEALVKQPPDRWLSNARMTHYQAMLLDTDRVQFGPVVALNPATLLPLPEEGAPHDCLEILAETHGTRPDLTDQPIPDADHTWYTDGSSFLQEGQRKAGAAVTTETEVIWAGALPAGTSAQRAELIALTQALKMAEGKRLNVYTDSRYAFATAHIHGEIYRRRGWLTSEGREIKNKSEILALLKALFLPKRLSIIHCLGHQKGDSAEARGNRLADQAAREAAIKTPPDTSTLLAGKRTADGSEFEKRTADGSEFESPKKKAKVE

SEQ ID NO: 2212 - protein, 2094 aa, synthetic construct; identical to SEQ ID NO: 2079

SEQ ID NO: 2213 - protein, 2096 aa, synthetic construct
MPAAKRVKLDGGDKKYSIGLDIGTNSVGWAVITDEYKVPSKKFKVLGNTDRHSIKKNLIGALLFDSGETAEATRLKRTARRRYTRRKNRICYLQEIFSNEMAKVDDSFFHRLEESFLVEEDKKHERHPIFGNIVDEVAYHEKYPTIYHLRKKLVDSTDKADLRLIYLALAHMIKFRGHFLIEGDLNPDNSDVDKLFIQLVQTYNQLFEENPINASGVDAKAILSARLSKSRRLENLIAQLPGEKKNGLFGNLIALSLGLTPNFKSNFDLAEDAKLQLSKDTYDDDLDNLLAQIGDQYADLFLAAKNLSDAILLSDILRVNTEITKAPLSASMIKRYDEHHQDLTLLKALVRQQLPEKYKEIFFDQSKNGYAGYIDGGASQEEFYKFIKPILEKMDGTEELLVKLNREDLLRKQRTFDNGSIPHQIHLGELHAILRRQEDFYPFLKDNREKIEKILTFRIPYYVGPLARGNSRFAWMTRKSEETITPWNFEEVVDKGASAQSFIERMTNFDKNLPNEKVLPKHSLLYEYFTVYNELTKVKYVTEGMRKPAFLSGEQKKAIVDLLFKTNRKVTVKQLKEDYFKKIECFDSVEISGVEDRFNASLGTYHDLLKIIKDKDFLDNEENEDILEDIVLTLTLFEDREMIEERLKTYAHLFDDKVMKQLKRRRYTGWGRLSRKLINGIRDKQSGKTILDFLKSDGFANRNFMQLIHDDSLTFKEDIQKAQVSGQGDSLHEHIANLAGSPAIKKGILQTVKVVDELVKVMGRHKPENIVIEMARENQTTQKGQKNSRERMKRIEEGIKELGSQILKEHPVENTQLQNEKLYLYYLQNGRDMYVDQELDINRLSDYDVDHIVPQSFLKDDSIDNKVLTRSDKARGKSDNVPSEEVVKKMKNYWRQLLNAKLITQRKFDNLTKAERGGLSELDKAGFIKRQLVETRQITKHVAQILDSRMNTKYDENDKLIREVKVITLKSKLVSDFRKDFQFYKVREINNYHHAHDAYLNAVVGTALIKKYPKLESEFVYGDYKVYDVRKMIAKSEQEIGKATAKYFFYSNIMNFFKTEITLANGEIRKRPLIETNGETGEIVWDKGRDFATVRKVLSMPQVNIVKKTEVQTGGFSKESILPKRNSDKLIARKKDWDPKKYGGFDSPTVAYSVLVVAKVEKGKSKKLKSVKELLGITIMERSSFEKNPIDFLEAKGYKEVKKDLIIKLPKYSLFELENGRKRMLASAGELQKGNELALPSKYVNFLYLASHYEKLKGSPEDNEQKQLFVEQHKHYLDEIIEQISEFSKRVILADANLDKVLSAYNKHRDKPIREQAENIIHLFTLTNLGAPAAFKYFDTTIDRKRYTSTKEVLDATLIHQSITGLYETRIDLSQLGGDGGEAAAKPAPGSSGGTLGIEDEYRLHETSTEPDVSLGSTWLSDFPQAWAETGGMGLAVRQAPLIIPLKATSTPVSIQQYPMSHEARLGIKPHIQRLLDQGILVPCQSPWNTPLLPVKKPGTNDYRPVQDLREVNKRVEDIHPTVPNPYNLLSGLPPSHQWYTVLDLKDAFFCLRLHPTSQPLFAFEWRDPGMGISGQLTWTRLPQGFKNSPTLFNEALHRDLADFRIQHPDLILLQYVDDILLAATSELDCQQGTRALLQTLGDLGYRASAKKAQICQKQVKYLGYLLREGQRWLTEARKETVMGQPVPKTPRQLREFLGTAGFCRLWIPGFAEMAAPLYPLTKPGTLFSWGPDQQKAYQEIKQALLTAPALGLPDLTKPFELFVDEKQGYAKGVLTQKLGPWRRPVAYLSKKLDPVAAGWPPCLRMVAAIAVLTKDAGKLTMGQPLVILAPHAVEALVKQPPDRWLSNARMTHYQAMLLDTDRVQFGPVVALNPATLLPLPEEGAPHDCLEILAETHGTRPDLTDQPIPDADHTWYTDGSSFLQEGQRKAGAAVTTETEVIWAGALPAGTSAQRAELIALTQALKMAEGKRLNVYTDSRYAFATAHIHGEIYRRRGWLTSEGREIKNKSEILALLKALFLPKRLSIIHCLGHQKGDSAEARGNRLADQAAREAAIKTPPDTSTLLAGKRTADGSEFEKRTADGSEFESPKKKAKVE

SEQ ID NO: 2214 - protein, 2096 aa, synthetic construct
MPAAKRVKLDGGDKKYSIGLDIGTNSVGWAVITDEYKVPSKKFKVLGNTDRHSIKKNLIGALLFDSGETAEATRLKRTARRRYTRRKNRICYLQEIFSNEMAKVDDSFFHRLEESFLVEEDKKHERHPIFGNIVDEVAYHEKYPTIYHLRKKLVDSTDKADLRLIYLALAHMIKFRGHFLIEGDLNPDNSDVDKLFIQLVQTYNQLFEENPINASGVDAKAILSARLSKSRRLENLIAQLPGEKKNGLFGNLIALSLGLTPNFKSNFDLAEDAKLQLSKDTYDDDLDNLLAQIGDQYADLFLAAKNLSDAILLSDILRVNTEITKAPLSASMIKRYDEHHQDLTLLKALVRQQLPEKYKEIFFDQSKNGYAGYIDGGASQEEFYKFIKPILEKMDGTEELLVKLNREDLLRKQRTFDNGSIPHQIHLGELHAILRRQEDFYPFLKDNREKIEKILTFRIPYYVGPLARGNSRFAWMTRKSEETITPWNFEEVVDKGASAQSFIERMTNFDKNLPNEKVLPKHSLLYEYFTVYNELTKVKYVTEGMRKPAFLSGEQKKAIVDLLFKTNRKVTVKQLKEDYFKKIECFDSVEISGVEDRFNASLGTYHDLLKIIKDKDFLDNEENEDILEDIVLTLTLFEDREMIEERLKTYAHLFDDKVMKQLKRRRYTGWGRLSRKLINGIRDKQSGKTILDFLKSDGFANRNFMQLIHDDSLTFKEDIQKAQVSGQGDSLHEHIANLAGSPAIKKGILQTVKVVDELVKVMGRHKPENIVIEMARENQTTQKGQKNSRERMKRIEEGIKELGSQILKEHPVENTQLQNEKLYLYYLQNGRDMYVDQELDINRLSDYDVDHIVPQSFLKDDSIDNKVLTRSDKARGKSDNVPSEEVVKKMKNYWRQLLNAKLITQRKFDNLTKAERGGLSELDKAGFIKRQLVETRQITKHVAQILDSRMNTKYDENDKLIREVKVITLKSKLVSDFRKDFQFYKVREINNYHHAHDAYLNAVVGTALIKKYPKLESEFVYGDYKVYDVRKMIAKSEQEIGKATAKYFFYSNIMNFFKTEITLANGEIRKRPLIETNGETGEIVWDKGRDFATVRKVLSMPQVNIVKKTEVQTGGFSKESILPKRNSDKLIARKKDWDPKKYGGFDSPTVAYSVLVVAKVEKGKSKKLKSVKELLGITIMERSSFEKNPIDFLEAKGYKEVKKDLIIKLPKYSLFELENGRKRMLASAGELQKGNELALPSKYVNFLYLASHYEKLKGSPEDNEQKQLFVEQHKHYLDEIIEQISEFSKRVILADANLDKVLSAYNKHRDKPIREQAENIIHLFTLTNLGAPAAFKYFDTTIDRKRYTSTKEVLDATLIHQSITGLYETRIDLSQLGGDGGGSSGGGEAAAKGGTLGIEDEYRLHETSTEPDVSLGSTWLSDFPQAWAETGGMGLAVRQAPLIIPLKATSTPVSIQQYPMSHEARLGIKPHIQRLLDQGILVPCQSPWNTPLLPVKKPGTNDYRPVQDLREVNKRVEDIHPTVPNPYNLLSGLPPSHQWYTVLDLKDAFFCLRLHPTSQPLFAFEWRDPGMGISGQLTWTRLPQGFKNSPTLFNEALHRDLADFRIQHPDLILLQYVDDILLAATSELDCQQGTRALLQTLGDLGYRASAKKAQICQKQVKYLGYLLREGQRWLTEARKETVMGQPVPKTPRQLREFLGTAGFCRLWIPGFAEMAAPLYPLTKPGTLFSWGPDQQKAYQEIKQALLTAPALGLPDLTKPFELFVDEKQGYAKGVLTQKLGPWRRPVAYLSKKLDPVAAGWPPCLRMVAAIAVLTKDAGKLTMGQPLVILAPHAVEALVKQPPDRWLSNARMTHYQAMLLDTDRVQFGPVVALNPATLLPLPEEGAPHDCLEILAETHGTRPDLTDQPIPDADHTWYTDGSSFLQEGQRKAGAAVTTETEVIWAGALPAGTSAQRAELIALTQALKMAEGKRLNVYTDSRYAFATAHIHGEIYRRRGWLTSEGREIKNKSEILALLKALFLPKRLSIIHCLGHQKGDSAEARGNRLADQAAREAAIKTPPDTSTLLAGKRTADGSEFEKRTADGSEFESPKKKAKVE

SEQ ID NO: 2215 - protein, 2096 aa, synthetic construct
MPAAKRVKLDGGDKKYSIGLDIGTNSVGWAVITDEYKVPSKKFKVLGNTDRHSIKKNLIGALLFDSGETAEATRLKRTARRRYTRRKNRICYLQEIFSNEMAKVDDSFFHRLEESFLVEEDKKHERHPIFGNIVDEVAYHEKYPTIYHLRKKLVDSTDKADLRLIYLALAHMIKFRGHFLIEGDLNPDNSDVDKLFIQLVQTYNQLFEENPINASGVDAKAILSARLSKSRRLENLIAQLPGEKKNGLFGNLIALSLGLTPNFKSNFDLAEDAKLQLSKDTYDDDLDNLLAQIGDQYADLFLAAKNLSDAILLSDILRVNTEITKAPLSASMIKRYDEHHQDLTLLKALVRQQLPEKYKEIFFDQSKNGYAGYIDGGASQEEFYKFIKPILEKMDGTEELLVKLNREDLLRKQRTFDNGSIPHQIHLGELHAILRRQEDFYPFLKDNREKIEKILTFRIPYYVGPLARGNSRFAWMTRKSEETITPWNFEEVVDKGASAQSFIERMTNFDKNLPNEKVLPKHSLLYEYFTVYNELTKVKYVTEGMRKPAFLSGEQKKAIVDLLFKTNRKVTVKQLKEDYFKKIECFDSVEISGVEDRFNASLGTYHDLLKIIKDKDFLDNEENEDILEDIVLTLTLFEDREMIEERLKTYAHLFDDKVMKQLKRRRYTGWGRLSRKLINGIRDKQSGKTILDFLKSDGFANRNFMQLIHDDSLTFKEDIQKAQVSGQGDSLHEHIANLAGSPAIKKGILQTVKVVDELVKVMGRHKPENIVIEMARENQTTQKGQKNSRERMKRIEEGIKELGSQILKEHPVENTQLQNEKLYLYYLQNGRDMYVDQELDINRLSDYDVDHIVPQSFLKDDSIDNKVLTRSDKARGKSDNVPSEEVVKKMKNYWRQLLNAKLITQRKFDNLTKAERGGLSELDKAGFIKRQLVETRQITKHVAQILDSRMNTKYDENDKLIREVKVITLKSKLVSDFRKDFQFYKVREINNYHHAHDAYLNAVVGTALIKKYPKLESEFVYGDYKVYDVRKMIAKSEQEIGKATAKYFFYSNIMNFFKTEITLANGEIRKRPLIETNGETGEIVWDKGRDFATVRKVLSMPQVNIVKKTEVQTGGFSKESILPKRNSDKLIARKKDWDPKKYGGFDSPTVAYSVLVVAKVEKGKSKKLKSVKELLGITIMERSSFEKNPIDFLEAKGYKEVKKDLIIKLPKYSLFELENGRKRMLASAGELQKGNELALPSKYVNFLYLASHYEKLKGSPEDNEQKQLFVEQHKHYLDEIIEQISEFSKRVILADANLDKVLSAYNKHRDKPIREQAENIIHLFTLTNLGAPAAFKYFDTTIDRKRYTSTKEVLDATLIHQSITGLYETRIDLSQLGGDGGGSSEAAAKPAPGGTLGIEDEYRLHETSTEPDVSLGSTWLSDFPQAWAETGGMGLAVRQAPLIIPLKATSTPVSIQQYPMSHEARLGIKPHIQRLLDQGILVPCQSPWNTPLLPVKKPGTNDYRPVQDLREVNKRVEDIHPTVPNPYNLLSGLPPSHQWYTVLDLKDAFFCLRLHPTSQPLFAFEWRDPGMGISGQLTWTRLPQGFKNSPTLFNEALHRDLADFRIQHPDLILLQYVDDILLAATSELDCQQGTRALLQTLGDLGYRASAKKAQICQKQVKYLGYLLREGQRWLTEARKETVMGQPVPKTPRQLREFLGTAGFCRLWIPGFAEMAAPLYPLTKPGTLFSWGPDQQKAYQEIKQALLTAPALGLPDLTKPFELFVDEKQGYAKGVLTQKLGPWRRPVAYLSKKLDPVAAGWPPCLRMVAAIAVLTKDAGKLTMGQPLVILAPHAVEALVKQPPDRWLSNARMTHYQAMLLDTDRVQFGPVVALNPATLLPLPEEGAPHDCLEILAETHGTRPDLTDQPIPDADHTWYTDGSSFLQEGQRKAGAAVTTETEVIWAGALPAGTSAQRAELIALTQALKMAEGKRLNVYTDSRYAFATAHIHGEIYRRRGWLTSEGREIKNKSEILALLKALFLPKRLSIIHCLGHQKGDSAEARGNRLADQAAREAAIKTPPDTSTLLAGKRTADGSEFEKRTADGSEFESPKKKAKVE

SEQ ID NO: 2216 - protein, 2091 aa, synthetic construct
MPAAKRVKLDGGDKKYSIGLDIGTNSVGWAVITDEYKVPSKKFKVLGNTDRHSIKKNLIGALLFDSGETAEATRLKRTARRRYTRRKNRICYLQEIFSNEMAKVDDSFFHRLEESFLVEEDKKHERHPIFGNIVDEVAYHEKYPTIYHLRKKLVDSTDKADLRLIYLALAHMIKFRGHFLIEGDLNPDNSDVDKLFIQLVQTYNQLFEENPINASGVDAKAILSARLSKSRRLENLIAQLPGEKKNGLFGNLIALSLGLTPNFKSNFDLAEDAKLQLSKDTYDDDLDNLLAQIGDQYADLFLAAKNLSDAILLSDILRVNTEITKAPLSASMIKRYDEHHQDLTLLKALVRQQLPEKYKEIFFDQSKNGYAGYIDGGASQEEFYKFIKPILEKMDGTEELLVKLNREDLLRKQRTFDNGSIPHQIHLGELHAILRRQEDFYPFLKDNREKIEKILTFRIPYYVGPLARGNSRFAWMTRKSEETITPWNFEEVVDKGASAQSFIERMTNFDKNLPNEKVLPKHSLLYEYFTVYNELTKVKYVTEGMRKPAFLSGEQKKAIVDLLFKTNRKVTVKQLKEDYFKKIECFDSVEISGVEDRFNASLGTYHDLLKIIKDKDFLDNEENEDILEDIVLTLTLFEDREMIEERLKTYAHLFDDKVMKQLKRRRYTGWGRLSRKLINGIRDKQSGKTILDFLKSDGFANRNFMQLIHDDSLTFKEDIQKAQVSGQGDSLHEHIANLAGSPAIKKGILQTVKVVDELVKVMGRHKPENIVIEMARENQTTQKGQKNSRERMKRIEEGIKELGSQILKEHPVENTQLQNEKLYLYYLQNGRDMYVDQELDINRLSDYDVDHIVPQSFLKDDSIDNKVLTRSDKARGKSDNVPSEEVVKKMKNYWRQLLNAKLITQRKFDNLTKAERGGLSELDKAGFIKRQLVETRQITKHVAQILDSRMNTKYDENDKLIREVKVITLKSKLVSDFRKDFQFYKVREINNYHHAHDAYLNAVVGTALIKKYPKLESEFVYGDYKVYDVRKMIAKSEQEIGKATAKYFFYSNIMNFFKTEITLANGEIRKRPLIETNGETGEIVWDKGRDFATVRKVLSMPQVNIVKKTEVQTGGFSKESILPKRNSDKLIARKKDWDPKKYGGFDSPTVAYSVLVVAKVEKGKSKKLKSVKELLGITIMERSSFEKNPIDFLEAKGYKEVKKDLIIKLPKYSLFELENGRKRMLASAGELQKGNELALPSKYVNFLYLASHYEKLKGSPEDNEQKQLFVEQHKHYLDEIIEQISEFSKRVILADANLDKVLSAYNKHRDKPIREQAENIIHLFTLTNLGAPAAFKYFDTTIDRKRYTSTKEVLDATLIHQSITGLYETRIDLSQLGGDGGGGGGGGGGTLGIEDEYRLHETSTEPDVSLGSTWLSDFPQAWAETGGMGLAVRQAPLIIPLKATSTPVSIQQYPMSHEARLGIKPHIQRLLDQGILVPCQSPWNTPLLPVKKPGTNDYRPVQDLREVNKRVEDIHPTVPNPYNLLSGLPPSHQWYTVLDLKDAFFCLRLHPTSQPLFAFEWRDPGMGISGQLTWTRLPQGFKNSPTLFNEALHRDLADFRIQHPDLILLQYVDDILLAATSELDCQQGTRALLQTLGDLGYRASAKKAQICQKQVKYLGYLLREGQRWLTEARKETVMGQPVPKTPRQLREFLGTAGFCRLWIPGFAEMAAPLYPLTKPGTLFSWGPDQQKAYQEIKQALLTAPALGLPDLTKPFELFVDEKQGYAKGVLTQKLGPWRRPVAYLSKKLDPVAAGWPPCLRMVAAIAVLTKDAGKLTMGQPLVILAPHAVEALVKQPPDRWLSNARMTHYQAMLLDTDRVQFGPVVALNPATLLPLPEEGAPHDCLEILAETHGTRPDLTDQPIPDADHTWYTDGSSFLQEGQRKAGAAVTTETEVIWAGALPAGTSAQRAELIALTQALKMAEGKRLNVYTDSRYAFATAHIHGEIYRRRGWLTSEGREIKNKSEILALLKALFLPKRLSIIHCLGHQKGDSAEARGNRLADQAAREAAIKTPPDTSTLLAGKRTADGSEFEKRTADGSEFESPKKKAKVE

SEQ ID NO: 2217 - protein, 2094 aa, synthetic construct
MPAAKRVKLDGGDKKYSIGLDIGTNSVGWAVITDEYKVPSKKFKVLGNTDRHSIKKNLIGALLFDSGETAEATRLKRTARRRYTRRKNRICYLQEIFSNEMAKVDDSFFHRLEESFLVEEDKKHERHPIFGNIVDEVAYHEKYPTIYHLRKKLVDSTDKADLRLIYLALAHMIKFRGHFLIEGDLNPDNSDVDKLFIQLVQTYNQLFEENPINASGVDAKAILSARLSKSRRLENLIAQLPGEKKNGLFGNLIALSLGLTPNFKSNFDLAEDAKLQLSKDTYDDDLDNLLAQIGDQYADLFLAAKNLSDAILLSDILRVNTEITKAPLSASMIKRYDEHHQDLTLLKALVRQQLPEKYKEIFFDQSKNGYAGYIDGGASQEEFYKFIKPILEKMDGTEELLVKLNREDLLRKQRTFDNGSIPHQIHLGELHAILRRQEDFYPFLKDNREKIEKILTFRIPYYVGPLARGNSRFAWMTRKSEETITPWNFEEVVDKGASAQSFIERMTNFDKNLPNEKVLPKHSLLYEYFTVYNELTKVKYVTEGMRKPAFLSGEQKKAIVDLLFKTNRKVTVKQLKEDYFKKIECFDSVEISGVEDRFNASLGTYHDLLKIIKDKDFLDNEENEDILEDIVLTLTLFEDREMIEERLKTYAHLFDDKVMKQLKRRRYTGWGRLSRKLINGIRDKQSGKTILDFLKSDGFANRNFMQLIHDDSLTFKEDIQKAQVSGQGDSLHEHIANLAGSPAIKKGILQTVKVVDELVKVMGRHKPENIVIEMARENQTTQKGQKNSRERMKRIEEGIKELGSQILKEHPVENTQLQNEKLYLYYLQNGRDMYVDQELDINRLSDYDVDHIVPQSFLKDDSIDNKVLTRSDKARGKSDNVPSEEVVKKMKNYWRQLLNAKLITQRKFDNLTKAERGGLSELDKAGFIKRQLVETRQITKHVAQILDSRMNTKYDENDKLIREVKVITLKSKLVSDFRKDFQFYKVREINNYHHAHDAYLNAVVGTALIKKYPKLESEFVYGDYKVYDVRKMIAKSEQEIGKATAKYFFYSNIMNFFKTEITLANGEIRKRPLIETNGETGEIVWDKGRDFATVRKVLSMPQVNIVKKTEVQTGGFSKESILPKRNSDKLIARKKDWDPKKYGGFDSPTVAYSVLVVAKVEKGKSKKLKSVKELLGITIMERSSFEKNPIDFLEAKGYKEVKKDLIIKLPKYSLFELENGRKRMLASAGELQKGNELALPSKYVNFLYLASHYEKLKGSPEDNEQKQLFVEQHKHYLDEIIEQISEFSKRVILADANLDKVLSAYNKHRDKPIREQAENIIHLFTLTNLGAPAAFKYFDTTIDRKRYTSTKEVLDATLIHQSITGLYETRIDLSQLGGDGGGGSGSSPAPGGTLGIEDEYRLHETSTEPDVSLGSTWLSDFPQAWAETGGMGLAVRQAPLIIPLKATSTPVSIQQYPMSHEARLGIKPHIQRLLDQGILVPCQSPWNTPLLPVKKPGTNDYRPVQDLREVNKRVEDIHPTVPNPYNLLSGLPPSHQWYTVLDLKDAFFCLRLHPTSQPLFAFEWRDPGMGISGQLTWTRLPQGFKNSPTLFNEALHRDLADFRIQHPDLILLQYVDDILLAATSELDCQQGTRALLQTLGDLGYRASAKKAQICQKQVKYLGYLLREGQRWLTEARKETVMGQPVPKTPRQLREFLGTAGFCRLWIPGFAEMAAPLYPLTKPGTLFSWGPDQQKAYQEIKQALLTAPALGLPDLTKPFELFVDEKQGYAKGVLTQKLGPWRRPVAYLSKKLDPVAAGWPPCLRMVAAIAVLTKDAGKLTMGQPLVILAPHAVEALVKQPPDRWLSNARMTHYQAMLLDTDRVQFGPVVALNPATLLPLPEEGAPHDCLEILAETHGTRPDLTDQPIPDADHTWYTDGSSFLQEGQRKAGAAVTTETEVIWAGALPAGTSAQRAELIALTQALKMAEGKRLNVYTDSRYAFATAHIHGEIYRRRGWLTSEGREIKNKSEILALLKALFLPKRLSIIHCLGHQKGDSAEARGNRLADQAAREAAIKTPPDTSTLLAGKRTADGSEFEKRTADGSEFESPKKKAKVE

SEQ ID NO: 2218 - protein, 2096 aa, synthetic construct
MPAAKRVKLDGGDKKYSIGLDIGTNSVGWAVITDEYKVPSKKFKVLGNTDRHSIKKNLIGALLFDSGETAEATRLKRTARRRYTRRKNRICYLQEIFSNEMAKVDDSFFHRLEESFLVEEDKKHERHPIFGNIVDEVAYHEKYPTIYHLRKKLVDSTDKADLRLIYLALAHMIKFRGHFLIEGDLNPDNSDVDKLFIQLVQTYNQLFEENPINASGVDAKAILSARLSKSRRLENLIAQLPGEKKNGLFGNLIALSLGLTPNFKSNFDLAEDAKLQLSKDTYDDDLDNLLAQIGDQYADLFLAAKNLSDAILLSDILRVNTEITKAPLSASMIKRYDEHHQDLTLLKALVRQQLPEKYKEIFFDQSKNGYAGYIDGGASQEEFYKFIKPILEKMDGTEELLVKLNREDLLRKQRTFDNGSIPHQIHLGELHAILRRQEDFYPFLKDNREKIEKILTFRIPYYVGPLARGNSRFAWMTRKSEETITPWNFEEVVDKGASAQSFIERMTNFDKNLPNEKVLPKHSLLYEYFTVYNELTKVKYVTEGMRKPAFLSGEQKKAIVDLLFKTNRKVTVKQLKEDYFKKIECFDSVEISGVEDRFNASLGTYHDLLKIIKDKDFLDNEENEDILEDIVLTLTLFEDREMIEERLKTYAHLFDDKVMKQLKRRRYTGWGRLSRKLINGIRDKQSGKTILDFLKSDGFANRNFMQLIHDDSLTFKEDIQKAQVSGQGDSLHEHIANLAGSPAIKKGILQTVKVVDELVKVMGRHKPENIVIEMARENQTTQKGQKNSRERMKRIEEGIKELGSQILKEHPVENTQLQNEKLYLYYLQNGRDMYVDQELDINRLSDYDVDHIVPQSFLKDDSIDNKVLTRSDKARGKSDNVPSEEVVKKMKNYWRQLLNAKLITQRKFDNLTKAERGGLSELDKAGFIKRQLVETRQITKHVAQILDSRMNTKYDENDKLIREVKVITLKSKLVSDFRKDFQFYKVREINNYHHAHDAYLNAVVGTALIKKYPKLESEFVYGDYKVYDVRKMIAKSEQEIGKATAKYFFYSNIMNFFKTEITLANGEIRKRPLIETNGETGEIVWDKGRDFATVRKVLSMPQVNIVKKTEVQTGGFSKESILPKRNSDKLIARKKDWDPKKYGGFDSPTVAYSVLVVAKVEKGKSKKLKSVKELLGITIMERSSFEKNPIDFLEAKGYKEVKKDLIIKLPKYSLFELENGRKRMLASAGELQKGNELALPSKYVNFLYLASHYEKLKGSPEDNEQKQLFVEQHKHYLDEIIEQISEFSKRVILADANLDKVLSAYNKHRDKPIREQAENIIHLFTLTNLGAPAAFKYFDTTIDRKRYTSTKEVLDATLIHQSITGLYETRIDLSQLGGDGGEAAAKGGSGGGGGTLGIEDEYRLHETSTEPDVSLGSTWLSDFPQAWAETGGMGLAVRQAPLIIPLKATSTPVSIQQYPMSHEARLGIKPHIQRLLDQGILVPCQSPWNTPLLPVKKPGTNDYRPVQDLREVNKRVEDIHPTVPNPYNLLSGLPPSHQWYTVLDLKDAFFCLRLHPTSQPLFAFEWRDPGMGISGQLTWTRLPQGFKNSPTLFNEALHRDLADFRIQHPDLILLQYVDDILLAATSELDCQQGTRALLQTLGDLGYRASAKKAQICQKQVKYLGYLLREGQRWLTEARKETVMGQPVPKTPRQLREFLGTAGFCRLWIPGFAEMAAPLYPLTKPGTLFSWGPDQQKAYQEIKQALLTAPALGLPDLTKPFELFVDEKQGYAKGVLTQKLGPWRRPVAYLSKKLDPVAAGWPPCLRMVAAIAVLTKDAGKLTMGQPLVILAPHAVEALVKQPPDRWLSNARMTHYQAMLLDTDRVQFGPVVALNPATLLPLPEEGAPHDCLEILAETHGTRPDLTDQPIPDADHTWYTDGSSFLQEGQRKAGAAVTTETEVIWAGALPAGTSAQRAELIALTQALKMAEGKRLNVYTDSRYAFATAHIHGEIYRRRGWLTSEGREIKNKSEILALLKALFLPKRLSIIHCLGHQKGDSAEARGNRLADQAAREAAIKTPPDTSTLLAGKRTADGSEFEKRTADGSEFESPKKKAKVE

SEQ ID NO: 2219 - protein, 2094 aa, synthetic construct
MPAAKRVKLDGGDKKYSIGLDIGTNSVGWAVITDEYKVPSKKFKVLGNTDRHSIKKNLIGALLFDSGETAEATRLKRTARRRYTRRKNRICYLQEIFSNEMAKVDDSFFHRLEESFLVEEDKKHERHPIFGNIVDEVAYHEKYPTIYHLRKKLVDSTDKADLRLIYLALAHMIKFRGHFLIEGDLNPDNSDVDKLFIQLVQTYNQLFEENPINASGVDAKAILSARLSKSRRLENLIAQLPGEKKNGLFGNLIALSLGLTPNFKSNFDLAEDAKLQLSKDTYDDDLDNLLAQIGDQYADLFLAAKNLSDAILLSDILRVNTEITKAPLSASMIKRYDEHHQDLTLLKALVRQQLPEKYKEIFFDQSKNGYAGYIDGGASQEEFYKFIKPILEKMDGTEELLVKLNREDLLRKQRTFDNGSIPHQIHLGELHAILRRQEDFYPFLKDNREKIEKILTFRIPYYVGPLARGNSRFAWMTRKSEETITPWNFEEVVDKGASAQSFIERMTNFDKNLPNEKVLPKHSLLYEYFTVYNELTKVKYVTEGMRKPAFLSGEQKKAIVDLLFKTNRKVTVKQLKEDYFKKIECFDSVEISGVEDRFNASLGTYHDLLKIIKDKDFLDNEENEDILEDIVLTLTLFEDREMIEERLKTYAHLFDDKVMKQLKRRRYTGWGRLSRKLINGIRDKQSGKTILDFLKSDGFANRNFMQLIHDDSLTFKEDIQKAQVSGQGDSLHEHIANLAGSPAIKKGILQTVKVVDELVKVMGRHKPENIVIEMARENQTTQKGQKNSRERMKRIEEGIKELGSQILKEHPVENTQLQNEKLYLYYLQNGRDMYVDQELDINRLSDYDVDHIVPQSFLKDDSIDNKVLTRSDKARGKSDNVPSEEVVKKMKNYWRQLLNAKLITQRKFDNLTKAERGGLSELDKAGFIKRQLVETRQITKHVAQILDSRMNTKYDENDKLIREVKVITLKSKLVSDFRKDFQFYKVREINNYHHAHDAYLNAVVGTALIKKYPKLESEFVYGDYKVYDVRKMIAKSEQEIGKATAKYFFYSNIMNFFKTEITLANGEIRKRPLIETNGETGEIVWDKGRDFATVRKVLSMPQVNIVKKTEVQTGGFSKESILPKRNSDKLIARKKDWDPKKYGGFDSPTVAYSVLVVAKVEKGKSKKLKSVKELLGITIMERSSFEKNPIDFLEAKGYKEVKKDLIIKLPKYSLFELENGRKRMLASAGELQKGNELALPSKYVNFLYLASHYEKLKGSPEDNEQKQLFVEQHKHYLDEIIEQISEFSKRVILADANLDKVLSAYNKHRDKPIREQAENIIHLFTLTNLGAPAAFKYFDTTIDRKRYTSTKEVLDATLIHQSITGLYETRIDLSQLGGDGGGSSGSSGSSGGTLGIEDEYRLHETSTEPDVSLGSTWLSDFPQAWAETGGMGLAVRQAPLIIPLKATSTPVSIQQYPMSHEARLGIKPHIQRLLDQGILVPCQSPWNTPLLPVKKPGTNDYRPVQDLREVNKRVEDIHPTVPNPYNLLSGLPPSHQWYTVLDLKDAFFCLRLHPTSQPLFAFEWRDPGMGISGQLTWTRLPQGFKNSPTLFNEALHRDLADFRIQHPDLILLQYVDDILLAATSELDCQQGTRALLQTLGDLGYRASAKKAQICQKQVKYLGYLLREGQRWLTEARKETVMGQPVPKTPRQLREFLGTAGFCRLWIPGFAEMAAPLYPLTKPGTLFSWGPDQQKAYQEIKQALLTAPALGLPDLTKPFELFVDEKQGYAKGVLTQKLGPWRRPVAYLSKKLDPVAAGWPPCLRMVAAIAVLTKDAGKLTMGQPLVILAPHAVEALVKQPPDRWLSNARMTHYQAMLLDTDRVQFGPVVALNPATLLPLPEEGAPHDCLEILAETHGTRPDLTDQPIPDADHTWYTDGSSFLQEGQRKAGAAVTTETEVIWAGALPAGTSAQRAELIALTQALKMAEGKRLNVYTDSRYAFATAHIHGEIYRRRGWLTSEGREIKNKSEILALLKALFLPKRLSIIHCLGHQKGDSAEARGNRLADQAAREAAIKTPPDTSTLLAGKRTADGSEFEKRTADGSEFESPKKKAKVE

SEQ ID NO: 2220 - protein, 2097 aa, synthetic construct
MPAAKRVKLDGGDKKYSIGLDIGTNSVGWAVITDEYKVPSKKFKVLGNTDRHSIKKNLIGALLFDSGETAEATRLKRTARRRYTRRKNRICYLQEIFSNEMAKVDDSFFHRLEESFLVEEDKKHERHPIFGNIVDEVAYHEKYPTIYHLRKKLVDSTDKADLRLIYLALAHMIKFRGHFLIEGDLNPDNSDVDKLFIQLVQTYNQLFEENPINASGVDAKAILSARLSKSRRLENLIAQLPGEKKNGLFGNLIALSLGLTPNFKSNFDLAEDAKLQLSKDTYDDDLDNLLAQIGDQYADLFLAAKNLSDAILLSDILRVNTEITKAPLSASMIKRYDEHHQDLTLLKALVRQQLPEKYKEIFFDQSKNGYAGYIDGGASQEEFYKFIKPILEKMDGTEELLVKLNREDLLRKQRTFDNGSIPHQIHLGELHAILRRQEDFYPFLKDNREKIEKILTFRIPYYVGPLARGNSRFAWMTRKSEETITPWNFEEVVDKGASAQSFIERMTNFDKNLPNEKVLPKHSLLYEYFTVYNELTKVKYVTEGMRKPAFLSGEQKKAIVDLLFKTNRKVTVKQLKEDYFKKIECFDSVEISGVEDRFNASLGTYHDLLKIIKDKDFLDNEENEDILEDIVLTLTLFEDREMIEERLKTYAHLFDDKVMKQLKRRRYTGWGRLSRKLINGIRDKQSGKTILDFLKSDGFANRNFMQLIHDDSLTFKEDIQKAQVSGQGDSLHEHIANLAGSPAIKKGILQTVKVVDELVKVMGRHKPENIVIEMARENQTTQKGQKNSRERMKRIEEGIKELGSQILKEHPVENTQLQNEKLYLYYLQNGRDMYVDQELDINRLSDYDVDHIVPQSFLKDDSIDNKVLTRSDKARGKSDNVPSEEVVKKMKNYWRQLLNAKLITQRKFDNLTKAERGGLSELDKAGFIKRQLVETRQITKHVAQILDSRMNTKYDENDKLIREVKVITLKSKLVSDFRKDFQFYKVREINNYHHAHDAYLNAVVGTALIKKYPKLESEFVYGDYKVYDVRKMIAKSEQEIGKATAKYFFYSNIMNFFKTEITLANGEIRKRPLIETNGETGEIVWDKGRDFATVRKVLSMPQVNIVKKTEVQTGGFSKESILPKRNSDKLIARKKDWDPKKYGGFDSPTVAYSVLVVAKVEKGKSKKLKSVKELLGITIMERSSFEKNPIDFLEAKGYKEVKKDLIIKLPKYSLFELENGRKRMLASAGELQKGNELALPSKYVNFLYLASHYEKLKGSPEDNEQKQLFVEQHKHYLDEIIEQISEFSKRVILADANLDKVLSAYNKHRDKPIREQAENIIHLFTLTNLGAPAAFKYFDTTIDRKRYTSTKEVLDATLIHQSITGLYETRIDLSQLGGDGGGSAGSAAGSGEFGGTLGIEDEYRLHETSTEPDVSLGSTWLSDFPQAWAETGGMGLAVRQAPLIIPLKATSTPVSIQQYPMSHEARLGIKPHIQRLLDQGILVPCQSPWNTPLLPVKKPGTNDYRPVQDLREVNKRVEDIHPTVPNPYNLLSGLPPSHQWYTVLDLKDAFFCLRLHPTSQPLFAFEWRDPGMGISGQLTWTRLPQGFKNSPTLFNEALHRDLADFRIQHPDLILLQYVDDILLAATSELDCQQGTRALLQTLGDLGYRASAKKAQICQKQVKYLGYLLREGQRWLTEARKETVMGQPVPKTPRQLREFLGTAGFCRLWIPGFAEMAAPLYPLTKPGTLFSWGPDQQKAYQEIKQALLTAPALGLPDLTKPFELFVDEKQGYAKGVLTQKLGPWRRPVAYLSKKLDPVAAGWPPCLRMVAAIAVLTKDAGKLTMGQPLVILAPHAVEALVKQPPDRWLSNARMTHYQAMLLDTDRVQFGPVVALNPATLLPLPEEGAPHDCLEILAETHGTRPDLTDQPIPDADHTWYTDGSSFLQEGQRKAGAAVTTETEVIWAGALPAGTSAQRAELIALTQALKMAEGKRLNVYTDSRYAFATAHIHGEIYRRRGWLTSEGREIKNKSEILALLKALFLPKRLSIIHCLGHQKGDSAEARGNRLADQAAREAAIKTPPDTSTLLAGKRTADGSEFEKRTADGSEFESPKKKAKVE

SEQ ID NO: 2221 - protein, 2090 aa, synthetic construct
MPAAKRVKLDGGDKKYSIGLDIGTNSVGWAVITDEYKVPSKKFKVLGNTDRHSIKKNLIGALLFDSGETAEATRLKRTARRRYTRRKNRICYLQEIFSNEMAKVDDSFFHRLEESFLVEEDKKHERHPIFGNIVDEVAYHEKYPTIYHLRKKLVDSTDKADLRLIYLALAHMIKFRGHFLIEGDLNPDNSDVDKLFIQLVQTYNQLFEENPINASGVDAKAILSARLSKSRRLENLIAQLPGEKKNGLFGNLIALSLGLTPNFKSNFDLAEDAKLQLSKDTYDDDLDNLLAQIGDQYADLFLAAKNLSDAILLSDILRVNTEITKAPLSASMIKRYDEHHQDLTLLKALVRQQLPEKYKEIFFDQSKNGYAGYIDGGASQEEFYKFIKPILEKMDGTEELLVKLNREDLLRKQRTFDNGSIPHQIHLGELHAILRRQEDFYPFLKDNREKIEKILTFRIPYYVGPLARGNSRFAWMTRKSEETITPWNFEEVVDKGASAQSFIERMTNFDKNLPNEKVLPKHSLLYEYFTVYNELTKVKYVTEGMRKPAFLSGEQKKAIVDLLFKTNRKVTVKQLKEDYFKKIECFDSVEISGVEDRFNASLGTYHDLLKIIKDKDFLDNEENEDILEDIVLTLTLFEDREMIEERLKTYAHLFDDKVMKQLKRRRYTGWGRLSRKLINGIRDKQSGKTILDFLKSDGFANRNFMQLIHDDSLTFKEDIQKAQVSGQGDSLHEHIANLAGSPAIKKGILQTVKVVDELVKVMGRHKPENIVIEMARENQTTQKGQKNSRERMKRIEEGIKELGSQILKEHPVENTQLQNEKLYLYYLQNGRDMYVDQELDINRLSDYDVDHIVPQSFLKDDSIDNKVLTRSDKARGKSDNVPSEEVVKKMKNYWRQLLNAKLITQRKFDNLTKAERGGLSELDKAGFIKRQLVETRQITKHVAQILDSRMNTKYDENDKLIREVKVITLKSKLVSDFRKDFQFYKVREINNYHHAHDAYLNAVVGTALIKKYPKLESEFVYGDYKVYDVRKMIAKSEQEIGKATAKYFFYSNIMNFFKTEITLANGEIRKRPLIETNGETGEIVWDKGRDFATVRKVLSMPQVNIVKKTEVQTGGFSKESILPKRNSDKLIARKKDWDPKKYGGFDSPTVAYSVLVVAKVEKGKSKKLKSVKELLGITIMERSSFEKNPIDFLEAKGYKEVKKDLIIKLPKYSLFELENGRKRMLASAGELQKGNELALPSKYVNFLYLASHYEKLKGSPEDNEQKQLFVEQHKHYLDEIIEQISEFSKRVILADANLDKVLSAYNKHRDKPIREQAENIIHLFTLTNLGAPAAFKYFDTTIDRKRYTSTKEVLDATLIHQSITGLYETRIDLSQLGGDGGGGGGGGGTLGIEDEYRLHETSTEPDVSLGSTWLSDFPQAWAETGGMGLAVRQAPLIIPLKATSTPVSIQQYPMSHEARLGIKPHIQRLLDQGILVPCQSPWNTPLLPVKKPGTNDYRPVQDLREVNKRVEDIHPTVPNPYNLLSGLPPSHQWYTVLDLKDAFFCLRLHPTSQPLFAFEWRDPGMGISGQLTWTRLPQGFKNSPTLFNEALHRDLADFRIQHPDLILLQYVDDILLAATSELDCQQGTRALLQTLGDLGYRASAKKAQICQKQVKYLGYLLREGQRWLTEARKETVMGQPVPKTPRQLREFLGTAGFCRLWIPGFAEMAAPLYPLTKPGTLFSWGPDQQKAYQEIKQALLTAPALGLPDLTKPFELFVDEKQGYAKGVLTQKLGPWRRPVAYLSKKLDPVAAGWPPCLRMVAAIAVLTKDAGKLTMGQPLVILAPHAVEALVKQPPDRWLSNARMTHYQAMLLDTDRVQFGPVVALNPATLLPLPEEGAPHDCLEILAETHGTRPDLTDQPIPDADHTWYTDGSSFLQEGQRKAGAAVTTETEVIWAGALPAGTSAQRAELIALTQALKMAEGKRLNVYTDSRYAFATAHIHGEIYRRRGWLTSEGREIKNKSEILALLKALFLPKRLSIIHCLGHQKGDSAEARGNRLADQAAREAAIKTPPDTSTLLAGKRTADGSEFEKRTADGSEFESPKKKAKVE

SEQ ID NO: 2222 - protein, 2094 aa, synthetic construct
MPAAKRVKLDGGDKKYSIGLDIGTNSVGWAVITDEYKVPSKKFKVLGNTDRHSIKKNLIGALLFDSGETAEATRLKRTARRRYTRRKNRICYLQEIFSNEMAKVDDSFFHRLEESFLVEEDKKHERHPIFGNIVDEVAYHEKYPTIYHLRKKLVDSTDKADLRLIYLALAHMIKFRGHFLIEGDLNPDNSDVDKLFIQLVQTYNQLFEENPINASGVDAKAILSARLSKSRRLENLIAQLPGEKKNGLFGNLIALSLGLTPNFKSNFDLAEDAKLQLSKDTYDDDLDNLLAQIGDQYADLFLAAKNLSDAILLSDILRVNTEITKAPLSASMIKRYDEHHQDLTLLKALVRQQLPEKYKEIFFDQSKNGYAGYIDGGASQEEFYKFIKPILEKMDGTEELLVKLNREDLLRKQRTFDNGSIPHQIHLGELHAILRRQEDFYPFLKDNREKIEKILTFRIPYYVGPLARGNSRFAWMTRKSEETITPWNFEEVVDKGASAQSFIERMTNFDKNLPNEKVLPKHSLLYEYFTVYNELTKVKYVTEGMRKPAFLSGEQKKAIVDLLFKTNRKVTVKQLKEDYFKKIECFDSVEISGVEDRFNASLGTYHDLLKIIKDKDFLDNEENEDILEDIVLTLTLFEDREMIEERLKTYAHLFDDKVMKQLKRRRYTGWGRLSRKLINGIRDKQSGKTILDFLKSDGFANRNFMQLIHDDSLTFKEDIQKAQVSGQGDSLHEHIANLAGSPAIKKGILQTVKVVDELVKVMGRHKPENIVIEMARENQTTQKGQKNSRERMKRIEEGIKELGSQILKEHPVENTQLQNEKLYLYYLQNGRDMYVDQELDINRLSDYDVDHIVPQSFLKDDSIDNKVLTRSDKARGKSDNVPSEEVVKKMKNYWRQLLNAKLITQRKFDNLTKAERGGLSELDKAGFIKRQLVETRQITKHVAQILDSRMNTKYDENDKLIREVKVITLKSKLVSDFRKDFQFYKVREINNYHHAHDAYLNAVVGTALIKKYPKLESEFVYGDYKVYDVRKMIAKSEQEIGKATAKYFFYSNIMNFFKTEITLANGEIRKRPLIETNGETGEIVWDKGRDFATVRKVLSMPQVNIVKKTEVQTGGFSKESILPKRNSDKLIARKKDWDPKKYGGFDSPTVAYSVLVVAKVEKGKSKKLKSVKELLGITIMERSSFEKNPIDFLEAKGYKEVKKDLIIKLPKYSLFELENGRKRMLASAGELQKGNELALPSKYVNFLYLASHYEKLKGSPEDNEQKQLFVEQHKHYLDEIIEQISEFSKRVILADANLDKVLSAYNKHRDKPIREQAENIIHLFTLTNLGAPAAFKYFDTTIDRKRYTSTKEVLDATLIHQSITGLYETRIDLSQLGGDGGGSSGGSPAPGGTLGIEDEYRLHETSTEPDVSLGSTWLSDFPQAWAETGGMGLAVRQAPLIIPLKATSTPVSIQQYPMSHEARLGIKPHIQRLLDQGILVPCQSPWNTPLLPVKKPGTNDYRPVQDLREVNKRVEDIHPTVPNPYNLLSGLPPSHQWYTVLDLKDAFFCLRLHPTSQPLFAFEWRDPGMGISGQLTWTRLPQGFKNSPTLFNEALHRDLADFRIQHPDLILLQYVDDILLAATSELDCQQGTRALLQTLGDLGYRASAKKAQICQKQVKYLGYLLREGQRWLTEARKETVMGQPVPKTPRQLREFLGTAGFCRLWIPGFAEMAAPLYPLTKPGTLFSWGPDQQKAYQEIKQALLTAPALGLPDLTKPFELFVDEKQGYAKGVLTQKLGPWRRPVAYLSKKLDPVAAGWPPCLRMVAAIAVLTKDAGKLTMGQPLVILAPHAVEALVKQPPDRWLSNARMTHYQAMLLDTDRVQFGPVVALNPATLLPLPEEGAPHDCLEILAETHGTRPDLTDQPIPDADHTWYTDGSSFLQEGQRKAGAAVTTETEVIWAGALPAGTSAQRAELIALTQALKMAEGKRLNVYTDSRYAFATAHIHGEIYRRRGWLTSEGREIKNKSEILALLKALFLPKRLSIIHCLGHQKGDSAEARGNRLADQAAREAAIKTPPDTSTLLAGKRTADGSEFEKRTADGSEFESPKKKAKVE

SEQ ID NO: 2223 - protein, 2096 aa, synthetic construct
MPAAKRVKLDGGDKKYSIGLDIGTNSVGWAVITDEYKVPSKKFKVLGNTDRHSIKKNLIGALLFDSGETAEATRLKRTARRRYTRRKNRICYLQEIFSNEMAKVDDSFFHRLEESFLVEEDKKHERHPIFGNIVDEVAYHEKYPTIYHLRKKLVDSTDKADLRLIYLALAHMIKFRGHFLIEGDLNPDNSDVDKLFIQLVQTYNQLFEENPINASGVDAKAILSARLSKSRRLENLIAQLPGEKKNGLFGNLIALSLGLTPNFKSNFDLAEDAKLQLSKDTYDDDLDNLLAQIGDQYADLFLAAKNLSDAILLSDILRVNTEITKAPLSASMIKRYDEHHQDLTLLKALVRQQLPEKYKEIFFDQSKNGYAGYIDGGASQEEFYKFIKPILEKMDGTEELLVKLNREDLLRKQRTFDNGSIPHQIHLGELHAILRRQEDFYPFLKDNREKIEKILTFRIPYYVGPLARGNSRFAWMTRKSEETITPWNFEEVVDKGASAQSFIERMTNFDKNLPNEKVLPKHSLLYEYFTVYNELTKVKYVTEGMRKPAFLSGEQKKAIVDLLFKTNRKVTVKQLKEDYFKKIECFDSVEISGVEDRFNASLGTYHDLLKIIKDKDFLDNEENEDILEDIVLTLTLFEDREMIEERLKTYAHLFDDKVMKQLKRRRYTGWGRLSRKLINGIRDKQSGKTILDFLKSDGFANRNFMQLIHDDSLTFKEDIQKAQVSGQGDSLHEHIANLAGSPAIKKGILQTVKVVDELVKVMGRHKPENIVIEMARENQTTQKGQKNSRERMKRIEEGIKELGSQILKEHPVENTQLQNEKLYLYYLQNGRDMYVDQELDINRLSDYDVDHIVPQSFLKDDSIDNKVLTRSDKARGKSDNVPSEEVVKKMKNYWRQLLNAKLITQRKFDNLTKAERGGLSELDKAGFIKRQLVETRQITKHVAQILDSRMNTKYDENDKLIREVKVITLKSKLVSDFRKDFQFYKVREINNYHHAHDAYLNAVVGTALIKKYPKLESEFVYGDYKVYDVRKMIAKSEQEIGKATAKYFFYSNIMNFFKTEITLANGEIRKRPLIETNGETGEIVWDKGRDFATVRKVLSMPQVNIVKKTEVQTGGFSKESILPKRNSDKLIARKKDWDPKKYGGFDSPTVAYSVLVVAKVEKGKSKKLKSVKELLGITIMERSSFEKNPIDFLEAKGYKEVKKDLIIKLPKYSLFELENGRKRMLASAGELQKGNELALPSKYVNFLYLASHYEKLKGSPEDNEQKQLFVEQHKHYLDEIIEQISEFSKRVILADANLDKVLSAYNKHRDKPIREQAENIIHLFTLTNLGAPAAFKYFDTTIDRKRYTSTKEVLDATLIHQSITGLYETRIDLSQLGGDGGEAAAKPAPGGGGGTLNIEDEYRLHETSKEPDVSLGSTWLSDFPQAWAETGGMGLAVRQAPLIIPLKATSTPVSIKQYPMSQEARLGIKPHIQRLLDQGILVPCQSPWNTPLLPVKKPGTNDYRPVQDLREVNKRVEDIHPTVPNPYNLLSGLPPSHQWYTVLDLKDAFFCLRLHPTSQPLFAFEWRDPEMGISGQLTWTRLPQGFKNSPTLFDEALHRDLAGFRIQHPDLILLQYVDDLLLAATSELDCQQGTRALLQTLGDLGYRASAKKAQICQKQVKYLGYLLKEGQRWLTEARKETVMGQPIPKTPRQLREFLGTAGFCRLWIPGFAEMAAPLYPLTKTGTLFNWGPDQQKAFQEIKQALLTAPALGLPDLTKPFELFVDEKQGYAKGVLTQKLGPWRRPVAYLSKKLDPVAAGWPPCLRMVAAIAVLTKDAGKLTMGQPLVILAPHAVEALVKQPPDRWLSNARMTHYQALLLDTDRVQFGPVVALNPATLLPLPEEGLQHDCLDILAEAHGTRSDLMDQPLPDADHTWYTDGSSFLQEGQRKAGAAVTTETEVIWARALPAGTSAQRAELIALTQALKMAEGKKLNVYTDSRYAFATAHIHGEIYRRRGLLTSEGKEIKNKDEILALLKALFLPKRLSIIHCPGHQKGNSAEARGNRMADQAAREVATRETPETSTLLAGKRTADGSEFEKRTADGSEFESPKKKAKVE

SEQ ID NO: 2224 - protein, 2115 aa, synthetic construct
MPAAKRVKLDGGDKKYSIGLDIGTNSVGWAVITDEYKVPSKKFKVLGNTDRHSIKKNLIGALLFDSGETAEATRLKRTARRRYTRRKNRICYLQEIFSNEMAKVDDSFFHRLEESFLVEEDKKHERHPIFGNIVDEVAYHEKYPTIYHLRKKLVDSTDKADLRLIYLALAHMIKFRGHFLIEGDLNPDNSDVDKLFIQLVQTYNQLFEENPINASGVDAKAILSARLSKSRRLENLIAQLPGEKKNGLFGNLIALSLGLTPNFKSNFDLAEDAKLQLSKDTYDDDLDNLLAQIGDQYADLFLAAKNLSDAILLSDILRVNTEITKAPLSASMIKRYDEHHQDLTLLKALVRQQLPEKYKEIFFDQSKNGYAGYIDGGASQEEFYKFIKPILEKMDGTEELLVKLNREDLLRKQRTFDNGSIPHQIHLGELHAILRRQEDFYPFLKDNREKIEKILTFRIPYYVGPLARGNSRFAWMTRKSEETITPWNFEEVVDKGASAQSFIERMTNFDKNLPNEKVLPKHSLLYEYFTVYNELTKVKYVTEGMRKPAFLSGEQKKAIVDLLFKTNRKVTVKQLKEDYFKKIECFDSVEISGVEDRFNASLGTYHDLLKIIKDKDFLDNEENEDILEDIVLTLTLFEDREMIEERLKTYAHLFDDKVMKQLKRRRYTGWGRLSRKLINGIRDKQSGKTILDFLKSDGFANRNFMQLIHDDSLTFKEDIQKAQVSGQGDSLHEHIANLAGSPAIKKGILQTVKVVDELVKVMGRHKPENIVIEMARENQTTQKGQKNSRERMKRIEEGIKELGSQILKEHPVENTQLQNEKLYLYYLQNGRDMYVDQELDINRLSDYDVDHIVPQSFLKDDSIDNKVLTRSDKARGKSDNVPSEEVVKKMKNYWRQLLNAKLITQRKFDNLTKAERGGLSELDKAGFIKRQLVETRQITKHVAQILDSRMNTKYDENDKLIREVKVITLKSKLVSDFRKDFQFYKVREINNYHHAHDAYLNAVVGTALIKKYPKLESEFVYGDYKVYDVRKMIAKSEQEIGKATAKYFFYSNIMNFFKTEITLANGEIRKRPLIETNGETGEIVWDKGRDFATVRKVLSMPQVNIVKKTEVQTGGFSKESILPKRNSDKLIARKKDWDPKKYGGFDSPTVAYSVLVVAKVEKGKSKKLKSVKELLGITIMERSSFEKNPIDFLEAKGYKEVKKDLIIKLPKYSLFELENGRKRMLASAGELQKGNELALPSKYVNFLYLASHYEKLKGSPEDNEQKQLFVEQHKHYLDEIIEQISEFSKRVILADANLDKVLSAYNKHRDKPIREQAENIIHLFTLTNLGAPAAFKYFDTTIDRKRYTSTKEVLDATLIHQSITGLYETRIDLSQLGGDGGGGGGSGGGGSGGGGSGGGGSGGGGSGGGGSGGTLNIEDEYRLHETSKEPDVSLGSTWLSDFPQAWAETGGMGLAVRQAPLIIPLKATSTPVSIKQYPMSQEARLGIKPHIQRLLDQGILVPCQSPWNTPLLPVKKPGTNDYRPVQDLREVNKRVEDIHPTVPNPYNLLSGLPPSHQWYTVLDLKDAFFCLRLHPTSQPLFAFEWRDPEMGISGQLTWTRLPQGFKNSPTLFNEALHRDLAGFRIQHPDLILLQYVDDLLLAATSELDCQQGTRALLQTLGDLGYRASAKKAQICQKQVKYLGYLLKEGQRWLTEARKETVMGQPIPKTPRQLREFLGTAGFCRLWIPGFAEMAAPLYPLTKPGTLFNWGPDQQKAFQEIKQALLTAPALGLPDLTKPFELFVDEKQGYAKGVLTQKLGPWRRPVAYLSKKLDPVAAGWPPCLRMVAAIAVLTKDAGKLTMGQPLVILAPHAVEALVKQPPDRWLSNARMTHYQALLLDTDRVQFGPVVALNPATLLPLPEEGLQHDCLDILAEAHGTRSDLMDQPLPDADHTWYTDGSSFLQEGQRKAGAAVTTETEVIWARALPAGTSAQRAELIALTQALKMAEGKKLNVYTDSRYAFATAHIHGEIYRRRGWLTSEGKEIKNKDEILALLKALFLPKRLSIIHCPGHQKGNSAEARGNRMADQAAREVATRETPETSTLLAGKRTADGSEFEKRTADGSEFESPKKKAKVE

SEQ ID NO: 2225 - protein, 2096 aa, synthetic construct
MPAAKRVKLDGGDKKYSIGLDIGTNSVGWAVITDEYKVPSKKFKVLGNTDRHSIKKNLIGALLFDSGETAEATRLKRTARRRYTRRKNRICYLQEIFSNEMAKVDDSFFHRLEESFLVEEDKKHERHPIFGNIVDEVAYHEKYPTIYHLRKKLVDSTDKADLRLIYLALAHMIKFRGHFLIEGDLNPDNSDVDKLFIQLVQTYNQLFEENPINASGVDAKAILSARLSKSRRLENLIAQLPGEKKNGLFGNLIALSLGLTPNFKSNFDLAEDAKLQLSKDTYDDDLDNLLAQIGDQYADLFLAAKNLSDAILLSDILRVNTEITKAPLSASMIKRYDEHHQDLTLLKALVRQQLPEKYKEIFFDQSKNGYAGYIDGGASQEEFYKFIKPILEKMDGTEELLVKLNREDLLRKQRTFDNGSIPHQIHLGELHAILRRQEDFYPFLKDNREKIEKILTFRIPYYVGPLARGNSRFAWMTRKSEETITPWNFEEVVDKGASAQSFIERMTNFDKNLPNEKVLPKHSLLYEYFTVYNELTKVKYVTEGMRKPAFLSGEQKKAIVDLLFKTNRKVTVKQLKEDYFKKIECFDSVEISGVEDRFNASLGTYHDLLKIIKDKDFLDNEENEDILEDIVLTLTLFEDREMIEERLKTYAHLFDDKVMKQLKRRRYTGWGRLSRKLINGIRDKQSGKTILDFLKSDGFANRNFMQLIHDDSLTFKEDIQKAQVSGQGDSLHEHIANLAGSPAIKKGILQTVKVVDELVKVMGRHKPENIVIEMARENQTTQKGQKNSRERMKRIEEGIKELGSQILKEHPVENTQLQNEKLYLYYLQNGRDMYVDQELDINRLSDYDVDHIVPQSFLKDDSIDNKVLTRSDKARGKSDNVPSEEVVKKMKNYWRQLLNAKLITQRKFDNLTKAERGGLSELDKAGFIKRQLVETRQITKHVAQILDSRMNTKYDENDKLIREVKVITLKSKLVSDFRKDFQFYKVREINNYHHAHDAYLNAVVGTALIKKYPKLESEFVYGDYKVYDVRKMIAKSEQEIGKATAKYFFYSNIMNFFKTEITLANGEIRKRPLIETNGETGEIVWDKGRDFATVRKVLSMPQVNIVKKTEVQTGGFSKESILPKRNSDKLIARKKDWDPKKYGGFDSPTVAYSVLVVAKVEKGKSKKLKSVKELLGITIMERSSFEKNPIDFLEAKGYKEVKKDLIIKLPKYSLFELENGRKRMLASAGELQKGNELALPSKYVNFLYLASHYEKLKGSPEDNEQKQLFVEQHKHYLDEIIEQISEFSKRVILADANLDKVLSAYNKHRDKPIREQAENIIHLFTLTNLGAPAAFKYFDTTIDRKRYTSTKEVLDATLIHQSITGLYETRIDLSQLGGDGGPAPGSSEAAAKGGTLNIEDEYRLHETSKEPDVSLGSTWLSDFPQAWAETGGMGLAVRQAPLIIPLKATSTPVSIKQYPMSQEARLGIKPHIQRLLDQGILVPCQSPWNTPLLPVKKPGTNDYRPVQDLREVNKRVEDIHPTVPNPYNLLSGLPPSHQWYTVLDLKDAFFCLRLHPTSQPLFAFEWRDPEMGISGQLTWTRLPQGFKNSPTLFNEALHRDLAGFRIQHPDLILLQYVDDLLLAATSELDCQQGTRALLQTLGDLGYRASAKKAQICQKQVKYLGYLLKEGQRWLTEARKETVMGQPIPKTPRQLREFLGTAGFCRLWIPGFAEMAAPLYPLTKPGTLFNWGPDQQKAFQEIKQALLTAPALGLPDLTKPFELFVDEKQGYAKGVLTQKLGPWRRPVAYLSKKLDPVAAGWPPCLRMVAAIAVLTKDAGKLTMGQPLVILAPHAVEALVKQPPDRWLSNARMTHYQALLLDTDRVQFGPVVALNPATLLPLPEEGLQHDCLDILAEAHGTRSDLMDQPLPDADHTWYTDGSSFLQEGQRKAGAAVTTETEVIWARALPAGTSAQRAELIALTQALKMAEGKKLNVYTDSRYAFATAHIHGEIYRRRGWLTSEGKEIKNKDEILALLKALFLPKRLSIIHCPGHQKGNSAEARGNRMADQAAREVATRETPETSTLLAGKRTADGSEFEKRTADGSEFESPKKKAKVE

SEQ ID NO: 2226 - protein, 2100 aa, synthetic construct
MPAAKRVKLDGGDKKYSIGLDIGTNSVGWAVITDEYKVPSKKFKVLGNTDRHSIKKNLIGALLFDSGETAEATRLKRTARRRYTRRKNRICYLQEIFSNEMAKVDDSFFHRLEESFLVEEDKKHERHPIFGNIVDEVAYHEKYPTIYHLRKKLVDSTDKADLRLIYLALAHMIKFRGHFLIEGDLNPDNSDVDKLFIQLVQTYNQLFEENPINASGVDAKAILSARLSKSRRLENLIAQLPGEKKNGLFGNLIALSLGLTPNFKSNFDLAEDAKLQLSKDTYDDDLDNLLAQIGDQYADLFLAAKNLSDAILLSDILRVNTEITKAPLSASMIKRYDEHHQDLTLLKALVRQQLPEKYKEIFFDQSKNGYAGYIDGGASQEEFYKFIKPILEKMDGTEELLVKLNREDLLRKQRTFDNGSIPHQIHLGELHAILRRQEDFYPFLKDNREKIEKILTFRIPYYVGPLARGNSRFAWMTRKSEETITPWNFEEVVDKGASAQSFIERMTNFDKNLPNEKVLPKHSLLYEYFTVYNELTKVKYVTEGMRKPAFLSGEQKKAIVDLLFKTNRKVTVKQLKEDYFKKIECFDSVEISGVEDRFNASLGTYHDLLKIIKDKDFLDNEENEDILEDIVLTLTLFEDREMIEERLKTYAHLFDDKVMKQLKRRRYTGWGRLSRKLINGIRDKQSGKTILDFLKSDGFANRNFMQLIHDDSLTFKEDIQKAQVSGQGDSLHEHIANLAGSPAIKKGILQTVKVVDELVKVMGRHKPENIVIEMARENQTTQKGQKNSRERMKRIEEGIKELGSQILKEHPVENTQLQNEKLYLYYLQNGRDMYVDQELDINRLSDYDVDHIVPQSFLKDDSIDNKVLTRSDKARGKSDNVPSEEVVKKMKNYWRQLLNAKLITQRKFDNLTKAERGGLSELDKAGFIKRQLVETRQITKHVAQILDSRMNTKYDENDKLIREVKVITLKSKLVSDFRKDFQFYKVREINNYHHAHDAYLNAVVGTALIKKYPKLESEFVYGDYKVYDVRKMIAKSEQEIGKATAKYFFYSNIMNFFKTEITLANGEIRKRPLIETNGETGEIVWDKGRDFATVRKVLSMPQVNIVKKTEVQTGGFSKESILPKRNSDKLIARKKDWDPKKYGGFDSPTVAYSVLVVAKVEKGKSKKLKSVKELLGITIMERSSFEKNPIDFLEAKGYKEVKKDLIIKLPKYSLFELENGRKRMLASAGELQKGNELALPSKYVNFLYLASHYEKLKGSPEDNEQKQLFVEQHKHYLDEIIEQISEFSKRVILADANLDKVLSAYNKHRDKPIREQAENIIHLFTLTNLGAPAAFKYFDTTIDRKRYTSTKEVLDATLIHQSITGLYETRIDLSQLGGDGGEAAAKGGGGSEAAAKGGTLNIEDEYRLHETSKEPDVSLGSTWLSDFPQAWAETGGMGLAVRQAPLIIPLKATSTPVSIKQYPMSQEARLGIKPHIQRLLDQGILVPCQSPWNTPLLPVKKPGTNDYRPVQDLREVNKRVEDIHPTVPNPYNLLSGLPPSHQWYTVLDLKDAFFCLRLHPTSQPLFAFEWRDPEMGISGQLTWTRLPQGFKNSPTLFNEALHRDLAGFRIQHPDLILLQYVDDLLLAATSELDCQQGTRALLQTLGDLGYRASAKKAQICQKQVKYLGYLLKEGQRWLTEARKETVMGQPIPKTPRQLREFLGTAGFCRLWIPGFAEMAAPLYPLTKPGTLFNWGPDQQKAFQEIKQALLTAPALGLPDLTKPFELFVDEKQGYAKGVLTQKLGPWRRPVAYLSKKLDPVAAGWPPCLRMVAAIAVLTKDAGKLTMGQPLVILAPHAVEALVKQPPDRWLSNARMTHYQALLLDTDRVQFGPVVALNPATLLPLPEEGLQHDCLDILAEAHGTRSDLMDQPLPDADHTWYTDGSSFLQEGQRKAGAAVTTETEVIWARALPAGTSAQRAELIALTQALKMAEGKKLNVYTDSRYAFATAHIHGEIYRRRGWLTSEGKEIKNKDEILALLKALFLPKRLSIIHCPGHQKGNSAEARGNRMADQAAREVATRETPETSTLLAGKRTADGSEFEKRTADGSEFESPKKKAKVE

SEQ ID NO: 2227 - protein, 2091 aa, synthetic construct
MPAAKRVKLDGGDKKYSIGLDIGTNSVGWAVITDEYKVPSKKFKVLGNTDRHSIKKNLIGALLFDSGETAEATRLKRTARRRYTRRKNRICYLQEIFSNEMAKVDDSFFHRLEESFLVEEDKKHERHPIFGNIVDEVAYHEKYPTIYHLRKKLVDSTDKADLRLIYLALAHMIKFRGHFLIEGDLNPDNSDVDKLFIQLVQTYNQLFEENPINASGVDAKAILSARLSKSRRLENLIAQLPGEKKNGLFGNLIALSLGLTPNFKSNFDLAEDAKLQLSKDTYDDDLDNLLAQIGDQYADLFLAAKNLSDAILLSDILRVNTEITKAPLSASMIKRYDEHHQDLTLLKALVRQQLPEKYKEIFFDQSKNGYAGYIDGGASQEEFYKFIKPILEKMDGTEELLVKLNREDLLRKQRTFDNGSIPHQIHLGELHAILRRQEDFYPFLKDNREKIEKILTFRIPYYVGPLARGNSRFAWMTRKSEETITPWNFEEVVDKGASAQSFIERMTNFDKNLPNEKVLPKHSLLYEYFTVYNELTKVKYVTEGMRKPAFLSGEQKKAIVDLLFKTNRKVTVKQLKEDYFKKIECFDSVEISGVEDRFNASLGTYHDLLKIIKDKDFLDNEENEDILEDIVLTLTLFEDREMIEERLKTYAHLFDDKVMKQLKRRRYTGWGRLSRKLINGIRDKQSGKTILDFLKSDGFANRNFMQLIHDDSLTFKEDIQKAQVSGQGDSLHEHIANLAGSPAIKKGILQTVKVVDELVKVMGRHKPENIVIEMARENQTTQKGQKNSRERMKRIEEGIKELGSQILKEHPVENTQLQNEKLYLYYLQNGRDMYVDQELDINRLSDYDVDHIVPQSFLKDDSIDNKVLTRSDKARGKSDNVPSEEVVKKMKNYWRQLLNAKLITQRKFDNLTKAERGGLSELDKAGFIKRQLVETRQITKHVAQILDSRMNTKYDENDKLIREVKVITLKSKLVSDFRKDFQFYKVREINNYHHAHDAYLNAVVGTALIKKYPKLESEFVYGDYKVYDVRKMIAKSEQEIGKATAKYFFYSNIMNFFKTEITLANGEIRKRPLIETNGETGEIVWDKGRDFATVRKVLSMPQVNIVKKTEVQTGGFSKESILPKRNSDKLIARKKDWDPKKYGGFDSPTVAYSVLVVAKVEKGKSKKLKSVKELLGITIMERSSFEKNPIDFLEAKGYKEVKKDLIIKLPKYSLFELENGRKRMLASAGELQKGNELALPSKYVNFLYLASHYEKLKGSPEDNEQKQLFVEQHKHYLDEIIEQISEFSKRVILADANLDKVLSAYNKHRDKPIREQAENIIHLFTLTNLGAPAAFKYFDTTIDRKRYTSTKEVLDATLIHQSITGLYETRIDLSQLGGDGGGSSGSSGGTLNIEDEYRLHETSKEPDVSLGSTWLSDFPQAWAETGGMGLAVRQAPLIIPLKATSTPVSIKQYPMSQEARLGIKPHIQRLLDQGILVPCQSPWNTPLLPVKKPGTNDYRPVQDLREVNKRVEDIHPTVPNPYNLLSGLPPSHQWYTVLDLKDAFFCLRLHPTSQPLFAFEWRDPEMGISGQLTWTRLPQGFKNSPTLFNEALHRDLAGFRIQHPDLILLQYVDDLLLAATSELDCQQGTRALLQTLGDLGYRASAKKAQICQKQVKYLGYLLKEGQRWLTEARKETVMGQPIPKTPRQLREFLGTAGFCRLWIPGFAEMAAPLYPLTKPGTLFNWGPDQQKAFQEIKQALLTAPALGLPDLTKPFELFVDEKQGYAKGVLTQKLGPWRRPVAYLSKKLDPVAAGWPPCLRMVAAIAVLTKDAGKLTMGQPLVILAPHAVEALVKQPPDRWLSNARMTHYQALLLDTDRVQFGPVVALNPATLLPLPEEGLQHDCLDILAEAHGTRSDLMDQPLPDADHTWYTDGSSFLQEGQRKAGAAVTTETEVIWARALPAGTSAQRAELIALTQALKMAEGKKLNVYTDSRYAFATAHIHGEIYRRRGWLTSEGKEIKNKDEILALLKALFLPKRLSIIHCPGHQKGNSAEARGNRMADQAAREVATRETPETSTLLAGKRTADGSEFEKRTADGSEFESPKKKAKVE

SEQ ID NO: 2228 - protein, 2097 aa, synthetic construct
MPAAKRVKLDGGDKKYSIGLDIGTNSVGWAVITDEYKVPSKKFKVLGNTDRHSIKKNLIGALLFDSGETAEATRLKRTARRRYTRRKNRICYLQEIFSNEMAKVDDSFFHRLEESFLVEEDKKHERHPIFGNIVDEVAYHEKYPTIYHLRKKLVDSTDKADLRLIYLALAHMIKFRGHFLIEGDLNPDNSDVDKLFIQLVQTYNQLFEENPINASGVDAKAILSARLSKSRRLENLIAQLPGEKKNGLFGNLIALSLGLTPNFKSNFDLAEDAKLQLSKDTYDDDLDNLLAQIGDQYADLFLAAKNLSDAILLSDILRVNTEITKAPLSASMIKRYDEHHQDLTLLKALVRQQLPEKYKEIFFDQSKNGYAGYIDGGASQEEFYKFIKPILEKMDGTEELLVKLNREDLLRKQRTFDNGSIPHQIHLGELHAILRRQEDFYPFLKDNREKIEKILTFRIPYYVGPLARGNSRFAWMTRKSEETITPWNFEEVVDKGASAQSFIERMTNFDKNLPNEKVLPKHSLLYEYFTVYNELTKVKYVTEGMRKPAFLSGEQKKAIVDLLFKTNRKVTVKQLKEDYFKKIECFDSVEISGVEDRFNASLGTYHDLLKIIKDKDFLDNEENEDILEDIVLTLTLFEDREMIEERLKTYAHLFDDKVMKQLKRRRYTGWGRLSRKLINGIRDKQSGKTILDFLKSDGFANRNFMQLIHDDSLTFKEDIQKAQVSGQGDSLHEHIANLAGSPAIKKGILQTVKVVDELVKVMGRHKPENIVIEMARENQTTQKGQKNSRERMKRIEEGIKELGSQILKEHPVENTQLQNEKLYLYYLQNGRDMYVDQELDINRLSDYDVDHIVPQSFLKDDSIDNKVLTRSDKARGKSDNVPSEEVVKKMKNYWRQLLNAKLITQRKFDNLTKAERGGLSELDKAGFIKRQLVETRQITKHVAQILDSRMNTKYDENDKLIREVKVITLKSKLVSDFRKDFQFYKVREINNYHHAHDAYLNAVVGTALIKKYPKLESEFVYGDYKVYDVRKMIAKSEQEIGKATAKYFFYSNIMNFFKTEITLANGEIRKRPLIETNGETGEIVWDKGRDFATVRKVLSMPQVNIVKKTEVQTGGFSKESILPKRNSDKLIARKKDWDPKKYGGFDSPTVAYSVLVVAKVEKGKSKKLKSVKELLGITIMERSSFEKNPIDFLEAKGYKEVKKDLIIKLPKYSLFELENGRKRMLASAGELQKGNELALPSKYVNFLYLASHYEKLKGSPEDNEQKQLFVEQHKHYLDEIIEQISEFSKRVILADANLDKVLSAYNKHRDKPIREQAENIIHLFTLTNLGAPAAFKYFDTTIDRKRYTSTKEVLDATLIHQSITGLYETRIDLSQLGGDGGGSAGSAAGSGEFGGTLNIEDEYRLHETSKEPDVSLGSTWLSDFPQAWAETGGMGLAVRQAPLIIPLKATSTPVSIKQYPMSQEARLGIKPHIQRLLDQGILVPCQSPWNTPLLPVKKPGTNDYRPVQDLREVNKRVEDIHPTVPNPYNLLSGLPPSHQWYTVLDLKDAFFCLRLHPTSQPLFAFEWRDPEMGISGQLTWTRLPQGFKNSPTLFNEALHRDLAGFRIQHPDLILLQYVDDLLLAATSELDCQQGTRALLQTLGDLGYRASAKKAQICQKQVKYLGYLLKEGQRWLTEARKETVMGQPIPKTPRQLREFLGTAGFCRLWIPGFAEMAAPLYPLTKPGTLFNWGPDQQKAFQEIKQALLTAPALGLPDLTKPFELFVDEKQGYAKGVLTQKLGPWRRPVAYLSKKLDPVAAGWPPCLRMVAAIAVLTKDAGKLTMGQPLVILAPHAVEALVKQPPDRWLSNARMTHYQALLLDTDRVQFGPVVALNPATLLPLPEEGLQHDCLDILAEAHGTRSDLMDQPLPDADHTWYTDGSSFLQEGQRKAGAAVTTETEVIWARALPAGTSAQRAELIALTQALKMAEGKKLNVYTDSRYAFATAHIHGEIYRRRGWLTSEGKEIKNKDEILALLKALFLPKRLSIIHCPGHQKGNSAEARGNRMADQAAREVATRETPETSTLLAGKRTADGSEFEKRTADGSEFESPKKKAKVE

SEQ ID NO: 2229 - protein, 2088 aa, synthetic construct
MPAAKRVKLDGGDKKYSIGLDIGTNSVGWAVITDEYKVPSKKFKVLGNTDRHSIKKNLIGALLFDSGETAEATRLKRTARRRYTRRKNRICYLQEIFSNEMAKVDDSFFHRLEESFLVEEDKKHERHPIFGNIVDEVAYHEKYPTIYHLRKKLVDSTDKADLRLIYLALAHMIKFRGHFLIEGDLNPDNSDVDKLFIQLVQTYNQLFEENPINASGVDAKAILSARLSKSRRLENLIAQLPGEKKNGLFGNLIALSLGLTPNFKSNFDLAEDAKLQLSKDTYDDDLDNLLAQIGDQYADLFLAAKNLSDAILLSDILRVNTEITKAPLSASMIKRYDEHHQDLTLLKALVRQQLPEKYKEIFFDQSKNGYAGYIDGGASQEEFYKFIKPILEKMDGTEELLVKLNREDLLRKQRTFDNGSIPHQIHLGELHAILRRQEDFYPFLKDNREKIEKILTFRIPYYVGPLARGNSRFAWMTRKSEETITPWNFEEVVDKGASAQSFIERMTNFDKNLPNEKVLPKHSLLYEYFTVYNELTKVKYVTEGMRKPAFLSGEQKKAIVDLLFKTNRKVTVKQLKEDYFKKIECFDSVEISGVEDRFNASLGTYHDLLKIIKDKDFLDNEENEDILEDIVLTLTLFEDREMIEERLKTYAHLFDDKVMKQLKRRRYTGWGRLSRKLINGIRDKQSGKTILDFLKSDGFANRNFMQLIHDDSLTFKEDIQKAQVSGQGDSLHEHIANLAGSPAIKKGILQTVKVVDELVKVMGRHKPENIVIEMARENQTTQKGQKNSRERMKRIEEGIKELGSQILKEHPVENTQLQNEKLYLYYLQNGRDMYVDQELDINRLSDYDVDHIVPQSFLKDDSIDNKVLTRSDKARGKSDNVPSEEVVKKMKNYWRQLLNAKLITQRKFDNLTKAERGGLSELDKAGFIKRQLVETRQITKHVAQILDSRMNTKYDENDKLIREVKVITLKSKLVSDFRKDFQFYKVREINNYHHAHDAYLNAVVGTALIKKYPKLESEFVYGDYKVYDVRKMIAKSEQEIGKATAKYFFYSNIMNFFKTEITLANGEIRKRPLIETNGETGEIVWDKGRDFATVRKVLSMPQVNIVKKTEVQTGGFSKESILPKRNSDKLIARKKDWDPKKYGGFDSPTVAYSVLVVAKVEKGKSKKLKSVKELLGITIMERSSFEKNPIDFLEAKGYKEVKKDLIIKLPKYSLFELENGRKRMLASAGELQKGNELALPSKYVNFLYLASHYEKLKGSPEDNEQKQLFVEQHKHYLDEIIEQISEFSKRVILADANLDKVLSAYNKHRDKPIREQAENIIHLFTLTNLGAPAAFKYFDTTIDRKRYTSTKEVLDATLIHQSITGLYETRIDLSQLGGDGGGGGGGTLNIEDEYRLHETSKEPDVSLGSTWLSDFPQAWAETGGMGLAVRQAPLIIPLKATSTPVSIKQYPMSQEARLGIKPHIQRLLDQGILVPCQSPWNTPLLPVKKPGTNDYRPVQDLREVNKRVEDIHPTVPNPYNLLSGLPPSHQWYTVLDLKDAFFCLRLHPTSQPLFAFEWRDPEMGISGQLTWTRLPQGFKNSPTLFNEALHRDLAGFRIQHPDLILLQYVDDLLLAATSELDCQQGTRALLQTLGDLGYRASAKKAQICQKQVKYLGYLLKEGQRWLTEARKETVMGQPIPKTPRQLREFLGTAGFCRLWIPGFAEMAAPLYPLTKPGTLFNWGPDQQKAFQEIKQALLTAPALGLPDLTKPFELFVDEKQGYAKGVLTQKLGPWRRPVAYLSKKLDPVAAGWPPCLRMVAAIAVLTKDAGKLTMGQPLVILAPHAVEALVKQPPDRWLSNARMTHYQALLLDTDRVQFGPVVALNPATLLPLPEEGLQHDCLDILAEAHGTRSDLMDQPLPDADHTWYTDGSSFLQEGQRKAGAAVTTETEVIWARALPAGTSAQRAELIALTQALKMAEGKKLNVYTDSRYAFATAHIHGEIYRRRGWLTSEGKEIKNKDEILALLKALFLPKRLSIIHCPGHQKGNSAEARGNRMADQAAREVATRETPETSTLLAGKRTADGSEFEKRTADGSEFESPKKKAKVE

SEQ ID NO: 2230 - protein, 2096 aa, synthetic construct
MPAAKRVKLDGGDKKYSIGLDIGTNSVGWAVITDEYKVPSKKFKVLGNTDRHSIKKNLIGALLFDSGETAEATRLKRTARRRYTRRKNRICYLQEIFSNEMAKVDDSFFHRLEESFLVEEDKKHERHPIFGNIVDEVAYHEKYPTIYHLRKKLVDSTDKADLRLIYLALAHMIKFRGHFLIEGDLNPDNSDVDKLFIQLVQTYNQLFEENPINASGVDAKAILSARLSKSRRLENLIAQLPGEKKNGLFGNLIALSLGLTPNFKSNFDLAEDAKLQLSKDTYDDDLDNLLAQIGDQYADLFLAAKNLSDAILLSDILRVNTEITKAPLSASMIKRYDEHHQDLTLLKALVRQQLPEKYKEIFFDQSKNGYAGYIDGGASQEEFYKFIKPILEKMDGTEELLVKLNREDLLRKQRTFDNGSIPHQIHLGELHAILRRQEDFYPFLKDNREKIEKILTFRIPYYVGPLARGNSRFAWMTRKSEETITPWNFEEVVDKGASAQSFIERMTNFDKNLPNEKVLPKHSLLYEYFTVYNELTKVKYVTEGMRKPAFLSGEQKKAIVDLLFKTNRKVTVKQLKEDYFKKIECFDSVEISGVEDRFNASLGTYHDLLKIIKDKDFLDNEENEDILEDIVLTLTLFEDREMIEERLKTYAHLFDDKVMKQLKRRRYTGWGRLSRKLINGIRDKQSGKTILDFLKSDGFANRNFMQLIHDDSLTFKEDIQKAQVSGQGDSLHEHIANLAGSPAIKKGILQTVKVVDELVKVMGRHKPENIVIEMARENQTTQKGQKNSRERMKRIEEGIKELGSQILKEHPVENTQLQNEKLYLYYLQNGRDMYVDQELDINRLSDYDVDHIVPQSFLKDDSIDNKVLTRSDKARGKSDNVPSEEVVKKMKNYWRQLLNAKLITQRKFDNLTKAERGGLSELDKAGFIKRQLVETRQITKHVAQILDSRMNTKYDENDKLIREVKVITLKSKLVSDFRKDFQFYKVREINNYHHAHDAYLNAVVGTALIKKYPKLESEFVYGDYKVYDVRKMIAKSEQEIGKATAKYFFYSNIMNFFKTEITLANGEIRKRPLIETNGETGEIVWDKGRDFATVRKVLSMPQVNIVKKTEVQTGGFSKESILPKRNSDKLIARKKDWDPKKYGGFDSPTVAYSVLVVAKVEKGKSKKLKSVKELLGITIMERSSFEKNPIDFLEAKGYKEVKKDLIIKLPKYSLFELENGRKRMLASAGELQKGNELALPSKYVNFLYLASHYEKLKGSPEDNEQKQLFVEQHKHYLDEIIEQISEFSKRVILADANLDKVLSAYNKHRDKPIREQAENIIHLFTLTNLGAPAAFKYFDTTIDRKRYTSTKEVLDATLIHQSITGLYETRIDLSQLGGDGGEAAAKPAPGGGGGTLNIEDEYRLHETSKEPDVSLGSTWLSDFPQAWAETGGMGLAVRQAPLIIPLKATSTPVSIKQYPMSQEARLGIKPHIQRLLDQGILVPCQSPWNTPLLPVKKPGTNDYRPVQDLREVNKRVEDIHPTVPNPYNLLSGLPPSHQWYTVLDLKDAFFCLRLHPTSQPLFAFEWRDPEMGISGQLTWTRLPQGFKNSPTLFNEALHRDLAGFRIQHPDLILLQYVDDLLLAATSELDCQQGTRALLQTLGDLGYRASAKKAQICQKQVKYLGYLLKEGQRWLTEARKETVMGQPIPKTPRQLREFLGTAGFCRLWIPGFAEMAAPLYPLTKPGTLFNWGPDQQKAFQEIKQALLTAPALGLPDLTKPFELFVDEKQGYAKGVLTQKLGPWRRPVAYLSKKLDPVAAGWPPCLRMVAAIAVLTKDAGKLTMGQPLVILAPHAVEALVKQPPDRWLSNARMTHYQALLLDTDRVQFGPVVALNPATLLPLPEEGLQHDCLDILAEAHGTRSDLMDQPLPDADHTWYTDGSSFLQEGQRKAGAAVTTETEVIWARALPAGTSAQRAELIALTQALKMAEGKKLNVYTDSRYAFATAHIHGEIYRRRGWLTSEGKEIKNKDEILALLKALFLPKRLSIIHCPGHQKGNSAEARGNRMADQAAREVATRETPETSTLLAGKRTADGSEFEKRTADGSEFESPKKKAKVE

SEQ ID NO: 2231 - protein, 2094 aa, synthetic construct
MPAAKRVKLDGGDKKYSIGLDIGTNSVGWAVITDEYKVPSKKFKVLGNTDRHSIKKNLIGALLFDSGETAEATRLKRTARRRYTRRKNRICYLQEIFSNEMAKVDDSFFHRLEESFLVEEDKKHERHPIFGNIVDEVAYHEKYPTIYHLRKKLVDSTDKADLRLIYLALAHMIKFRGHFLIEGDLNPDNSDVDKLFIQLVQTYNQLFEENPINASGVDAKAILSARLSKSRRLENLIAQLPGEKKNGLFGNLIALSLGLTPNFKSNFDLAEDAKLQLSKDTYDDDLDNLLAQIGDQYADLFLAAKNLSDAILLSDILRVNTEITKAPLSASMIKRYDEHHQDLTLLKALVRQQLPEKYKEIFFDQSKNGYAGYIDGGASQEEFYKFIKPILEKMDGTEELLVKLNREDLLRKQRTFDNGSIPHQIHLGELHAILRRQEDFYPFLKDNREKIEKILTFRIPYYVGPLARGNSRFAWMTRKSEETITPWNFEEVVDKGASAQSFIERMTNFDKNLPNEKVLPKHSLLYEYFTVYNELTKVKYVTEGMRKPAFLSGEQKKAIVDLLFKTNRKVTVKQLKEDYFKKIECFDSVEISGVEDRFNASLGTYHDLLKIIKDKDFLDNEENEDILEDIVLTLTLFEDREMIEERLKTYAHLFDDKVMKQLKRRRYTGWGRLSRKLINGIRDKQSGKTILDFLKSDGFANRNFMQLIHDDSLTFKEDIQKAQVSGQGDSLHEHIANLAGSPAIKKGILQTVKVVDELVKVMGRHKPENIVIEMARENQTTQKGQKNSRERMKRIEEGIKELGSQILKEHPVENTQLQNEKLYLYYLQNGRDMYVDQELDINRLSDYDVDHIVPQSFLKDDSIDNKVLTRSDKARGKSDNVPSEEVVKKMKNYWRQLLNAKLITQRKFDNLTKAERGGLSELDKAGFIKRQLVETRQITKHVAQILDSRMNTKYDENDKLIREVKVITLKSKLVSDFRKDFQFYKVREINNYHHAHDAYLNAVVGTALIKKYPKLESEFVYGDYKVYDVRKMIAKSEQEIGKATAKYFFYSNIMNFFKTEITLANGEIRKRPLIETNGETGEIVWDKGRDFATVRKVLSMPQVNIVKKTEVQTGGFSKESILPKRNSDKLIARKKDWDPKKYGGFDSPTVAYSVLVVAKVEKGKSKKLKSVKELLGITIMERSSFEKNPIDFLEAKGYKEVKKDLIIKLPKYSLFELENGRKRMLASAGELQKGNELALPSKYVNFLYLASHYEKLKGSPEDNEQKQLFVEQHKHYLDEIIEQISEFSKRVILADANLDKVLSAYNKHRDKPIREQAENIIHLFTLTNLGAPAAFKYFDTTIDRKRYTSTKEVLDATLIHQSITGLYETRIDLSQLGGDGGGGGGGSGSSGGTLNIEDEYRLHETSKEPDVSLGSTWLSDFPQAWAETGGMGLAVRQAPLIIPLKATSTPVSIKQYPMSQEARLGIKPHIQRLLDQGILVPCQSPWNTPLLPVKKPGTNDYRPVQDLREVNKRVEDIHPTVPNPYNLLSGLPPSHQWYTVLDLKDAFFCLRLHPTSQPLFAFEWRDPEMGISGQLTWTRLPQGFKNSPTLFNEALHRDLAGFRIQHPDLILLQYVDDLLLAATSELDCQQGTRALLQTLGDLGYRASAKKAQICQKQVKYLGYLLKEGQRWLTEARKETVMGQPIPKTPRQLREFLGTAGFCRLWIPGFAEMAAPLYPLTKPGTLFNWGPDQQKAFQEIKQALLTAPALGLPDLTKPFELFVDEKQGYAKGVLTQKLGPWRRPVAYLSKKLDPVAAGWPPCLRMVAAIAVLTKDAGKLTMGQPLVILAPHAVEALVKQPPDRWLSNARMTHYQALLLDTDRVQFGPVVALNPATLLPLPEEGLQHDCLDILAEAHGTRSDLMDQPLPDADHTWYTDGSSFLQEGQRKAGAAVTTETEVIWARALPAGTSAQRAELIALTQALKMAEGKKLNVYTDSRYAFATAHIHGEIYRRRGWLTSEGKEIKNKDEILALLKALFLPKRLSIIHCPGHQKGNSAEARGNRMADQAAREVATRETPETSTLLAGKRTADGSEFEKRTADGSEFESPKKKAKVE

SEQ ID NO: 2232 - protein, 2096 aa, synthetic construct
MPAAKRVKLDGGDKKYSIGLDIGTNSVGWAVITDEYKVPSKKFKVLGNTDRHSIKKNLIGALLFDSGETAEATRLKRTARRRYTRRKNRICYLQEIFSNEMAKVDDSFFHRLEESFLVEEDKKHERHPIFGNIVDEVAYHEKYPTIYHLRKKLVDSTDKADLRLIYLALAHMIKFRGHFLIEGDLNPDNSDVDKLFIQLVQTYNQLFEENPINASGVDAKAILSARLSKSRRLENLIAQLPGEKKNGLFGNLIALSLGLTPNFKSNFDLAEDAKLQLSKDTYDDDLDNLLAQIGDQYADLFLAAKNLSDAILLSDILRVNTEITKAPLSASMIKRYDEHHQDLTLLKALVRQQLPEKYKEIFFDQSKNGYAGYIDGGASQEEFYKFIKPILEKMDGTEELLVKLNREDLLRKQRTFDNGSIPHQIHLGELHAILRRQEDFYPFLKDNREKIEKILTFRIPYYVGPLARGNSRFAWMTRKSEETITPWNFEEVVDKGASAQSFIERMTNFDKNLPNEKVLPKHSLLYEYFTVYNELTKVKYVTEGMRKPAFLSGEQKKAIVDLLFKTNRKVTVKQLKEDYFKKIECFDSVEISGVEDRFNASLGTYHDLLKIIKDKDFLDNEENEDILEDIVLTLTLFEDREMIEERLKTYAHLFDDKVMKQLKRRRYTGWGRLSRKLINGIRDKQSGKTILDFLKSDGFANRNFMQLIHDDSLTFKEDIQKAQVSGQGDSLHEHIANLAGSPAIKKGILQTVKVVDELVKVMGRHKPENIVIEMARENQTTQKGQKNSRERMKRIEEGIKELGSQILKEHPVENTQLQNEKLYLYYLQNGRDMYVDQELDINRLSDYDVDHIVPQSFLKDDSIDNKVLTRSDKARGKSDNVPSEEVVKKMKNYWRQLLNAKLITQRKFDNLTKAERGGLSELDKAGFIKRQLVETRQITKHVAQILDSRMNTKYDENDKLIREVKVITLKSKLVSDFRKDFQFYKVREINNYHHAHDAYLNAVVGTALIKKYPKLESEFVYGDYKVYDVRKMIAKSEQEIGKATAKYFFYSNIMNFFKTEITLANGEIRKRPLIETNGETGEIVWDKGRDFATVRKVLSMPQVNIVKKTEVQTGGFSKESILPKRNSDKLIARKKDWDPKKYGGFDSPTVAYSVLVVAKVEKGKSKKLKSVKELLGITIMERSSFEKNPIDFLEAKGYKEVKKDLIIKLPKYSLFELENGRKRMLASAGELQKGNELALPSKYVNFLYLASHYEKLKGSPEDNEQKQLFVEQHKHYLDEIIEQISEFSKRVILADANLDKVLSAYNKHRDKPIREQAENIIHLFTLTNLGAPAAFKYFDTTIDRKRYTSTKEVLDATLIHQSITGLYETRIDLSQLGGDGGPAPEAAAKGGSGGTLNIEDEYRLHETSKEPDVSLGSTWLSDFPQAWAETGGMGLAVRQAPLIIPLKATSTPVSIKQYPMSQEARLGIKPHIQRLLDQGILVPCQSPWNTPLLPVKKPGTNDYRPVQDLREVNKRVEDIHPTVPNPYNLLSGLPPSHQWYTVLDLKDAFFCLRLHPTSQPLFAFEWRDPEMGISGQLTWTRLPQGFKNSPTLFNEALHRDLAGFRIQHPDLILLQYVDDLLLAATSELDCQQGTRALLQTLGDLGYRASAKKAQICQKQVKYLGYLLKEGQRWLTEARKETVMGQPIPKTPRQLREFLGTAGFCRLWIPGFAEMAAPLYPLTKPGTLFNWGPDQQKAFQEIKQALLTAPALGLPDLTKPFELFVDEKQGYAKGVLTQKLGPWRRPVAYLSKKLDPVAAGWPPCLRMVAAIAVLTKDAGKLTMGQPLVILAPHAVEALVKQPPDRWLSNARMTHYQALLLDTDRVQFGPVVALNPATLLPLPEEGLQHDCLDILAEAHGTRSDLMDQPLPDADHTWYTDGSSFLQEGQRKAGAAVTTETEVIWARALPAGTSAQRAELIALTQALKMAEGKKLNVYTDSRYAFATAHIHGEIYRRRGWLTSEGKEIKNKDEILALLKALFLPKRLSIIHCPGHQKGNSAEARGNRMADQAAREVATRETPETSTLLAGKRTADGSEFEKRTADGSEFESPKKKAKVE

SEQ ID NO: 2233 - protein, 2093 aa, synthetic construct
MPAAKRVKLDGGDKKYSIGLDIGTNSVGWAVITDEYKVPSKKFKVLGNTDRHSIKKNLIGALLFDSGETAEATRLKRTARRRYTRRKNRICYLQEIFSNEMAKVDDSFFHRLEESFLVEEDKKHERHPIFGNIVDEVAYHEKYPTIYHLRKKLVDSTDKADLRLIYLALAHMIKFRGHFLIEGDLNPDNSDVDKLFIQLVQTYNQLFEENPINASGVDAKAILSARLSKSRRLENLIAQLPGEKKNGLFGNLIALSLGLTPNFKSNFDLAEDAKLQLSKDTYDDDLDNLLAQIGDQYADLFLAAKNLSDAILLSDILRVNTEITKAPLSASMIKRYDEHHQDLTLLKALVRQQLPEKYKEIFFDQSKNGYAGYIDGGASQEEFYKFIKPILEKMDGTEELLVKLNREDLLRKQRTFDNGSIPHQIHLGELHAILRRQEDFYPFLKDNREKIEKILTFRIPYYVGPLARGNSRFAWMTRKSEETITPWNFEEVVDKGASAQSFIERMTNFDKNLPNEKVLPKHSLLYEYFTVYNELTKVKYVTEGMRKPAFLSGEQKKAIVDLLFKTNRKVTVKQLKEDYFKKIECFDSVEISGVEDRFNASLGTYHDLLKIIKDKDFLDNEENEDILEDIVLTLTLFEDREMIEERLKTYAHLFDDKVMKQLKRRRYTGWGRLSRKLINGIRDKQSGKTILDFLKSDGFANRNFMQLIHDDSLTFKEDIQKAQVSGQGDSLHEHIANLAGSPAIKKGILQTVKVVDELVKVMGRHKPENIVIEMARENQTTQKGQKNSRERMKRIEEGIKELGSQILKEHPVENTQLQNEKLYLYYLQNGRDMYVDQELDINRLSDYDVDHIVPQSFLKDDSIDNKVLTRSDKARGKSDNVPSEEVVKKMKNYWRQLLNAKLITQRKFDNLTKAERGGLSELDKAGFIKRQLVETRQITKHVAQILDSRMNTKYDENDKLIREVKVITLKSKLVSDFRKDFQFYKVREINNYHHAHDAYLNAVVGTALIKKYPKLESEFVYGDYKVYDVRKMIAKSEQEIGKATAKYFFYSNIMNFFKTEITLANGEIRKRPLIETNGETGEIVWDKGRDFATVRKVLSMPQVNIVKKTEVQTGGFSKESILPKRNSDKLIARKKDWDPKKYGGFDSPTVAYSVLVVAKVEKGKSKKLKSVKELLGITIMERSSFEKNPIDFLEAKGYKEVKKDLIIKLPKYSLFELENGRKRMLASAGELQKGNELALPSKYVNFLYLASHYEKLKGSPEDNEQKQLFVEQHKHYLDEIIEQISEFSKRVILADANLDKVLSAYNKHRDKPIREQAENIIHLFTLTNLGAPAAFKYFDTTIDRKRYTSTKEVLDATLIHQSITGLYETRIDLSQLGGDGGGSSEAAAKGGTLNIEDEYRLHETSKEPDVSLGSTWLSDFPQAWAETGGMGLAVRQAPLIIPLKATSTPVSIKQYPMSQEARLGIKPHIQRLLDQGILVPCQSPWNTPLLPVKKPGTNDYRPVQDLREVNKRVEDIHPTVPNPYNLLSGLPPSHQWYTVLDLKDAFFCLRLHPTSQPLFAFEWRDPEMGISGQLTWTRLPQGFKNSPTLFNEALHRDLAGFRIQHPDLILLQYVDDLLLAATSELDCQQGTRALLQTLGDLGYRASAKKAQICQKQVKYLGYLLKEGQRWLTEARKETVMGQPIPKTPRQLREFLGTAGFCRLWIPGFAEMAAPLYPLTKPGTLFNWGPDQQKAFQEIKQALLTAPALGLPDLTKPFELFVDEKQGYAKGVLTQKLGPWRRPVAYLSKKLDPVAAGWPPCLRMVAAIAVLTKDAGKLTMGQPLVILAPHAVEALVKQPPDRWLSNARMTHYQALLLDTDRVQFGPVVALNPATLLPLPEEGLQHDCLDILAEAHGTRSDLMDQPLPDADHTWYTDGSSFLQEGQRKAGAAVTTETEVIWARALPAGTSAQRAELIALTQALKMAEGKKLNVYTDSRYAFATAHIHGEIYRRRGWLTSEGKEIKNKDEILALLKALFLPKRLSIIHCPGHQKGNSAEARGNRMADQAAREVATRETPETSTLLAGKRTADGSEFEKRTADGSEFESPKKKAKVE

SEQ ID NO: 2234 - protein, 2094 aa, synthetic construct
MPAAKRVKLDGGDKKYSIGLDIGTNSVGWAVITDEYKVPSKKFKVLGNTDRHSIKKNLIGALLFDSGETAEATRLKRTARRRYTRRKNRICYLQEIFSNEMAKVDDSFFHRLEESFLVEEDKKHERHPIFGNIVDEVAYHEKYPTIYHLRKKLVDSTDKADLRLIYLALAHMIKFRGHFLIEGDLNPDNSDVDKLFIQLVQTYNQLFEENPINASGVDAKAILSARLSKSRRLENLIAQLPGEKKNGLFGNLIALSLGLTPNFKSNFDLAEDAKLQLSKDTYDDDLDNLLAQIGDQYADLFLAAKNLSDAILLSDILRVNTEITKAPLSASMIKRYDEHHQDLTLLKALVRQQLPEKYKEIFFDQSKNGYAGYIDGGASQEEFYKFIKPILEKMDGTEELLVKLNREDLLRKQRTFDNGSIPHQIHLGELHAILRRQEDFYPFLKDNREKIEKILTFRIPYYVGPLARGNSRFAWMTRKSEETITPWNFEEVVDKGASAQSFIERMTNFDKNLPNEKVLPKHSLLYEYFTVYNELTKVKYVTEGMRKPAFLSGEQKKAIVDLLFKTNRKVTVKQLKEDYFKKIECFDSVEISGVEDRFNASLGTYHDLLKIIKDKDFLDNEENEDILEDIVLTLTLFEDREMIEERLKTYAHLFDDKVMKQLKRRRYTGWGRLSRKLINGIRDKQSGKTILDFLKSDGFANRNFMQLIHDDSLTFKEDIQKAQVSGQGDSLHEHIANLAGSPAIKKGILQTVKVVDELVKVMGRHKPENIVIEMARENQTTQKGQKNSRERMKRIEEGIKELGSQILKEHPVENTQLQNEKLYLYYLQNGRDMYVDQELDINRLSDYDVDHIVPQSFLKDDSIDNKVLTRSDKARGKSDNVPSEEVVKKMKNYWRQLLNAKLITQRKFDNLTKAERGGLSELDKAGFIKRQLVETRQITKHVAQILDSRMNTKYDENDKLIREVKVITLKSKLVSDFRKDFQFYKVREINNYHHAHDAYLNAVVGTALIKKYPKLESEFVYGDYKVYDVRKMIAKSEQEIGKATAKYFFYSNIMNFFKTEITLANGEIRKRPLIETNGETGEIVWDKGRDFATVRKVLSMPQVNIVKKTEVQTGGFSKESILPKRNSDKLIARKKDWDPKKYGGFDSPTVAYSVLVVAKVEKGKSKKLKSVKELLGITIMERSSFEKNPIDFLEAKGYKEVKKDLIIKLPKYSLFELENGRKRMLASAGELQKGNELALPSKYVNFLYLASHYEKLKGSPEDNEQKQLFVEQHKHYLDEIIEQISEFSKRVILADANLDKVLSAYNKHRDKPIREQAENIIHLFTLTNLGAPAAFKYFDTTIDRKRYTSTKEVLDATLIHQSITGLYETRIDLSQLGGDGGPAPGGGGSSGGTLNIEDEYRLHETSKEPDVSLGSTWLSDFPQAWAETGGMGLAVRQAPLIIPLKATSTPVSIKQYPMSQEARLGIKPHIQRLLDQGILVPCQSPWNTPLLPVKKPGTNDYRPVQDLREVNKRVEDIHPTVPNPYNLLSGLPPSHQWYTVLDLKDAFFCLRLHPTSQPLFAFEWRDPEMGISGQLTWTRLPQGFKNSPTLFNEALHRDLAGFRIQHPDLILLQYVDDLLLAATSELDCQQGTRALLQTLGDLGYRASAKKAQICQKQVKYLGYLLKEGQRWLTEARKETVMGQPIPKTPRQLREFLGTAGFCRLWIPGFAEMAAPLYPLTKPGTLFNWGPDQQKAFQEIKQALLTAPALGLPDLTKPFELFVDEKQGYAKGVLTQKLGPWRRPVAYLSKKLDPVAAGWPPCLRMVAAIAVLTKDAGKLTMGQPLVILAPHAVEALVKQPPDRWLSNARMTHYQALLLDTDRVQFGPVVALNPATLLPLPEEGLQHDCLDILAEAHGTRSDLMDQPLPDADHTWYTDGSSFLQEGQRKAGAAVTTETEVIWARALPAGTSAQRAELIALTQALKMAEGKKLNVYTDSRYAFATAHIHGEIYRRRGWLTSEGKEIKNKDEILALLKALFLPKRLSIIHCPGHQKGNSAEARGNRMADQAAREVATRETPETSTLLAGKRTADGSEFEKRTADGSEFESPKKKAKVE

SEQ ID NO: 2235 - protein, 2096 aa, synthetic construct
MPAAKRVKLDGGDKKYSIGLDIGTNSVGWAVITDEYKVPSKKFKVLGNTDRHSIKKNLIGALLFDSGETAEATRLKRTARRRYTRRKNRICYLQEIFSNEMAKVDDSFFHRLEESFLVEEDKKHERHPIFGNIVDEVAYHEKYPTIYHLRKKLVDSTDKADLRLIYLALAHMIKFRGHFLIEGDLNPDNSDVDKLFIQLVQTYNQLFEENPINASGVDAKAILSARLSKSRRLENLIAQLPGEKKNGLFGNLIALSLGLTPNFKSNFDLAEDAKLQLSKDTYDDDLDNLLAQIGDQYADLFLAAKNLSDAILLSDILRVNTEITKAPLSASMIKRYDEHHQDLTLLKALVRQQLPEKYKEIFFDQSKNGYAGYIDGGASQEEFYKFIKPILEKMDGTEELLVKLNREDLLRKQRTFDNGSIPHQIHLGELHAILRRQEDFYPFLKDNREKIEKILTFRIPYYVGPLARGNSRFAWMTRKSEETITPWNFEEVVDKGASAQSFIERMTNFDKNLPNEKVLPKHSLLYEYFTVYNELTKVKYVTEGMRKPAFLSGEQKKAIVDLLFKTNRKVTVKQLKEDYFKKIECFDSVEISGVEDRFNASLGTYHDLLKIIKDKDFLDNEENEDILEDIVLTLTLFEDREMIEERLKTYAHLFDDKVMKQLKRRRYTGWGRLSRKLINGIRDKQSGKTILDFLKSDGFANRNFMQLIHDDSLTFKEDIQKAQVSGQGDSLHEHIANLAGSPAIKKGILQTVKVVDELVKVMGRHKPENIVIEMARENQTTQKGQKNSRERMKRIEEGIKELGSQILKEHPVENTQLQNEKLYLYYLQNGRDMYVDQELDINRLSDYDVDHIVPQSFLKDDSIDNKVLTRSDKARGKSDNVPSEEVVKKMKNYWRQLLNAKLITQRKFDNLTKAERGGLSELDKAGFIKRQLVETRQITKHVAQILDSRMNTKYDENDKLIREVKVITLKSKLVSDFRKDFQFYKVREINNYHHAHDAYLNAVVGTALIKKYPKLESEFVYGDYKVYDVRKMIAKSEQEIGKATAKYFFYSNIMNFFKTEITLANGEIRKRPLIETNGETGEIVWDKGRDFATVRKVLSMPQVNIVKKTEVQTGGFSKESILPKRNSDKLIARKKDWDPKKYGGFDSPTVAYSVLVVAKVEKGKSKKLKSVKELLGITIMERSSFEKNPIDFLEAKGYKEVKKDLIIKLPKYSLFELENGRKRMLASAGELQKGNELALPSKYVNFLYLASHYEKLKGSPEDNEQKQLFVEQHKHYLDEIIEQISEFSKRVILADANLDKVLSAYNKHRDKPIREQAENIIHLFTLTNLGAPAAFKYFDTTIDRKRYTSTKEVLDATLIHQSITGLYETRIDLSQLGGDGGEAAAKGSSPAPGGTLNIEDEYRLHETSKEPDVSLGSTWLSDFPQAWAETGGMGLAVRQAPLIIPLKATSTPVSIKQYPMSQEARLGIKPHIQRLLDQGILVPCQSPWNTPLLPVKKPGTNDYRPVQDLREVNKRVEDIHPTVPNPYNLLSGLPPSHQWYTVLDLKDAFFCLRLHPTSQPLFAFEWRDPEMGISGQLTWTRLPQGFKNSPTLFNEALHRDLAGFRIQHPDLILLQYVDDLLLAATSELDCQQGTRALLQTLGDLGYRASAKKAQICQKQVKYLGYLLKEGQRWLTEARKETVMGQPIPKTPRQLREFLGTAGFCRLWIPGFAEMAAPLYPLTKPGTLFNWGPDQQKAFQEIKQALLTAPALGLPDLTKPFELFVDEKQGYAKGVLTQKLGPWRRPVAYLSKKLDPVAAGWPPCLRMVAAIAVLTKDAGKLTMGQPLVILAPHAVEALVKQPPDRWLSNARMTHYQALLLDTDRVQFGPVVALNPATLLPLPEEGLQHDCLDILAEAHGTRSDLMDQPLPDADHTWYTDGSSFLQEGQRKAGAAVTTETEVIWARALPAGTSAQRAELIALTQALKMAEGKKLNVYTDSRYAFATAHIHGEIYRRRGWLTSEGKEIKNKDEILALLKALFLPKRLSIIHCPGHQKGNSAEARGNRMADQAAREVATRETPETSTLLAGKRTADGSEFEKRTADGSEFESPKKKAKVE

SEQ ID NO: 2236 - protein, 2095 aa, synthetic construct
MPAAKRVKLDGGDKKYSIGLDIGTNSVGWAVITDEYKVPSKKFKVLGNTDRHSIKKNLIGALLFDSGETAEATRLKRTARRRYTRRKNRICYLQEIFSNEMAKVDDSFFHRLEESFLVEEDKKHERHPIFGNIVDEVAYHEKYPTIYHLRKKLVDSTDKADLRLIYLALAHMIKFRGHFLIEGDLNPDNSDVDKLFIQLVQTYNQLFEENPINASGVDAKAILSARLSKSRRLENLIAQLPGEKKNGLFGNLIALSLGLTPNFKSNFDLAEDAKLQLSKDTYDDDLDNLLAQIGDQYADLFLAAKNLSDAILLSDILRVNTEITKAPLSASMIKRYDEHHQDLTLLKALVRQQLPEKYKEIFFDQSKNGYAGYIDGGASQEEFYKFIKPILEKMDGTEELLVKLNREDLLRKQRTFDNGSIPHQIHLGELHAILRRQEDFYPFLKDNREKIEKILTFRIPYYVGPLARGNSRFAWMTRKSEETITPWNFEEVVDKGASAQSFIERMTNFDKNLPNEKVLPKHSLLYEYFTVYNELTKVKYVTEGMRKPAFLSGEQKKAIVDLLFKTNRKVTVKQLKEDYFKKIECFDSVEISGVEDRFNASLGTYHDLLKIIKDKDFLDNEENEDILEDIVLTLTLFEDREMIEERLKTYAHLFDDKVMKQLKRRRYTGWGRLSRKLINGIRDKQSGKTILDFLKSDGFANRNFMQLIHDDSLTFKEDIQKAQVSGQGDSLHEHIANLAGSPAIKKGILQTVKVVDELVKVMGRHKPENIVIEMARENQTTQKGQKNSRERMKRIEEGIKELGSQILKEHPVENTQLQNEKLYLYYLQNGRDMYVDQELDINRLSDYDVDHIVPQSFLKDDSIDNKVLTRSDKARGKSDNVPSEEVVKKMKNYWRQLLNAKLITQRKFDNLTKAERGGLSELDKAGFIKRQLVETRQITKHVAQILDSRMNTKYDENDKLIREVKVITLKSKLVSDFRKDFQFYKVREINNYHHAHDAYLNAVVGTALIKKYPKLESEFVYGDYKVYDVRKMIAKSEQEIGKATAKYFFYSNIMNFFKTEITLANGEIRKRPLIETNGETGEIVWDKGRDFATVRKVLSMPQVNIVKKTEVQTGGFSKESILPKRNSDKLIARKKDWDPKKYGGFDSPTVAYSVLVVAKVEKGKSKKLKSVKELLGITIMERSSFEKNPIDFLEAKGYKEVKKDLIIKLPKYSLFELENGRKRMLASAGELQKGNELALPSKYVNFLYLASHYEKLKGSPEDNEQKQLFVEQHKHYLDEIIEQISEFSKRVILADANLDKVLSAYNKHRDKPIREQAENIIHLFTLTNLGAPAAFKYFDTTIDRKRYTSTKEVLDATLIHQSITGLYETRIDLSQLGGDGGEAAAKEAAAKGGTLNIEDEYRLHETSKEPDVSLGSTWLSDFPQAWAETGGMGLAVRQAPLIIPLKATSTPVSIKQYPMSQEARLGIKPHIQRLLDQGILVPCQSPWNTPLLPVKKPGTNDYRPVQDLREVNKRVEDIHPTVPNPYNLLSGLPPSHQWYTVLDLKDAFFCLRLHPTSQPLFAFEWRDPEMGISGQLTWTRLPQGFKNSPTLFNEALHRDLAGFRIQHPDLILLQYVDDLLLAATSELDCQQGTRALLQTLGDLGYRASAKKAQICQKQVKYLGYLLKEGQRWLTEARKETVMGQPIPKTPRQLREFLGTAGFCRLWIPGFAEMAAPLYPLTKPGTLFNWGPDQQKAFQEIKQALLTAPALGLPDLTKPFELFVDEKQGYAKGVLTQKLGPWRRPVAYLSKKLDPVAAGWPPCLRMVAAIAVLTKDAGKLTMGQPLVILAPHAVEALVKQPPDRWLSNARMTHYQALLLDTDRVQFGPVVALNPATLLPLPEEGLQHDCLDILAEAHGTRSDLMDQPLPDADHTWYTDGSSFLQEGQRKAGAAVTTETEVIWARALPAGTSAQRAELIALTQALKMAEGKKLNVYTDSRYAFATAHIHGEIYRRRGWLTSEGKEIKNKDEILALLKALFLPKRLSIIHCPGHQKGNSAEARGNRMADQAAREVATRETPETSTLLAGKRTADGSEFEKRTADGSEFESPKKKAKVE

SEQ ID NO: 2237 - protein, 2105 aa, synthetic construct
MPAAKRVKLDGGDKKYSIGLDIGTNSVGWAVITDEYKVPSKKFKVLGNTDRHSIKKNLIGALLFDSGETAEATRLKRTARRRYTRRKNRICYLQEIFSNEMAKVDDSFFHRLEESFLVEEDKKHERHPIFGNIVDEVAYHEKYPTIYHLRKKLVDSTDKADLRLIYLALAHMIKFRGHFLIEGDLNPDNSDVDKLFIQLVQTYNQLFEENPINASGVDAKAILSARLSKSRRLENLIAQLPGEKKNGLFGNLIALSLGLTPNFKSNFDLAEDAKLQLSKDTYDDDLDNLLAQIGDQYADLFLAAKNLSDAILLSDILRVNTEITKAPLSASMIKRYDEHHQDLTLLKALVRQQLPEKYKEIFFDQSKNGYAGYIDGGASQEEFYKFIKPILEKMDGTEELLVKLNREDLLRKQRTFDNGSIPHQIHLGELHAILRRQEDFYPFLKDNREKIEKILTFRIPYYVGPLARGNSRFAWMTRKSEETITPWNFEEVVDKGASAQSFIERMTNFDKNLPNEKVLPKHSLLYEYFTVYNELTKVKYVTEGMRKPAFLSGEQKKAIVDLLFKTNRKVTVKQLKEDYFKKIECFDSVEISGVEDRFNASLGTYHDLLKIIKDKDFLDNEENEDILEDIVLTLTLFEDREMIEERLKTYAHLFDDKVMKQLKRRRYTGWGRLSRKLINGIRDKQSGKTILDFLKSDGFANRNFMQLIHDDSLTFKEDIQKAQVSGQGDSLHEHIANLAGSPAIKKGILQTVKVVDELVKVMGRHKPENIVIEMARENQTTQKGQKNSRERMKRIEEGIKELGSQILKEHPVENTQLQNEKLYLYYLQNGRDMYVDQELDINRLSDYDVDHIVPQSFLKDDSIDNKVLTRSDKARGKSDNVPSEEVVKKMKNYWRQLLNAKLITQRKFDNLTKAERGGLSELDKAGFIKRQLVETRQITKHVAQILDSRMNTKYDENDKLIREVKVITLKSKLVSDFRKDFQFYKVREINNYHHAHDAYLNAVVGTALIKKYPKLESEFVYGDYKVYDVRKMIAKSEQEIGKATAKYFFYSNIMNFFKTEITLANGEIRKRPLIETNGETGEIVWDKGRDFATVRKVLSMPQVNIVKKTEVQTGGFSKESILPKRNSDKLIARKKDWDPKKYGGFDSPTVAYSVLVVAKVEKGKSKKLKSVKELLGITIMERSSFEKNPIDFLEAKGYKEVKKDLIIKLPKYSLFELENGRKRMLASAGELQKGNELALPSKYVNFLYLASHYEKLKGSPEDNEQKQLFVEQHKHYLDEIIEQISEFSKRVILADANLDKVLSAYNKHRDKPIREQAENIIHLFTLTNLGAPAAFKYFDTTIDRKRYTSTKEVLDATLIHQSITGLYETRIDLSQLGGDGGEAAAKEAAAKEAAAKEAAAKGGTLNIEDEYRLHETSKEPDVSLGSTWLSDFPQAWAETGGMGLAVRQAPLIIPLKATSTPVSIKQYPMSQEARLGIKPHIQRLLDQGILVPCQSPWNTPLLPVKKPGTNDYRPVQDLREVNKRVEDIHPTVPNPYNLLSGLPPSHQWYTVLDLKDAFFCLRLHPTSQPLFAFEWRDPEMGISGQLTWTRLPQGFKNSPTLFNEALHRDLAGFRIQHPDLILLQYVDDLLLAATSELDCQQGTRALLQTLGDLGYRASAKKAQICQKQVKYLGYLLKEGQRWLTEARKETVMGQPIPKTPRQLREFLGTAGFCRLWIPGFAEMAAPLYPLTKPGTLFNWGPDQQKAFQEIKQALLTAPALGLPDLTKPFELFVDEKQGYAKGVLTQKLGPWRRPVAYLSKKLDPVAAGWPPCLRMVAAIAVLTKDAGKLTMGQPLVILAPHAVEALVKQPPDRWLSNARMTHYQALLLDTDRVQFGPVVALNPATLLPLPEEGLQHDCLDILAEAHGTRSDLMDQPLPDADHTWYTDGSSFLQEGQRKAGAAVTTETEVIWARALPAGTSAQRAELIALTQALKMAEGKKLNVYTDSRYAFATAHIHGEIYRRRGWLTSEGKEIKNKDEILALLKALFLPKRLSIIHCPGHQKGNSAEARGNRMADQAAREVATRETPETSTLLAGKRTADGSEFEKRTADGSEFESPKKKAKVE

SEQ ID NO: 2238 - protein, 2093 aa, synthetic construct
MPAAKRVKLDGGDKKYSIGLDIGTNSVGWAVITDEYKVPSKKFKVLGNTDRHSIKKNLIGALLFDSGETAEATRLKRTARRRYTRRKNRICYLQEIFSNEMAKVDDSFFHRLEESFLVEEDKKHERHPIFGNIVDEVAYHEKYPTIYHLRKKLVDSTDKADLRLIYLALAHMIKFRGHFLIEGDLNPDNSDVDKLFIQLVQTYNQLFEENPINASGVDAKAILSARLSKSRRLENLIAQLPGEKKNGLFGNLIALSLGLTPNFKSNFDLAEDAKLQLSKDTYDDDLDNLLAQIGDQYADLFLAAKNLSDAILLSDILRVNTEITKAPLSASMIKRYDEHHQDLTLLKALVRQQLPEKYKEIFFDQSKNGYAGYIDGGASQEEFYKFIKPILEKMDGTEELLVKLNREDLLRKQRTFDNGSIPHQIHLGELHAILRRQEDFYPFLKDNREKIEKILTFRIPYYVGPLARGNSRFAWMTRKSEETITPWNFEEVVDKGASAQSFIERMTNFDKNLPNEKVLPKHSLLYEYFTVYNELTKVKYVTEGMRKPAFLSGEQKKAIVDLLFKTNRKVTVKQLKEDYFKKIECFDSVEISGVEDRFNASLGTYHDLLKIIKDKDFLDNEENEDILEDIVLTLTLFEDREMIEERLKTYAHLFDDKVMKQLKRRRYTGWGRLSRKLINGIRDKQSGKTILDFLKSDGFANRNFMQLIHDDSLTFKEDIQKAQVSGQGDSLHEHIANLAGSPAIKKGILQTVKVVDELVKVMGRHKPENIVIEMARENQTTQKGQKNSRERMKRIEEGIKELGSQILKEHPVENTQLQNEKLYLYYLQNGRDMYVDQELDINRLSDYDVDHIVPQSFLKDDSIDNKVLTRSDKARGKSDNVPSEEVVKKMKNYWRQLLNAKLITQRKFDNLTKAERGGLSELDKAGFIKRQLVETRQITKHVAQILDSRMNTKYDENDKLIREVKVITLKSKLVSDFRKDFQFYKVREINNYHHAHDAYLNAVVGTALIKKYPKLESEFVYGDYKVYDVRKMIAKSEQEIGKATAKYFFYSNIMNFFKTEITLANGEIRKRPLIETNGETGEIVWDKGRDFATVRKVLSMPQVNIVKKTEVQTGGFSKESILPKRNSDKLIARKKDWDPKKYGGFDSPTVAYSVLVVAKVEKGKSKKLKSVKELLGITIMERSSFEKNPIDFLEAKGYKEVKKDLIIKLPKYSLFELENGRKRMLASAGELQKGNELALPSKYVNFLYLASHYEKLKGSPEDNEQKQLFVEQHKHYLDEIIEQISEFSKRVILADANLDKVLSAYNKHRDKPIREQAENIIHLFTLTNLGAPAAFKYFDTTIDRKRYTSTKEVLDATLIHQSITGLYETRIDLSQLGGDGGEAAAKGGSGGTLNIEDEYRLHETSKEPDVSLGSTWLSDFPQAWAETGGMGLAVRQAPLIIPLKATSTPVSIKQYPMSQEARLGIKPHIQRLLDQGILVPCQSPWNTPLLPVKKPGTNDYRPVQDLREVNKRVEDIHPTVPNPYNLLSGLPPSHQWYTVLDLKDAFFCLRLHPTSQPLFAFEWRDPEMGISGQLTWTRLPQGFKNSPTLFNEALHRDLAGFRIQHPDLILLQYVDDLLLAATSELDCQQGTRALLQTLGDLGYRASAKKAQICQKQVKYLGYLLKEGQRWLTEARKETVMGQPIPKTPRQLREFLGTAGFCRLWIPGFAEMAAPLYPLTKPGTLFNWGPDQQKAFQEIKQALLTAPALGLPDLTKPFELFVDEKQGYAKGVLTQKLGPWRRPVAYLSKKLDPVAAGWPPCLRMVAAIAVLTKDAGKLTMGQPLVILAPHAVEALVKQPPDRWLSNARMTHYQALLLDTDRVQFGPVVALNPATLLPLPEEGLQHDCLDILAEAHGTRSDLMDQPLPDADHTWYTDGSSFLQEGQRKAGAAVTTETEVIWARALPAGTSAQRAELIALTQALKMAEGKKLNVYTDSRYAFATAHIHGEIYRRRGWLTSEGKEIKNKDEILALLKALFLPKRLSIIHCPGHQKGNSAEARGNRMADQAAREVATRETPETSTLLAGKRTADGSEFEKRTADGSEFESPKKKAKVE

SEQ ID NO: 2239 - protein, 2096 aa, synthetic construct
MPAAKRVKLDGGDKKYSIGLDIGTNSVGWAVITDEYKVPSKKFKVLGNTDRHSIKKNLIGALLFDSGETAEATRLKRTARRRYTRRKNRICYLQEIFSNEMAKVDDSFFHRLEESFLVEEDKKHERHPIFGNIVDEVAYHEKYPTIYHLRKKLVDSTDKADLRLIYLALAHMIKFRGHFLIEGDLNPDNSDVDKLFIQLVQTYNQLFEENPINASGVDAKAILSARLSKSRRLENLIAQLPGEKKNGLFGNLIALSLGLTPNFKSNFDLAEDAKLQLSKDTYDDDLDNLLAQIGDQYADLFLAAKNLSDAILLSDILRVNTEITKAPLSASMIKRYDEHHQDLTLLKALVRQQLPEKYKEIFFDQSKNGYAGYIDGGASQEEFYKFIKPILEKMDGTEELLVKLNREDLLRKQRTFDNGSIPHQIHLGELHAILRRQEDFYPFLKDNREKIEKILTFRIPYYVGPLARGNSRFAWMTRKSEETITPWNFEEVVDKGASAQSFIERMTNFDKNLPNEKVLPKHSLLYEYFTVYNELTKVKYVTEGMRKPAFLSGEQKKAIVDLLFKTNRKVTVKQLKEDYFKKIECFDSVEISGVEDRFNASLGTYHDLLKIIKDKDFLDNEENEDILEDIVLTLTLFEDREMIEERLKTYAHLFDDKVMKQLKRRRYTGWGRLSRKLINGIRDKQSGKTILDFLKSDGFANRNFMQLIHDDSLTFKEDIQKAQVSGQGDSLHEHIANLAGSPAIKKGILQTVKVVDELVKVMGRHKPENIVIEMARENQTTQKGQKNSRERMKRIEEGIKELGSQILKEHPVENTQLQNEKLYLYYLQNGRDMYVDQELDINRLSDYDVDHIVPQSFLKDDSIDNKVLTRSDKARGKSDNVPSEEVVKKMKNYWRQLLNAKLITQRKFDNLTKAERGGLSELDKAGFIKRQLVETRQITKHVAQILDSRMNTKYDENDKLIREVKVITLKSKLVSDFRKDFQFYKVREINNYHHAHDAYLNAVVGTALIKKYPKLESEFVYGDYKVYDVRKMIAKSEQEIGKATAKYFFYSNIMNFFKTEITLANGEIRKRPLIETNGETGEIVWDKGRDFATVRKVLSMPQVNIVKKTEVQTGGFSKESILPKRNSDKLIARKKDWDPKKYGGFDSPTVAYSVLVVAKVEKGKSKKLKSVKELLGITIMERSSFEKNPIDFLEAKGYKEVKKDLIIKLPKYSLFELENGRKRMLASAGELQKGNELALPSKYVNFLYLASHYEKLKGSPEDNEQKQLFVEQHKHYLDEIIEQISEFSKRVILADANLDKVLSAYNKHRDKPIREQAENIIHLFTLTNLGAPAAFKYFDTTIDRKRYTSTKEVLDATLIHQSITGLYETRIDLSQLGGDGGEAAAKGGSGSSGGTLNIEDEYRLHETSKEPDVSLGSTWLSDFPQAWAETGGMGLAVRQAPLIIPLKATSTPVSIKQYPMSQEARLGIKPHIQRLLDQGILVPCQSPWNTPLLPVKKPGTNDYRPVQDLREVNKRVEDIHPTVPNPYNLLSGLPPSHQWYTVLDLKDAFFCLRLHPTSQPLFAFEWRDPEMGISGQLTWTRLPQGFKNSPTLFNEALHRDLAGFRIQHPDLILLQYVDDLLLAATSELDCQQGTRALLQTLGDLGYRASAKKAQICQKQVKYLGYLLKEGQRWLTEARKETVMGQPIPKTPRQLREFLGTAGFCRLWIPGFAEMAAPLYPLTKPGTLFNWGPDQQKAFQEIKQALLTAPALGLPDLTKPFELFVDEKQGYAKGVLTQKLGPWRRPVAYLSKKLDPVAAGWPPCLRMVAAIAVLTKDAGKLTMGQPLVILAPHAVEALVKQPPDRWLSNARMTHYQALLLDTDRVQFGPVVALNPATLLPLPEEGLQHDCLDILAEAHGTRSDLMDQPLPDADHTWYTDGSSFLQEGQRKAGAAVTTETEVIWARALPAGTSAQRAELIALTQALKMAEGKKLNVYTDSRYAFATAHIHGEIYRRRGWLTSEGKEIKNKDEILALLKALFLPKRLSIIHCPGHQKGNSAEARGNRMADQAAREVATRETPETSTLLAGKRTADGSEFEKRTADGSEFESPKKKAKVE

SEQ ID NO: 2240 - protein, 2100 aa, synthetic construct
MPAAKRVKLDGGDKKYSIGLDIGTNSVGWAVITDEYKVPSKKFKVLGNTDRHSIKKNLIGALLFDSGETAEATRLKRTARRRYTRRKNRICYLQEIFSNEMAKVDDSFFHRLEESFLVEEDKKHERHPIFGNIVDEVAYHEKYPTIYHLRKKLVDSTDKADLRLIYLALAHMIKFRGHFLIEGDLNPDNSDVDKLFIQLVQTYNQLFEENPINASGVDAKAILSARLSKSRRLENLIAQLPGEKKNGLFGNLIALSLGLTPNFKSNFDLAEDAKLQLSKDTYDDDLDNLLAQIGDQYADLFLAAKNLSDAILLSDILRVNTEITKAPLSASMIKRYDEHHQDLTLLKALVRQQLPEKYKEIFFDQSKNGYAGYIDGGASQEEFYKFIKPILEKMDGTEELLVKLNREDLLRKQRTFDNGSIPHQIHLGELHAILRRQEDFYPFLKDNREKIEKILTFRIPYYVGPLARGNSRFAWMTRKSEETITPWNFEEVVDKGASAQSFIERMTNFDKNLPNEKVLPKHSLLYEYFTVYNELTKVKYVTEGMRKPAFLSGEQKKAIVDLLFKTNRKVTVKQLKEDYFKKIECFDSVEISGVEDRFNASLGTYHDLLKIIKDKDFLDNEENEDILEDIVLTLTLFEDREMIEERLKTYAHLFDDKVMKQLKRRRYTGWGRLSRKLINGIRDKQSGKTILDFLKSDGFANRNFMQLIHDDSLTFKEDIQKAQVSGQGDSLHEHIANLAGSPAIKKGILQTVKVVDELVKVMGRHKPENIVIEMARENQTTQKGQKNSRERMKRIEEGIKELGSQILKEHPVENTQLQNEKLYLYYLQNGRDMYVDQELDINRLSDYDVDHIVPQSFLKDDSIDNKVLTRSDKARGKSDNVPSEEVVKKMKNYWRQLLNAKLITQRKFDNLTKAERGGLSELDKAGFIKRQLVETRQITKHVAQILDSRMNTKYDENDKLIREVKVITLKSKLVSDFRKDFQFYKVREINNYHHAHDAYLNAVVGTALIKKYPKLESEFVYGDYKVYDVRKMIAKSEQEIGKATAKYFFYSNIMNFFKTEITLANGEIRKRPLIETNGETGEIVWDKGRDFATVRKVLSMPQVNIVKKTEVQTGGFSKESILPKRNSDKLIARKKDWDPKKYGGFDSPTVAYSVLVVAKVEKGKSKKLKSVKELLGITIMERSSFEKNPIDFLEAKGYKEVKKDLIIKLPKYSLFELENGRKRMLASAGELQKGNELALPSKYVNFLYLASHYEKLKGSPEDNEQKQLFVEQHKHYLDEIIEQISEFSKRVILADANLDKVLSAYNKHRDKPIREQAENIIHLFTLTNLGAPAAFKYFDTTIDRKRYTSTKEVLDATLIHQSITGLYETRIDLSQLGGDGGGGGGSGGGGSGGGGSGGTLNIEDEYRLHETSKEPDVSLGSTWLSDFPQAWAETGGMGLAVRQAPLIIPLKATSTPVSIKQYPMSQEARLGIKPHIQRLLDQGILVPCQSPWNTPLLPVKKPGTNDYRPVQDLREVNKRVEDIHPTVPNPYNLLSGLPPSHQWYTVLDLKDAFFCLRLHPTSQPLFAFEWRDPEMGISGQLTWTRLPQGFKNSPTLFNEALHRDLAGFRIQHPDLILLQYVDDLLLAATSELDCQQGTRALLQTLGDLGYRASAKKAQICQKQVKYLGYLLKEGQRWLTEARKETVMGQPIPKTPRQLREFLGTAGFCRLWIPGFAEMAAPLYPLTKPGTLFNWGPDQQKAFQEIKQALLTAPALGLPDLTKPFELFVDEKQGYAKGVLTQKLGPWRRPVAYLSKKLDPVAAGWPPCLRMVAAIAVLTKDAGKLTMGQPLVILAPHAVEALVKQPPDRWLSNARMTHYQALLLDTDRVQFGPVVALNPATLLPLPEEGLQHDCLDILAEAHGTRSDLMDQPLPDADHTWYTDGSSFLQEGQRKAGAAVTTETEVIWARALPAGTSAQRAELIALTQALKMAEGKKLNVYTDSRYAFATAHIHGEIYRRRGWLTSEGKEIKNKDEILALLKALFLPKRLSIIHCPGHQKGNSAEARGNRMADQAAREVATRETPETSTLLAGKRTADGSEFEKRTADGSEFESPKKKAKVE

SEQ ID NO: 2241 - protein, 2093 aa, synthetic construct
MPAAKRVKLDGGDKKYSIGLDIGTNSVGWAVITDEYKVPSKKFKVLGNTDRHSIKKNLIGALLFDSGETAEATRLKRTARRRYTRRKNRICYLQEIFSNEMAKVDDSFFHRLEESFLVEEDKKHERHPIFGNIVDEVAYHEKYPTIYHLRKKLVDSTDKADLRLIYLALAHMIKFRGHFLIEGDLNPDNSDVDKLFIQLVQTYNQLFEENPINASGVDAKAILSARLSKSRRLENLIAQLPGEKKNGLFGNLIALSLGLTPNFKSNFDLAEDAKLQLSKDTYDDDLDNLLAQIGDQYADLFLAAKNLSDAILLSDILRVNTEITKAPLSASMIKRYDEHHQDLTLLKALVRQQLPEKYKEIFFDQSKNGYAGYIDGGASQEEFYKFIKPILEKMDGTEELLVKLNREDLLRKQRTFDNGSIPHQIHLGELHAILRRQEDFYPFLKDNREKIEKILTFRIPYYVGPLARGNSRFAWMTRKSEETITPWNFEEVVDKGASAQSFIERMTNFDKNLPNEKVLPKHSLLYEYFTVYNELTKVKYVTEGMRKPAFLSGEQKKAIVDLLFKTNRKVTVKQLKEDYFKKIECFDSVEISGVEDRFNASLGTYHDLLKIIKDKDFLDNEENEDILEDIVLTLTLFEDREMIEERLKTYAHLFDDKVMKQLKRRRYTGWGRLSRKLINGIRDKQSGKTILDFLKSDGFANRNFMQLIHDDSLTFKEDIQKAQVSGQGDSLHEHIANLAGSPAIKKGILQTVKVVDELVKVMGRHKPENIVIEMARENQTTQKGQKNSRERMKRIEEGIKELGSQILKEHPVENTQLQNEKLYLYYLQNGRDMYVDQELDINRLSDYDVDHIVPQSFLKDDSIDNKVLTRSDKARGKSDNVPSEEVVKKMKNYWRQLLNAKLITQRKFDNLTKAERGGLSELDKAGFIKRQLVETRQITKHVAQILDSRMNTKYDENDKLIREVKVITLKSKLVSDFRKDFQFYKVREINNYHHAHDAYLNAVVGTALIKKYPKLESEFVYGDYKVYDVRKMIAKSEQEIGKATAKYFFYSNIMNFFKTEITLANGEIRKRPLIETNGETGEIVWDKGRDFATVRKVLSMPQVNIVKKTEVQTGGFSKESILPKRNSDKLIARKKDWDPKKYGGFDSPTVAYSVLVVAKVEKGKSKKLKSVKELLGITIMERSSFEKNPIDFLEAKGYKEVKKDLIIKLPKYSLFELENGRKRMLASAGELQKGNELALPSKYVNFLYLASHYEKLKGSPEDNEQKQLFVEQHKHYLDEIIEQISEFSKRVILADANLDKVLSAYNKHRDKPIREQAENIIHLFTLTNLGAPAAFKYFDTTIDRKRYTSTKEVLDATLIHQSITGLYETRIDLSQLGGDGGGGGEAAAKGGTLNIEDEYRLHETSKEPDVSLGSTWLSDFPQAWAETGGMGLAVRQAPLIIPLKATSTPVSIKQYPMSQEARLGIKPHIQRLLDQGILVPCQSPWNTPLLPVKKPGTNDYRPVQDLREVNKRVEDIHPTVPNPYNLLSGLPPSHQWYTVLDLKDAFFCLRLHPTSQPLFAFEWRDPEMGISGQLTWTRLPQGFKNSPTLFNEALHRDLAGFRIQHPDLILLQYVDDLLLAATSELDCQQGTRALLQTLGDLGYRASAKKAQICQKQVKYLGYLLKEGQRWLTEARKETVMGQPIPKTPRQLREFLGTAGFCRLWIPGFAEMAAPLYPLTKPGTLFNWGPDQQKAFQEIKQALLTAPALGLPDLTKPFELFVDEKQGYAKGVLTQKLGPWRRPVAYLSKKLDPVAAGWPPCLRMVAAIAVLTKDAGKLTMGQPLVILAPHAVEALVKQPPDRWLSNARMTHYQALLLDTDRVQFGPVVALNPATLLPLPEEGLQHDCLDILAEAHGTRSDLMDQPLPDADHTWYTDGSSFLQEGQRKAGAAVTTETEVIWARALPAGTSAQRAELIALTQALKMAEGKKLNVYTDSRYAFATAHIHGEIYRRRGWLTSEGKEIKNKDEILALLKALFLPKRLSIIHCPGHQKGNSAEARGNRMADQAAREVATRETPETSTLLAGKRTADGSEFEKRTADGSEFESPKKKAKVE

SEQ ID NO: 2242 - protein, 2088 aa, synthetic construct
MPAAKRVKLDGGDKKYSIGLDIGTNSVGWAVITDEYKVPSKKFKVLGNTDRHSIKKNLIGALLFDSGETAEATRLKRTARRRYTRRKNRICYLQEIFSNEMAKVDDSFFHRLEESFLVEEDKKHERHPIFGNIVDEVAYHEKYPTIYHLRKKLVDSTDKADLRLIYLALAHMIKFRGHFLIEGDLNPDNSDVDKLFIQLVQTYNQLFEENPINASGVDAKAILSARLSKSRRLENLIAQLPGEKKNGLFGNLIALSLGLTPNFKSNFDLAEDAKLQLSKDTYDDDLDNLLAQIGDQYADLFLAAKNLSDAILLSDILRVNTEITKAPLSASMIKRYDEHHQDLTLLKALVRQQLPEKYKEIFFDQSKNGYAGYIDGGASQEEFYKFIKPILEKMDGTEELLVKLNREDLLRKQRTFDNGSIPHQIHLGELHAILRRQEDFYPFLKDNREKIEKILTFRIPYYVGPLARGNSRFAWMTRKSEETITPWNFEEVVDKGASAQSFIERMTNFDKNLPNEKVLPKHSLLYEYFTVYNELTKVKYVTEGMRKPAFLSGEQKKAIVDLLFKTNRKVTVKQLKEDYFKKIECFDSVEISGVEDRFNASLGTYHDLLKIIKDKDFLDNEENEDILEDIVLTLTLFEDREMIEERLKTYAHLFDDKVMKQLKRRRYTGWGRLSRKLINGIRDKQSGKTILDFLKSDGFANRNFMQLIHDDSLTFKEDIQKAQVSGQGDSLHEHIANLAGSPAIKKGILQTVKVVDELVKVMGRHKPENIVIEMARENQTTQKGQKNSRERMKRIEEGIKELGSQILKEHPVENTQLQNEKLYLYYLQNGRDMYVDQELDINRLSDYDVDHIVPQSFLKDDSIDNKVLTRSDKARGKSDNVPSEEVVKKMKNYWRQLLNAKLITQRKFDNLTKAERGGLSELDKAGFIKRQLVETRQITKHVAQILDSRMNTKYDENDKLIREVKVITLKSKLVSDFRKDFQFYKVREINNYHHAHDAYLNAVVGTALIKKYPKLESEFVYGDYKVYDVRKMIAKSEQEIGKATAKYFFYSNIMNFFKTEITLANGEIRKRPLIETNGETGEIVWDKGRDFATVRKVLSMPQVNIVKKTEVQTGGFSKESILPKRNSDKLIARKKDWDPKKYGGFDSPTVAYSVLVVAKVEKGKSKKLKSVKELLGITIMERSSFEKNPIDFLEAKGYKEVKKDLIIKLPKYSLFELENGRKRMLASAGELQKGNELALPSKYVNFLYLASHYEKLKGSPEDNEQKQLFVEQHKHYLDEIIEQISEFSKRVILADANLDKVLSAYNKHRDKPIREQAENIIHLFTLTNLGAPAAFKYFDTTIDRKRYTSTKEVLDATLIHQSITGLYETRIDLSQLGGDGGGSSGGTLNIEDEYRLHETSKEPDVSLGSTWLSDFPQAWAETGGMGLAVRQAPLIIPLKATSTPVSIKQYPMSQEARLGIKPHIQRLLDQGILVPCQSPWNTPLLPVKKPGTNDYRPVQDLREVNKRVEDIHPTVPNPYNLLSGLPPSHQWYTVLDLKDAFFCLRLHPTSQPLFAFEWRDPEMGISGQLTWTRLPQGFKNSPTLFNEALHRDLAGFRIQHPDLILLQYVDDLLLAATSELDCQQGTRALLQTLGDLGYRASAKKAQICQKQVKYLGYLLKEGQRWLTEARKETVMGQPIPKTPRQLREFLGTAGFCRLWIPGFAEMAAPLYPLTKPGTLFNWGPDQQKAFQEIKQALLTAPALGLPDLTKPFELFVDEKQGYAKGVLTQKLGPWRRPVAYLSKKLDPVAAGWPPCLRMVAAIAVLTKDAGKLTMGQPLVILAPHAVEALVKQPPDRWLSNARMTHYQALLLDTDRVQFGPVVALNPATLLPLPEEGLQHDCLDILAEAHGTRSDLMDQPLPDADHTWYTDGSSFLQEGQRKAGAAVTTETEVIWARALPAGTSAQRAELIALTQALKMAEGKKLNVYTDSRYAFATAHIHGEIYRRRGWLTSEGKEIKNKDEILALLKALFLPKRLSIIHCPGHQKGNSAEARGNRMADQAAREVATRETPETSTLLAGKRTADGSEFEKRTADGSEFESPKKKAKVE

SEQ ID NO: 2243 - protein, 2090 aa, synthetic construct
MPAAKRVKLDGGDKKYSIGLDIGTNSVGWAVITDEYKVPSKKFKVLGNTDRHSIKKNLIGALLFDSGETAEATRLKRTARRRYTRRKNRICYLQEIFSNEMAKVDDSFFHRLEESFLVEEDKKHERHPIFGNIVDEVAYHEKYPTIYHLRKKLVDSTDKADLRLIYLALAHMIKFRGHFLIEGDLNPDNSDVDKLFIQLVQTYNQLFEENPINASGVDAKAILSARLSKSRRLENLIAQLPGEKKNGLFGNLIALSLGLTPNFKSNFDLAEDAKLQLSKDTYDDDLDNLLAQIGDQYADLFLAAKNLSDAILLSDILRVNTEITKAPLSASMIKRYDEHHQDLTLLKALVRQQLPEKYKEIFFDQSKNGYAGYIDGGASQEEFYKFIKPILEKMDGTEELLVKLNREDLLRKQRTFDNGSIPHQIHLGELHAILRRQEDFYPFLKDNREKIEKILTFRIPYYVGPLARGNSRFAWMTRKSEETITPWNFEEVVDKGASAQSFIERMTNFDKNLPNEKVLPKHSLLYEYFTVYNELTKVKYVTEGMRKPAFLSGEQKKAIVDLLFKTNRKVTVKQLKEDYFKKIECFDSVEISGVEDRFNASLGTYHDLLKIIKDKDFLDNEENEDILEDIVLTLTLFEDREMIEERLKTYAHLFDDKVMKQLKRRRYTGWGRLSRKLINGIRDKQSGKTILDFLKSDGFANRNFMQLIHDDSLTFKEDIQKAQVSGQGDSLHEHIANLAGSPAIKKGILQTVKVVDELVKVMGRHKPENIVIEMARENQTTQKGQKNSRERMKRIEEGIKELGSQILKEHPVENTQLQNEKLYLYYLQNGRDMYVDQELDINRLSDYDVDHIVPQSFLKDDSIDNKVLTRSDKARGKSDNVPSEEVVKKMKNYWRQLLNAKLITQRKFDNLTKAERGGLSELDKAGFIKRQLVETRQITKHVAQILDSRMNTKYDENDKLIREVKVITLKSKLVSDFRKDFQFYKVREINNYHHAHDAYLNAVVGTALIKKYPKLESEFVYGDYKVYDVRKMIAKSEQEIGKATAKYFFYSNIMNFFKTEITLANGEIRKRPLIETNGETGEIVWDKGRDFATVRKVLSMPQVNIVKKTEVQTGGFSKESILPKRNSDKLIARKKDWDPKKYGGFDSPTVAYSVLVVAKVEKGKSKKLKSVKELLGITIMERSSFEKNPIDFLEAKGYKEVKKDLIIKLPKYSLFELENGRKRMLASAGELQKGNELALPSKYVNFLYLASHYEKLKGSPEDNEQKQLFVEQHKHYLDEIIEQISEFSKRVILADANLDKVLSAYNKHRDKPIREQAENIIHLFTLTNLGAPAAFKYFDTTIDRKRYTSTKEVLDATLIHQSITGLYETRIDLSQLGGDGGPAPAPGGTLNIEDEYRLHETSKEPDVSLGSTWLSDFPQAWAETGGMGLAVRQAPLIIPLKATSTPVSIKQYPMSQEARLGIKPHIQRLLDQGILVPCQSPWNTPLLPVKKPGTNDYRPVQDLREVNKRVEDIHPTVPNPYNLLSGLPPSHQWYTVLDLKDAFFCLRLHPTSQPLFAFEWRDPEMGISGQLTWTRLPQGFKNSPTLFNEALHRDLAGFRIQHPDLILLQYVDDLLLAATSELDCQQGTRALLQTLGDLGYRASAKKAQICQKQVKYLGYLLKEGQRWLTEARKETVMGQPIPKTPRQLREFLGTAGFCRLWIPGFAEMAAPLYPLTKPGTLFNWGPDQQKAFQEIKQALLTAPALGLPDLTKPFELFVDEKQGYAKGVLTQKLGPWRRPVAYLSKKLDPVAAGWPPCLRMVAAIAVLTKDAGKLTMGQPLVILAPHAVEALVKQPPDRWLSNARMTHYQALLLDTDRVQFGPVVALNPATLLPLPEEGLQHDCLDILAEAHGTRSDLMDQPLPDADHTWYTDGSSFLQEGQRKAGAAVTTETEVIWARALPAGTSAQRAELIALTQALKMAEGKKLNVYTDSRYAFATAHIHGEIYRRRGWLTSEGKEIKNKDEILALLKALFLPKRLSIIHCPGHQKGNSAEARGNRMADQAAREVATRETPETSTLLAGKRTADGSEFEKRTADGSEFESPKKKAKVE

SEQ ID NO: 2244 - protein, 2096 aa, synthetic construct
MPAAKRVKLDGGDKKYSIGLDIGTNSVGWAVITDEYKVPSKKFKVLGNTDRHSIKKNLIGALLFDSGETAEATRLKRTARRRYTRRKNRICYLQEIFSNEMAKVDDSFFHRLEESFLVEEDKKHERHPIFGNIVDEVAYHEKYPTIYHLRKKLVDSTDKADLRLIYLALAHMIKFRGHFLIEGDLNPDNSDVDKLFIQLVQTYNQLFEENPINASGVDAKAILSARLSKSRRLENLIAQLPGEKKNGLFGNLIALSLGLTPNFKSNFDLAEDAKLQLSKDTYDDDLDNLLAQIGDQYADLFLAAKNLSDAILLSDILRVNTEITKAPLSASMIKRYDEHHQDLTLLKALVRQQLPEKYKEIFFDQSKNGYAGYIDGGASQEEFYKFIKPILEKMDGTEELLVKLNREDLLRKQRTFDNGSIPHQIHLGELHAILRRQEDFYPFLKDNREKIEKILTFRIPYYVGPLARGNSRFAWMTRKSEETITPWNFEEVVDKGASAQSFIERMTNFDKNLPNEKVLPKHSLLYEYFTVYNELTKVKYVTEGMRKPAFLSGEQKKAIVDLLFKTNRKVTVKQLKEDYFKKIECFDSVEISGVEDRFNASLGTYHDLLKIIKDKDFLDNEENEDILEDIVLTLTLFEDREMIEERLKTYAHLFDDKVMKQLKRRRYTGWGRLSRKLINGIRDKQSGKTILDFLKSDGFANRNFMQLIHDDSLTFKEDIQKAQVSGQGDSLHEHIANLAGSPAIKKGILQTVKVVDELVKVMGRHKPENIVIEMARENQTTQKGQKNSRERMKRIEEGIKELGSQILKEHPVENTQLQNEKLYLYYLQNGRDMYVDQELDINRLSDYDVDHIVPQSFLKDDSIDNKVLTRSDKARGKSDNVPSEEVVKKMKNYWRQLLNAKLITQRKFDNLTKAERGGLSELDKAGFIKRQLVETRQITKHVAQILDSRMNTKYDENDKLIREVKVITLKSKLVSDFRKDFQFYKVREINNYHHAHDAYLNAVVGTALIKKYPKLESEFVYGDYKVYDVRKMIAKSEQEIGKATAKYFFYSNIMNFFKTEITLANGEIRKRPLIETNGETGEIVWDKGRDFATVRKVLSMPQVNIVKKTEVQTGGFSKESILPKRNSDKLIARKKDWDPKKYGGFDSPTVAYSVLVVAKVEKGKSKKLKSVKELLGITIMERSSFEKNPIDFLEAKGYKEVKKDLIIKLPKYSLFELENGRKRMLASAGELQKGNELALPSKYVNFLYLASHYEKLKGSPEDNEQKQLFVEQHKHYLDEIIEQISEFSKRVILADANLDKVLSAYNKHRDKPIREQAENIIHLFTLTNLGAPAAFKYFDTTIDRKRYTSTKEVLDATLIHQSITGLYETRIDLSQLGGDGGGSSEAAAKGGSGGTLNIEDEYRLHETSKEPDVSLGSTWLSDFPQAWAETGGMGLAVRQAPLIIPLKATSTPVSIKQYPMSQEARLGIKPHIQRLLDQGILVPCQSPWNTPLLPVKKPGTNDYRPVQDLREVNKRVEDIHPTVPNPYNLLSGLPPSHQWYTVLDLKDAFFCLRLHPTSQPLFAFEWRDPEMGISGQLTWTRLPQGFKNSPTLFNEALHRDLAGFRIQHPDLILLQYVDDLLLAATSELDCQQGTRALLQTLGDLGYRASAKKAQICQKQVKYLGYLLKEGQRWLTEARKETVMGQPIPKTPRQLREFLGTAGFCRLWIPGFAEMAAPLYPLTKPGTLFNWGPDQQKAFQEIKQALLTAPALGLPDLTKPFELFVDEKQGYAKGVLTQKLGPWRRPVAYLSKKLDPVAAGWPPCLRMVAAIAVLTKDAGKLTMGQPLVILAPHAVEALVKQPPDRWLSNARMTHYQALLLDTDRVQFGPVVALNPATLLPLPEEGLQHDCLDILAEAHGTRSDLMDQPLPDADHTWYTDGSSFLQEGQRKAGAAVTTETEVIWARALPAGTSAQRAELIALTQALKMAEGKKLNVYTDSRYAFATAHIHGEIYRRRGWLTSEGKEIKNKDEILALLKALFLPKRLSIIHCPGHQKGNSAEARGNRMADQAAREVATRETPETSTLLAGKRTADGSEFEKRTADGSEFESPKKKAKVE

SEQ ID NO: 2245 - protein, 2091 aa, synthetic construct
MPAAKRVKLDGGDKKYSIGLDIGTNSVGWAVITDEYKVPSKKFKVLGNTDRHSIKKNLIGALLFDSGETAEATRLKRTARRRYTRRKNRICYLQEIFSNEMAKVDDSFFHRLEESFLVEEDKKHERHPIFGNIVDEVAYHEKYPTIYHLRKKLVDSTDKADLRLIYLALAHMIKFRGHFLIEGDLNPDNSDVDKLFIQLVQTYNQLFEENPINASGVDAKAILSARLSKSRRLENLIAQLPGEKKNGLFGNLIALSLGLTPNFKSNFDLAEDAKLQLSKDTYDDDLDNLLAQIGDQYADLFLAAKNLSDAILLSDILRVNTEITKAPLSASMIKRYDEHHQDLTLLKALVRQQLPEKYKEIFFDQSKNGYAGYIDGGASQEEFYKFIKPILEKMDGTEELLVKLNREDLLRKQRTFDNGSIPHQIHLGELHAILRRQEDFYPFLKDNREKIEKILTFRIPYYVGPLARGNSRFAWMTRKSEETITPWNFEEVVDKGASAQSFIERMTNFDKNLPNEKVLPKHSLLYEYFTVYNELTKVKYVTEGMRKPAFLSGEQKKAIVDLLFKTNRKVTVKQLKEDYFKKIECFDSVEISGVEDRFNASLGTYHDLLKIIKDKDFLDNEENEDILEDIVLTLTLFEDREMIEERLKTYAHLFDDKVMKQLKRRRYTGWGRLSRKLINGIRDKQSGKTILDFLKSDGFANRNFMQLIHDDSLTFKEDIQKAQVSGQGDSLHEHIANLAGSPAIKKGILQTVKVVDELVKVMGRHKPENIVIEMARENQTTQKGQKNSRERMKRIEEGIKELGSQILKEHPVENTQLQNEKLYLYYLQNGRDMYVDQELDINRLSDYDVDHIVPQSFLKDDSIDNKVLTRSDKARGKSDNVPSEEVVKKMKNYWRQLLNAKLITQRKFDNLTKAERGGLSELDKAGFIKRQLVETRQITKHVAQILDSRMNTKYDENDKLIREVKVITLKSKLVSDFRKDFQFYKVREINNYHHAHDAYLNAVVGTALIKKYPKLESEFVYGDYKVYDVRKMIAKSEQEIGKATAKYFFYSNIMNFFKTEITLANGEIRKRPLIETNGETGEIVWDKGRDFATVRKVLSMPQVNIVKKTEVQTGGFSKESILPKRNSDKLIARKKDWDPKKYGGFDSPTVAYSVLVVAKVEKGKSKKLKSVKELLGITIMERSSFEKNPIDFLEAKGYKEVKKDLIIKLPKYSLFELENGRKRMLASAGELQKGNELALPSKYVNFLYLASHYEKLKGSPEDNEQKQLFVEQHKHYLDEIIEQISEFSKRVILADANLDKVLSAYNKHRDKPIREQAENIIHLFTLTNLGAPAAFKYFDTTIDRKRYTSTKEVLDATLIHQSITGLYETRIDLSQLGGDGGPAPGGSGGTLNIEDEYRLHETSKEPDVSLGSTWLSDFPQAWAETGGMGLAVRQAPLIIPLKATSTPVSIKQYPMSQEARLGIKPHIQRLLDQGILVPCQSPWNTPLLPVKKPGTNDYRPVQDLREVNKRVEDIHPTVPNPYNLLSGLPPSHQWYTVLDLKDAFFCLRLHPTSQPLFAFEWRDPEMGISGQLTWTRLPQGFKNSPTLFNEALHRDLAGFRIQHPDLILLQYVDDLLLAATSELDCQQGTRALLQTLGDLGYRASAKKAQICQKQVKYLGYLLKEGQRWLTEARKETVMGQPIPKTPRQLREFLGTAGFCRLWIPGFAEMAAPLYPLTKPGTLFNWGPDQQKAFQEIKQALLTAPALGLPDLTKPFELFVDEKQGYAKGVLTQKLGPWRRPVAYLSKKLDPVAAGWPPCLRMVAAIAVLTKDAGKLTMGQPLVILAPHAVEALVKQPPDRWLSNARMTHYQALLLDTDRVQFGPVVALNPATLLPLPEEGLQHDCLDILAEAHGTRSDLMDQPLPDADHTWYTDGSSFLQEGQRKAGAAVTTETEVIWARALPAGTSAQRAELIALTQALKMAEGKKLNVYTDSRYAFATAHIHGEIYRRRGWLTSEGKEIKNKDEILALLKALFLPKRLSIIHCPGHQKGNSAEARGNRMADQAAREVATRETPETSTLLAGKRTADGSEFEKRTADGSEFESPKKKAKVE

SEQ ID NO: 2246 - protein, 2096 aa, synthetic construct
MPAAKRVKLDGGDKKYSIGLDIGTNSVGWAVITDEYKVPSKKFKVLGNTDRHSIKKNLIGALLFDSGETAEATRLKRTARRRYTRRKNRICYLQEIFSNEMAKVDDSFFHRLEESFLVEEDKKHERHPIFGNIVDEVAYHEKYPTIYHLRKKLVDSTDKADLRLIYLALAHMIKFRGHFLIEGDLNPDNSDVDKLFIQLVQTYNQLFEENPINASGVDAKAILSARLSKSRRLENLIAQLPGEKKNGLFGNLIALSLGLTPNFKSNFDLAEDAKLQLSKDTYDDDLDNLLAQIGDQYADLFLAAKNLSDAILLSDILRVNTEITKAPLSASMIKRYDEHHQDLTLLKALVRQQLPEKYKEIFFDQSKNGYAGYIDGGASQEEFYKFIKPILEKMDGTEELLVKLNREDLLRKQRTFDNGSIPHQIHLGELHAILRRQEDFYPFLKDNREKIEKILTFRIPYYVGPLARGNSRFAWMTRKSEETITPWNFEEVVDKGASAQSFIERMTNFDKNLPNEKVLPKHSLLYEYFTVYNELTKVKYVTEGMRKPAFLSGEQKKAIVDLLFKTNRKVTVKQLKEDYFKKIECFDSVEISGVEDRFNASLGTYHDLLKIIKDKDFLDNEENEDILEDIVLTLTLFEDREMIEERLKTYAHLFDDKVMKQLKRRRYTGWGRLSRKLINGIRDKQSGKTILDFLKSDGFANRNFMQLIHDDSLTFKEDIQKAQVSGQGDSLHEHIANLAGSPAIKKGILQTVKVVDELVKVMGRHKPENIVIEMARENQTTQKGQKNSRERMKRIEEGIKELGSQILKEHPVENTQLQNEKLYLYYLQNGRDMYVDQELDINRLSDYDVDHIVPQSFLKDDSIDNKVLTRSDKARGKSDNVPSEEVVKKMKNYWRQLLNAKLITQRKFDNLTKAERGGLSELDKAGFIKRQLVETRQITKHVAQILDSRMNTKYDENDKLIREVKVITLKSKLVSDFRKDFQFYKVREINNYHHAHDAYLNAVVGTALIKKYPKLESEFVYGDYKVYDVRKMIAKSEQEIGKATAKYFFYSNIMNFFKTEITLANGEIRKRPLIETNGETGEIVWDKGRDFATVRKVLSMPQVNIVKKTEVQTGGFSKESILPKRNSDKLIARKKDWDPKKYGGFDSPTVAYSVLVVAKVEKGKSKKLKSVKELLGITIMERSSFEKNPIDFLEAKGYKEVKKDLIIKLPKYSLFELENGRKRMLASAGELQKGNELALPSKYVNFLYLASHYEKLKGSPEDNEQKQLFVEQHKHYLDEIIEQISEFSKRVILADANLDKVLSAYNKHRDKPIREQAENIIHLFTLTNLGAPAAFKYFDTTIDRKRYTSTKEVLDATLIHQSITGLYETRIDLSQLGGDGGGGGGGSEAAAKGGTLNIEDEYRLHETSKEPDVSLGSTWLSDFPQAWAETGGMGLAVRQAPLIIPLKATSTPVSIKQYPMSQEARLGIKPHIQRLLDQGILVPCQSPWNTPLLPVKKPGTNDYRPVQDLREVNKRVEDIHPTVPNPYNLLSGLPPSHQWYTVLDLKDAFFCLRLHPTSQPLFAFEWRDPEMGISGQLTWTRLPQGFKNSPTLFNEALHRDLAGFRIQHPDLILLQYVDDLLLAATSELDCQQGTRALLQTLGDLGYRASAKKAQICQKQVKYLGYLLKEGQRWLTEARKETVMGQPIPKTPRQLREFLGTAGFCRLWIPGFAEMAAPLYPLTKPGTLFNWGPDQQKAFQEIKQALLTAPALGLPDLTKPFELFVDEKQGYAKGVLTQKLGPWRRPVAYLSKKLDPVAAGWPPCLRMVAAIAVLTKDAGKLTMGQPLVILAPHAVEALVKQPPDRWLSNARMTHYQALLLDTDRVQFGPVVALNPATLLPLPEEGLQHDCLDILAEAHGTRSDLMDQPLPDADHTWYTDGSSFLQEGQRKAGAAVTTETEVIWARALPAGTSAQRAELIALTQALKMAEGKKLNVYTDSRYAFATAHIHGEIYRRRGWLTSEGKEIKNKDEILALLKALFLPKRLSIIHCPGHQKGNSAEARGNRMADQAAREVATRETPETSTLLAGKRTADGSEFEKRTADGSEFESPKKKAKVE

SEQ ID NO: 2247 - protein, 2096 aa, synthetic construct
MPAAKRVKLDGGDKKYSIGLDIGTNSVGWAVITDEYKVPSKKFKVLGNTDRHSIKKNLIGALLFDSGETAEATRLKRTARRRYTRRKNRICYLQEIFSNEMAKVDDSFFHRLEESFLVEEDKKHERHPIFGNIVDEVAYHEKYPTIYHLRKKLVDSTDKADLRLIYLALAHMIKFRGHFLIEGDLNPDNSDVDKLFIQLVQTYNQLFEENPINASGVDAKAILSARLSKSRRLENLIAQLPGEKKNGLFGNLIALSLGLTPNFKSNFDLAEDAKLQLSKDTYDDDLDNLLAQIGDQYADLFLAAKNLSDAILLSDILRVNTEITKAPLSASMIKRYDEHHQDLTLLKALVRQQLPEKYKEIFFDQSKNGYAGYIDGGASQEEFYKFIKPILEKMDGTEELLVKLNREDLLRKQRTFDNGSIPHQIHLGELHAILRRQEDFYPFLKDNREKIEKILTFRIPYYVGPLARGNSRFAWMTRKSEETITPWNFEEVVDKGASAQSFIERMTNFDKNLPNEKVLPKHSLLYEYFTVYNELTKVKYVTEGMRKPAFLSGEQKKAIVDLLFKTNRKVTVKQLKEDYFKKIECFDSVEISGVEDRFNASLGTYHDLLKIIKDKDFLDNEENEDILEDIVLTLTLFEDREMIEERLKTYAHLFDDKVMKQLKRRRYTGWGRLSRKLINGIRDKQSGKTILDFLKSDGFANRNFMQLIHDDSLTFKEDIQKAQVSGQGDSLHEHIANLAGSPAIKKGILQTVKVVDELVKVMGRHKPENIVIEMARENQTTQKGQKNSRERMKRIEEGIKELGSQILKEHPVENTQLQNEKLYLYYLQNGRDMYVDQELDINRLSDYDVDHIVPQSFLKDDSIDNKVLTRSDKARGKSDNVPSEEVVKKMKNYWRQLLNAKLITQRKFDNLTKAERGGLSELDKAGFIKRQLVETRQITKHVAQILDSRMNTKYDENDKLIREVKVITLKSKLVSDFRKDFQFYKVREINNYHHAHDAYLNAVVGTALIKKYPKLESEFVYGDYKVYDVRKMIAKSEQEIGKATAKYFFYSNIMNFFKTEITLANGEIRKRPLIETNGETGEIVWDKGRDFATVRKVLSMPQVNIVKKTEVQTGGFSKESILPKRNSDKLIARKKDWDPKKYGGFDSPTVAYSVLVVAKVEKGKSKKLKSVKELLGITIMERSSFEKNPIDFLEAKGYKEVKKDLIIKLPKYSLFELENGRKRMLASAGELQKGNELALPSKYVNFLYLASHYEKLKGSPEDNEQKQLFVEQHKHYLDEIIEQISEFSKRVILADANLDKVLSAYNKHRDKPIREQAENIIHLFTLTNLGAPAAFKYFDTTIDRKRYTSTKEVLDATLIHQSITGLYETRIDLSQLGGDGGPAPAPAPAPAPGGTLNIEDEYRLHETSKEPDVSLGSTWLSDFPQAWAETGGMGLAVRQAPLIIPLKATSTPVSIKQYPMSQEARLGIKPHIQRLLDQGILVPCQSPWNTPLLPVKKPGTNDYRPVQDLREVNKRVEDIHPTVPNPYNLLSGLPPSHQWYTVLDLKDAFFCLRLHPTSQPLFAFEWRDPEMGISGQLTWTRLPQGFKNSPTLFNEALHRDLAGFRIQHPDLILLQYVDDLLLAATSELDCQQGTRALLQTLGDLGYRASAKKAQICQKQVKYLGYLLKEGQRWLTEARKETVMGQPIPKTPRQLREFLGTAGFCRLWIPGFAEMAAPLYPLTKPGTLFNWGPDQQKAFQEIKQALLTAPALGLPDLTKPFELFVDEKQGYAKGVLTQKLGPWRRPVAYLSKKLDPVAAGWPPCLRMVAAIAVLTKDAGKLTMGQPLVILAPHAVEALVKQPPDRWLSNARMTHYQALLLDTDRVQFGPVVALNPATLLPLPEEGLQHDCLDILAEAHGTRSDLMDQPLPDADHTWYTDGSSFLQEGQRKAGAAVTTETEVIWARALPAGTSAQRAELIALTQALKMAEGKKLNVYTDSRYAFATAHIHGEIYRRRGWLTSEGKEIKNKDEILALLKALFLPKRLSIIHCPGHQKGNSAEARGNRMADQAAREVATRETPETSTLLAGKRTADGSEFEKRTADGSEFESPKKKAKVE

SEQ ID NO: 2248 - protein, 2096 aa, synthetic construct
MPAAKRVKLDGGDKKYSIGLDIGTNSVGWAVITDEYKVPSKKFKVLGNTDRHSIKKNLIGALLFDSGETAEATRLKRTARRRYTRRKNRICYLQEIFSNEMAKVDDSFFHRLEESFLVEEDKKHERHPIFGNIVDEVAYHEKYPTIYHLRKKLVDSTDKADLRLIYLALAHMIKFRGHFLIEGDLNPDNSDVDKLFIQLVQTYNQLFEENPINASGVDAKAILSARLSKSRRLENLIAQLPGEKKNGLFGNLIALSLGLTPNFKSNFDLAEDAKLQLSKDTYDDDLDNLLAQIGDQYADLFLAAKNLSDAILLSDILRVNTEITKAPLSASMIKRYDEHHQDLTLLKALVRQQLPEKYKEIFFDQSKNGYAGYIDGGASQEEFYKFIKPILEKMDGTEELLVKLNREDLLRKQRTFDNGSIPHQIHLGELHAILRRQEDFYPFLKDNREKIEKILTFRIPYYVGPLARGNSRFAWMTRKSEETITPWNFEEVVDKGASAQSFIERMTNFDKNLPNEKVLPKHSLLYEYFTVYNELTKVKYVTEGMRKPAFLSGEQKKAIVDLLFKTNRKVTVKQLKEDYFKKIECFDSVEISGVEDRFNASLGTYHDLLKIIKDKDFLDNEENEDILEDIVLTLTLFEDREMIEERLKTYAHLFDDKVMKQLKRRRYTGWGRLSRKLINGIRDKQSGKTILDFLKSDGFANRNFMQLIHDDSLTFKEDIQKAQVSGQGDSLHEHIANLAGSPAIKKGILQTVKVVDELVKVMGRHKPENIVIEMARENQTTQKGQKNSRERMKRIEEGIKELGSQILKEHPVENTQLQNEKLYLYYLQNGRDMYVDQELDINRLSDYDVDHIVPQSFLKDDSIDNKVLTRSDKARGKSDNVPSEEVVKKMKNYWRQLLNAKLITQRKFDNLTKAERGGLSELDKAGFIKRQLVETRQITKHVAQILDSRMNTKYDENDKLIREVKVITLKSKLVSDFRKDFQFYKVREINNYHHAHDAYLNAVVGTALIKKYPKLESEFVYGDYKVYDVRKMIAKSEQEIGKATAKYFFYSNIMNFFKTEITLANGEIRKRPLIETNGETGEIVWDKGRDFATVRKVLSMPQVNIVKKTEVQTGGFSKESILPKRNSDKLIARKKDWDPKKYGGFDSPTVAYSVLVVAKVEKGKSKKLKSVKELLGITIMERSSFEKNPIDFLEAKGYKEVKKDLIIKLPKYSLFELENGRKRMLASAGELQKGNELALPSKYVNFLYLASHYEKLKGSPEDNEQKQLFVEQHKHYLDEIIEQISEFSKRVILADANLDKVLSAYNKHRDKPIREQAENIIHLFTLTNLGAPAAFKYFDTTIDRKRYTSTKEVLDATLIHQSITGLYETRIDLSQLGGDGGPAPGGSEAAAKGGTLNIEDEYRLHETSKEPDVSLGSTWLSDFPQAWAETGGMGLAVRQAPLIIPLKATSTPVSIKQYPMSQEARLGIKPHIQRLLDQGILVPCQSPWNTPLLPVKKPGTNDYRPVQDLREVNKRVEDIHPTVPNPYNLLSGLPPSHQWYTVLDLKDAFFCLRLHPTSQPLFAFEWRDPEMGISGQLTWTRLPQGFKNSPTLFNEALHRDLAGFRIQHPDLILLQYVDDLLLAATSELDCQQGTRALLQTLGDLGYRASAKKAQICQKQVKYLGYLLKEGQRWLTEARKETVMGQPIPKTPRQLREFLGTAGFCRLWIPGFAEMAAPLYPLTKPGTLFNWGPDQQKAFQEIKQALLTAPALGLPDLTKPFELFVDEKQGYAKGVLTQKLGPWRRPVAYLSKKLDPVAAGWPPCLRMVAAIAVLTKDAGKLTMGQPLVILAPHAVEALVKQPPDRWLSNARMTHYQALLLDTDRVQFGPVVALNPATLLPLPEEGLQHDCLDILAEAHGTRSDLMDQPLPDADHTWYTDGSSFLQEGQRKAGAAVTTETEVIWARALPAGTSAQRAELIALTQALKMAEGKKLNVYTDSRYAFATAHIHGEIYRRRGWLTSEGKEIKNKDEILALLKALFLPKRLSIIHCPGHQKGNSAEARGNRMADQAAREVATRETPETSTLLAGKRTADGSEFEKRTADGSEFESPKKKAKVE

SEQ ID NO: 2249 - protein, 2115 aa, synthetic construct
MPAAKRVKLDGGDKKYSIGLDIGTNSVGWAVITDEYKVPSKKFKVLGNTDRHSIKKNLIGALLFDSGETAEATRLKRTARRRYTRRKNRICYLQEIFSNEMAKVDDSFFHRLEESFLVEEDKKHERHPIFGNIVDEVAYHEKYPTIYHLRKKLVDSTDKADLRLIYLALAHMIKFRGHFLIEGDLNPDNSDVDKLFIQLVQTYNQLFEENPINASGVDAKAILSARLSKSRRLENLIAQLPGEKKNGLFGNLIALSLGLTPNFKSNFDLAEDAKLQLSKDTYDDDLDNLLAQIGDQYADLFLAAKNLSDAILLSDILRVNTEITKAPLSASMIKRYDEHHQDLTLLKALVRQQLPEKYKEIFFDQSKNGYAGYIDGGASQEEFYKFIKPILEKMDGTEELLVKLNREDLLRKQRTFDNGSIPHQIHLGELHAILRRQEDFYPFLKDNREKIEKILTFRIPYYVGPLARGNSRFAWMTRKSEETITPWNFEEVVDKGASAQSFIERMTNFDKNLPNEKVLPKHSLLYEYFTVYNELTKVKYVTEGMRKPAFLSGEQKKAIVDLLFKTNRKVTVKQLKEDYFKKIECFDSVEISGVEDRFNASLGTYHDLLKIIKDKDFLDNEENEDILEDIVLTLTLFEDREMIEERLKTYAHLFDDKVMKQLKRRRYTGWGRLSRKLINGIRDKQSGKTILDFLKSDGFANRNFMQLIHDDSLTFKEDIQKAQVSGQGDSLHEHIANLAGSPAIKKGILQTVKVVDELVKVMGRHKPENIVIEMARENQTTQKGQKNSRERMKRIEEGIKELGSQILKEHPVENTQLQNEKLYLYYLQNGRDMYVDQELDINRLSDYDVDHIVPQSFLKDDSIDNKVLTRSDKARGKSDNVPSEEVVKKMKNYWRQLLNAKLITQRKFDNLTKAERGGLSELDKAGFIKRQLVETRQITKHVAQILDSRMNTKYDENDKLIREVKVITLKSKLVSDFRKDFQFYKVREINNYHHAHDAYLNAVVGTALIKKYPKLESEFVYGDYKVYDVRKMIAKSEQEIGKATAKYFFYSNIMNFFKTEITLANGEIRKRPLIETNGETGEIVWDKGRDFATVRKVLSMPQVNIVKKTEVQTGGFSKESILPKRNSDKLIARKKDWDPKKYGGFDSPTVAYSVLVVAKVEKGKSKKLKSVKELLGITIMERSSFEKNPIDFLEAKGYKEVKKDLIIKLPKYSLFELENGRKRMLASAGELQKGNELALPSKYVNFLYLASHYEKLKGSPEDNEQKQLFVEQHKHYLDEIIEQISEFSKRVILADANLDKVLSAYNKHRDKPIREQAENIIHLFTLTNLGAPAAFKYFDTTIDRKRYTSTKEVLDATLIHQSITGLYETRIDLSQLGGDGGEAAAKEAAAKEAAAKEAAAKEAAAKEAAAKGGTLNIEDEYRLHETSKEPDVSLGSTWLSDFPQAWAETGGMGLAVRQAPLIIPLKATSTPVSIKQYPMSQEARLGIKPHIQRLLDQGILVPCQSPWNTPLLPVKKPGTNDYRPVQDLREVNKRVEDIHPTVPNPYNLLSGLPPSHQWYTVLDLKDAFFCLRLHPTSQPLFAFEWRDPEMGISGQLTWTRLPQGFKNSPTLFNEALHRDLAGFRIQHPDLILLQYVDDLLLAATSELDCQQGTRALLQTLGDLGYRASAKKAQICQKQVKYLGYLLKEGQRWLTEARKETVMGQPIPKTPRQLREFLGTAGFCRLWIPGFAEMAAPLYPLTKPGTLFNWGPDQQKAFQEIKQALLTAPALGLPDLTKPFELFVDEKQGYAKGVLTQKLGPWRRPVAYLSKKLDPVAAGWPPCLRMVAAIAVLTKDAGKLTMGQPLVILAPHAVEALVKQPPDRWLSNARMTHYQALLLDTDRVQFGPVVALNPATLLPLPEEGLQHDCLDILAEAHGTRSDLMDQPLPDADHTWYTDGSSFLQEGQRKAGAAVTTETEVIWARALPAGTSAQRAELIALTQALKMAEGKKLNVYTDSRYAFATAHIHGEIYRRRGWLTSEGKEIKNKDEILALLKALFLPKRLSIIHCPGHQKGNSAEARGNRMADQAAREVATRETPETSTLLAGKRTADGSEFEKRTADGSEFESPKKKAKVE

SEQ ID NO: 2250 - protein, 2097 aa, synthetic construct
MPAAKRVKLDGGDKKYSIGLDIGTNSVGWAVITDEYKVPSKKFKVLGNTDRHSIKKNLIGALLFDSGETAEATRLKRTARRRYTRRKNRICYLQEIFSNEMAKVDDSFFHRLEESFLVEEDKKHERHPIFGNIVDEVAYHEKYPTIYHLRKKLVDSTDKADLRLIYLALAHMIKFRGHFLIEGDLNPDNSDVDKLFIQLVQTYNQLFEENPINASGVDAKAILSARLSKSRRLENLIAQLPGEKKNGLFGNLIALSLGLTPNFKSNFDLAEDAKLQLSKDTYDDDLDNLLAQIGDQYADLFLAAKNLSDAILLSDILRVNTEITKAPLSASMIKRYDEHHQDLTLLKALVRQQLPEKYKEIFFDQSKNGYAGYIDGGASQEEFYKFIKPILEKMDGTEELLVKLNREDLLRKQRTFDNGSIPHQIHLGELHAILRRQEDFYPFLKDNREKIEKILTFRIPYYVGPLARGNSRFAWMTRKSEETITPWNFEEVVDKGASAQSFIERMTNFDKNLPNEKVLPKHSLLYEYFTVYNELTKVKYVTEGMRKPAFLSGEQKKAIVDLLFKTNRKVTVKQLKEDYFKKIECFDSVEISGVEDRFNASLGTYHDLLKIIKDKDFLDNEENEDILEDIVLTLTLFEDREMIEERLKTYAHLFDDKVMKQLKRRRYTGWGRLSRKLINGIRDKQSGKTILDFLKSDGFANRNFMQLIHDDSLTFKEDIQKAQVSGQGDSLHEHIANLAGSPAIKKGILQTVKVVDELVKVMGRHKPENIVIEMARENQTTQKGQKNSRERMKRIEEGIKELGSQILKEHPVENTQLQNEKLYLYYLQNGRDMYVDQELDINRLSDYDVDHIVPQSFLKDDSIDNKVLTRSDKARGKSDNVPSEEVVKKMKNYWRQLLNAKLITQRKFDNLTKAERGGLSELDKAGFIKRQLVETRQITKHVAQILDSRMNTKYDENDKLIREVKVITLKSKLVSDFRKDFQFYKVREINNYHHAHDAYLNAVVGTALIKKYPKLESEFVYGDYKVYDVRKMIAKSEQEIGKATAKYFFYSNIMNFFKTEITLANGEIRKRPLIETNGETGEIVWDKGRDFATVRKVLSMPQVNIVKKTEVQTGGFSKESILPKRNSDKLIARKKDWDPKKYGGFDSPTVAYSVLVVAKVEKGKSKKLKSVKELLGITIMERSSFEKNPIDFLEAKGYKEVKKDLIIKLPKYSLFELENGRKRMLASAGELQKGNELALPSKYVNFLYLASHYEKLKGSPEDNEQKQLFVEQHKHYLDEIIEQISEFSKRVILADANLDKVLSAYNKHRDKPIREQAENIIHLFTLTNLGAPAAFKYFDTTIDRKRYTSTKEVLDATLIHQSITGLYETRIDLSQLGGDGGGGSGGSGGSGGSGGTLNIEDEYRLHETSKEPDVSLGSTWLSDFPQAWAETGGMGLAVRQAPLIIPLKATSTPVSIKQYPMSQEARLGIKPHIQRLLDQGILVPCQSPWNTPLLPVKKPGTNDYRPVQDLREVNKRVEDIHPTVPNPYNLLSGLPPSHQWYTVLDLKDAFFCLRLHPTSQPLFAFEWRDPEMGISGQLTWTRLPQGFKNSPTLFNEALHRDLAGFRIQHPDLILLQYVDDLLLAATSELDCQQGTRALLQTLGDLGYRASAKKAQICQKQVKYLGYLLKEGQRWLTEARKETVMGQPIPKTPRQLREFLGTAGFCRLWIPGFAEMAAPLYPLTKPGTLFNWGPDQQKAFQEIKQALLTAPALGLPDLTKPFELFVDEKQGYAKGVLTQKLGPWRRPVAYLSKKLDPVAAGWPPCLRMVAAIAVLTKDAGKLTMGQPLVILAPHAVEALVKQPPDRWLSNARMTHYQALLLDTDRVQFGPVVALNPATLLPLPEEGLQHDCLDILAEAHGTRSDLMDQPLPDADHTWYTDGSSFLQEGQRKAGAAVTTETEVIWARALPAGTSAQRAELIALTQALKMAEGKKLNVYTDSRYAFATAHIHGEIYRRRGWLTSEGKEIKNKDEILALLKALFLPKRLSIIHCPGHQKGNSAEARGNRMADQAAREVATRETPETSTLLAGKRTADGSEFEKRTADGSEFESPKKKAKVE

SEQ ID NO: 2251 - protein, 2096 aa, synthetic construct
MPAAKRVKLDGGDKKYSIGLDIGTNSVGWAVITDEYKVPSKKFKVLGNTDRHSIKKNLIGALLFDSGETAEATRLKRTARRRYTRRKNRICYLQEIFSNEMAKVDDSFFHRLEESFLVEEDKKHERHPIFGNIVDEVAYHEKYPTIYHLRKKLVDSTDKADLRLIYLALAHMIKFRGHFLIEGDLNPDNSDVDKLFIQLVQTYNQLFEENPINASGVDAKAILSARLSKSRRLENLIAQLPGEKKNGLFGNLIALSLGLTPNFKSNFDLAEDAKLQLSKDTYDDDLDNLLAQIGDQYADLFLAAKNLSDAILLSDILRVNTEITKAPLSASMIKRYDEHHQDLTLLKALVRQQLPEKYKEIFFDQSKNGYAGYIDGGASQEEFYKFIKPILEKMDGTEELLVKLNREDLLRKQRTFDNGSIPHQIHLGELHAILRRQEDFYPFLKDNREKIEKILTFRIPYYVGPLARGNSRFAWMTRKSEETITPWNFEEVVDKGASAQSFIERMTNFDKNLPNEKVLPKHSLLYEYFTVYNELTKVKYVTEGMRKPAFLSGEQKKAIVDLLFKTNRKVTVKQLKEDYFKKIECFDSVEISGVEDRFNASLGTYHDLLKIIKDKDFLDNEENEDILEDIVLTLTLFEDREMIEERLKTYAHLFDDKVMKQLKRRRYTGWGRLSRKLINGIRDKQSGKTILDFLKSDGFANRNFMQLIHDDSLTFKEDIQKAQVSGQGDSLHEHIANLAGSPAIKKGILQTVKVVDELVKVMGRHKPENIVIEMARENQTTQKGQKNSRERMKRIEEGIKELGSQILKEHPVENTQLQNEKLYLYYLQNGRDMYVDQELDINRLSDYDVDHIVPQSFLKDDSIDNKVLTRSDKARGKSDNVPSEEVVKKMKNYWRQLLNAKLITQRKFDNLTKAERGGLSELDKAGFIKRQLVETRQITKHVAQILDSRMNTKYDENDKLIREVKVITLKSKLVSDFRKDFQFYKVREINNYHHAHDAYLNAVVGTALIKKYPKLESEFVYGDYKVYDVRKMIAKSEQEIGKATAKYFFYSNIMNFFKTEITLANGEIRKRPLIETNGETGEIVWDKGRDFATVRKVLSMPQVNIVKKTEVQTGGFSKESILPKRNSDKLIARKKDWDPKKYGGFDSPTVAYSVLVVAKVEKGKSKKLKSVKELLGITIMERSSFEKNPIDFLEAKGYKEVKKDLIIKLPKYSLFELENGRKRMLASAGELQKGNELALPSKYVNFLYLASHYEKLKGSPEDNEQKQLFVEQHKHYLDEIIEQISEFSKRVILADANLDKVLSAYNKHRDKPIREQAENIIHLFTLTNLGAPAAFKYFDTTIDRKRYTSTKEVLDATLIHQSITGLYETRIDLSQLGGDGGGGSEAAAKPAPGGTLNIEDEYRLHETSKEPDVSLGSTWLSDFPQAWAETGGMGLAVRQAPLIIPLKATSTPVSIKQYPMSQEARLGIKPHIQRLLDQGILVPCQSPWNTPLLPVKKPGTNDYRPVQDLREVNKRVEDIHPTVPNPYNLLSGLPPSHQWYTVLDLKDAFFCLRLHPTSQPLFAFEWRDPEMGISGQLTWTRLPQGFKNSPTLFNEALHRDLAGFRIQHPDLILLQYVDDLLLAATSELDCQQGTRALLQTLGDLGYRASAKKAQICQKQVKYLGYLLKEGQRWLTEARKETVMGQPIPKTPRQLREFLGTAGFCRLWIPGFAEMAAPLYPLTKPGTLFNWGPDQQKAFQEIKQALLTAPALGLPDLTKPFELFVDEKQGYAKGVLTQKLGPWRRPVAYLSKKLDPVAAGWPPCLRMVAAIAVLTKDAGKLTMGQPLVILAPHAVEALVKQPPDRWLSNARMTHYQALLLDTDRVQFGPVVALNPATLLPLPEEGLQHDCLDILAEAHGTRSDLMDQPLPDADHTWYTDGSSFLQEGQRKAGAAVTTETEVIWARALPAGTSAQRAELIALTQALKMAEGKKLNVYTDSRYAFATAHIHGEIYRRRGWLTSEGKEIKNKDEILALLKALFLPKRLSIIHCPGHQKGNSAEARGNRMADQAAREVATRETPETSTLLAGKRTADGSEFEKRTADGSEFESPKKKAKVE

SEQ ID NO: 2252 - protein, 2100 aa, synthetic construct
MPAAKRVKLDGGDKKYSIGLDIGTNSVGWAVITDEYKVPSKKFKVLGNTDRHSIKKNLIGALLFDSGETAEATRLKRTARRRYTRRKNRICYLQEIFSNEMAKVDDSFFHRLEESFLVEEDKKHERHPIFGNIVDEVAYHEKYPTIYHLRKKLVDSTDKADLRLIYLALAHMIKFRGHFLIEGDLNPDNSDVDKLFIQLVQTYNQLFEENPINASGVDAKAILSARLSKSRRLENLIAQLPGEKKNGLFGNLIALSLGLTPNFKSNFDLAEDAKLQLSKDTYDDDLDNLLAQIGDQYADLFLAAKNLSDAILLSDILRVNTEITKAPLSASMIKRYDEHHQDLTLLKALVRQQLPEKYKEIFFDQSKNGYAGYIDGGASQEEFYKFIKPILEKMDGTEELLVKLNREDLLRKQRTFDNGSIPHQIHLGELHAILRRQEDFYPFLKDNREKIEKILTFRIPYYVGPLARGNSRFAWMTRKSEETITPWNFEEVVDKGASAQSFIERMTNFDKNLPNEKVLPKHSLLYEYFTVYNELTKVKYVTEGMRKPAFLSGEQKKAIVDLLFKTNRKVTVKQLKEDYFKKIECFDSVEISGVEDRFNASLGTYHDLLKIIKDKDFLDNEENEDILEDIVLTLTLFEDREMIEERLKTYAHLFDDKVMKQLKRRRYTGWGRLSRKLINGIRDKQSGKTILDFLKSDGFANRNFMQLIHDDSLTFKEDIQKAQVSGQGDSLHEHIANLAGSPAIKKGILQTVKVVDELVKVMGRHKPENIVIEMARENQTTQKGQKNSRERMKRIEEGIKELGSQILKEHPVENTQLQNEKLYLYYLQNGRDMYVDQELDINRLSDYDVDHIVPQSFLKDDSIDNKVLTRSDKARGKSDNVPSEEVVKKMKNYWRQLLNAKLITQRKFDNLTKAERGGLSELDKAGFIKRQLVETRQITKHVAQILDSRMNTKYDENDKLIREVKVITLKSKLVSDFRKDFQFYKVREINNYHHAHDAYLNAVVGTALIKKYPKLESEFVYGDYKVYDVRKMIAKSEQEIGKATAKYFFYSNIMNFFKTEITLANGEIRKRPLIETNGETGEIVWDKGRDFATVRKVLSMPQVNIVKKTEVQTGGFSKESILPKRNSDKLIARKKDWDPKKYGGFDSPTVAYSVLVVAKVEKGKSKKLKSVKELLGITIMERSSFEKNPIDFLEAKGYKEVKKDLIIKLPKYSLFELENGRKRMLASAGELQKGNELALPSKYVNFLYLASHYEKLKGSPEDNEQKQLFVEQHKHYLDEIIEQISEFSKRVILADANLDKVLSAYNKHRDKPIREQAENIIHLFTLTNLGAPAAFKYFDTTIDRKRYTSTKEVLDATLIHQSITGLYETRIDLSQLGGDGGEAAAKEAAAKEAAAKGGTLNIEDEYRLHETSKEPDVSLGSTWLSDFPQAWAETGGMGLAVRQAPLIIPLKATSTPVSIKQYPMSQEARLGIKPHIQRLLDQGILVPCQSPWNTPLLPVKKPGTNDYRPVQDLREVNKRVEDIHPTVPNPYNLLSGLPPSHQWYTVLDLKDAFFCLRLHPTSQPLFAFEWRDPEMGISGQLTWTRLPQGFKNSPTLFNEALHRDLAGFRIQHPDLILLQYVDDLLLAATSELDCQQGTRALLQTLGDLGYRASAKKAQICQKQVKYLGYLLKEGQRWLTEARKETVMGQPIPKTPRQLREFLGTAGFCRLWIPGFAEMAAPLYPLTKPGTLFNWGPDQQKAFQEIKQALLTAPALGLPDLTKPFELFVDEKQGYAKGVLTQKLGPWRRPVAYLSKKLDPVAAGWPPCLRMVAAIAVLTKDAGKLTMGQPLVILAPHAVEALVKQPPDRWLSNARMTHYQALLLDTDRVQFGPVVALNPATLLPLPEEGLQHDCLDILAEAHGTRSDLMDQPLPDADHTWYTDGSSFLQEGQRKAGAAVTTETEVIWARALPAGTSAQRAELIALTQALKMAEGKKLNVYTDSRYAFATAHIHGEIYRRRGWLTSEGKEIKNKDEILALLKALFLPKRLSIIHCPGHQKGNSAEARGNRMADQAAREVATRETPETSTLLAGKRTADGSEFEKRTADGSEFESPKKKAKVE

SEQ ID NO: 2253 - protein, 2096 aa, synthetic construct
MPAAKRVKLDGGDKKYSIGLDIGTNSVGWAVITDEYKVPSKKFKVLGNTDRHSIKKNLIGALLFDSGETAEATRLKRTARRRYTRRKNRICYLQEIFSNEMAKVDDSFFHRLEESFLVEEDKKHERHPIFGNIVDEVAYHEKYPTIYHLRKKLVDSTDKADLRLIYLALAHMIKFRGHFLIEGDLNPDNSDVDKLFIQLVQTYNQLFEENPINASGVDAKAILSARLSKSRRLENLIAQLPGEKKNGLFGNLIALSLGLTPNFKSNFDLAEDAKLQLSKDTYDDDLDNLLAQIGDQYADLFLAAKNLSDAILLSDILRVNTEITKAPLSASMIKRYDEHHQDLTLLKALVRQQLPEKYKEIFFDQSKNGYAGYIDGGASQEEFYKFIKPILEKMDGTEELLVKLNREDLLRKQRTFDNGSIPHQIHLGELHAILRRQEDFYPFLKDNREKIEKILTFRIPYYVGPLARGNSRFAWMTRKSEETITPWNFEEVVDKGASAQSFIERMTNFDKNLPNEKVLPKHSLLYEYFTVYNELTKVKYVTEGMRKPAFLSGEQKKAIVDLLFKTNRKVTVKQLKEDYFKKIECFDSVEISGVEDRFNASLGTYHDLLKIIKDKDFLDNEENEDILEDIVLTLTLFEDREMIEERLKTYAHLFDDKVMKQLKRRRYTGWGRLSRKLINGIRDKQSGKTILDFLKSDGFANRNFMQLIHDDSLTFKEDIQKAQVSGQGDSLHEHIANLAGSPAIKKGILQTVKVVDELVKVMGRHKPENIVIEMARENQTTQKGQKNSRERMKRIEEGIKELGSQILKEHPVENTQLQNEKLYLYYLQNGRDMYVDQELDINRLSDYDVDHIVPQSFLKDDSIDNKVLTRSDKARGKSDNVPSEEVVKKMKNYWRQLLNAKLITQRKFDNLTKAERGGLSELDKAGFIKRQLVETRQITKHVAQILDSRMNTKYDENDKLIREVKVITLKSKLVSDFRKDFQFYKVREINNYHHAHDAYLNAVVGTALIKKYPKLESEFVYGDYKVYDVRKMIAKSEQEIGKATAKYFFYSNIMNFFKTEITLANGEIRKRPLIETNGETGEIVWDKGRDFATVRKVLSMPQVNIVKKTEVQTGGFSKESILPKRNSDKLIARKKDWDPKKYGGFDSPTVAYSVLVVAKVEKGKSKKLKSVKELLGITIMERSSFEKNPIDFLEAKGYKEVKKDLIIKLPKYSLFELENGRKRMLASAGELQKGNELALPSKYVNFLYLASHYEKLKGSPEDNEQKQLFVEQHKHYLDEIIEQISEFSKRVILADANLDKVLSAYNKHRDKPIREQAENIIHLFTLTNLGAPAAFKYFDTTIDRKRYTSTKEVLDATLIHQSITGLYETRIDLSQLGGDGGPAPEAAAKGSSGGTLNIEDEYRLHETSKEPDVSLGSTWLSDFPQAWAETGGMGLAVRQAPLIIPLKATSTPVSIKQYPMSQEARLGIKPHIQRLLDQGILVPCQSPWNTPLLPVKKPGTNDYRPVQDLREVNKRVEDIHPTVPNPYNLLSGLPPSHQWYTVLDLKDAFFCLRLHPTSQPLFAFEWRDPEMGISGQLTWTRLPQGFKNSPTLFNEALHRDLAGFRIQHPDLILLQYVDDLLLAATSELDCQQGTRALLQTLGDLGYRASAKKAQICQKQVKYLGYLLKEGQRWLTEARKETVMGQPIPKTPRQLREFLGTAGFCRLWIPGFAEMAAPLYPLTKPGTLFNWGPDQQKAFQEIKQALLTAPALGLPDLTKPFELFVDEKQGYAKGVLTQKLGPWRRPVAYLSKKLDPVAAGWPPCLRMVAAIAVLTKDAGKLTMGQPLVILAPHAVEALVKQPPDRWLSNARMTHYQALLLDTDRVQFGPVVALNPATLLPLPEEGLQHDCLDILAEAHGTRSDLMDQPLPDADHTWYTDGSSFLQEGQRKAGAAVTTETEVIWARALPAGTSAQRAELIALTQALKMAEGKKLNVYTDSRYAFATAHIHGEIYRRRGWLTSEGKEIKNKDEILALLKALFLPKRLSIIHCPGHQKGNSAEARGNRMADQAAREVATRETPETSTLLAGKRTADGSEFEKRTADGSEFESPKKKAKVE

SEQ ID NO: 2254 - protein, 2090 aa, synthetic construct
MPAAKRVKLDGGDKKYSIGLDIGTNSVGWAVITDEYKVPSKKFKVLGNTDRHSIKKNLIGALLFDSGETAEATRLKRTARRRYTRRKNRICYLQEIFSNEMAKVDDSFFHRLEESFLVEEDKKHERHPIFGNIVDEVAYHEKYPTIYHLRKKLVDSTDKADLRLIYLALAHMIKFRGHFLIEGDLNPDNSDVDKLFIQLVQTYNQLFEENPINASGVDAKAILSARLSKSRRLENLIAQLPGEKKNGLFGNLIALSLGLTPNFKSNFDLAEDAKLQLSKDTYDDDLDNLLAQIGDQYADLFLAAKNLSDAILLSDILRVNTEITKAPLSASMIKRYDEHHQDLTLLKALVRQQLPEKYKEIFFDQSKNGYAGYIDGGASQEEFYKFIKPILEKMDGTEELLVKLNREDLLRKQRTFDNGSIPHQIHLGELHAILRRQEDFYPFLKDNREKIEKILTFRIPYYVGPLARGNSRFAWMTRKSEETITPWNFEEVVDKGASAQSFIERMTNFDKNLPNEKVLPKHSLLYEYFTVYNELTKVKYVTEGMRKPAFLSGEQKKAIVDLLFKTNRKVTVKQLKEDYFKKIECFDSVEISGVEDRFNASLGTYHDLLKIIKDKDFLDNEENEDILEDIVLTLTLFEDREMIEERLKTYAHLFDDKVMKQLKRRRYTGWGRLSRKLINGIRDKQSGKTILDFLKSDGFANRNFMQLIHDDSLTFKEDIQKAQVSGQGDSLHEHIANLAGSPAIKKGILQTVKVVDELVKVMGRHKPENIVIEMARENQTTQKGQKNSRERMKRIEEGIKELGSQILKEHPVENTQLQNEKLYLYYLQNGRDMYVDQELDINRLSDYDVDHIVPQSFLKDDSIDNKVLTRSDKARGKSDNVPSEEVVKKMKNYWRQLLNAKLITQRKFDNLTKAERGGLSELDKAGFIKRQLVETRQITKHVAQILDSRMNTKYDENDKLIREVKVITLKSKLVSDFRKDFQFYKVREINNYHHAHDAYLNAVVGTALIKKYPKLESEFVYGDYKVYDVRKMIAKSEQEIGKATAKYFFYSNIMNFFKTEITLANGEIRKRPLIETNGETGEIVWDKGRDFATVRKVLSMPQVNIVKKTEVQTGGFSKESILPKRNSDKLIARKKDWDPKKYGGFDSPTVAYSVLVVAKVEKGKSKKLKSVKELLGITIMERSSFEKNPIDFLEAKGYKEVKKDLIIKLPKYSLFELENGRKRMLASAGELQKGNELALPSKYVNFLYLASHYEKLKGSPEDNEQKQLFVEQHKHYLDEIIEQISEFSKRVILADANLDKVLSAYNKHRDKPIREQAENIIHLFTLTNLGAPAAFKYFDTTIDRKRYTSTKEVLDATLIHQSITGLYETRIDLSQLGGDGGGGGGGGGTLNIEDEYRLHETSKEPDVSLGSTWLSDFPQAWAETGGMGLAVRQAPLIIPLKATSTPVSIKQYPMSQEARLGIKPHIQRLLDQGILVPCQSPWNTPLLPVKKPGTNDYRPVQDLREVNKRVEDIHPTVPNPYNLLSGLPPSHQWYTVLDLKDAFFCLRLHPTSQPLFAFEWRDPEMGISGQLTWTRLPQGFKNSPTLFNEALHRDLAGFRIQHPDLILLQYVDDLLLAATSELDCQQGTRALLQTLGDLGYRASAKKAQICQKQVKYLGYLLKEGQRWLTEARKETVMGQPIPKTPRQLREFLGTAGFCRLWIPGFAEMAAPLYPLTKPGTLFNWGPDQQKAFQEIKQALLTAPALGLPDLTKPFELFVDEKQGYAKGVLTQKLGPWRRPVAYLSKKLDPVAAGWPPCLRMVAAIAVLTKDAGKLTMGQPLVILAPHAVEALVKQPPDRWLSNARMTHYQALLLDTDRVQFGPVVALNPATLLPLPEEGLQHDCLDILAEAHGTRSDLMDQPLPDADHTWYTDGSSFLQEGQRKAGAAVTTETEVIWARALPAGTSAQRAELIALTQALKMAEGKKLNVYTDSRYAFATAHIHGEIYRRRGWLTSEGKEIKNKDEILALLKALFLPKRLSIIHCPGHQKGNSAEARGNRMADQAAREVATRETPETSTLLAGKRTADGSEFEKRTADGSEFESPKKKAKVE

SEQ ID NO: 2255 - protein, 2096 aa, synthetic construct
MPAAKRVKLDGGDKKYSIGLDIGTNSVGWAVITDEYKVPSKKFKVLGNTDRHSIKKNLIGALLFDSGETAEATRLKRTARRRYTRRKNRICYLQEIFSNEMAKVDDSFFHRLEESFLVEEDKKHERHPIFGNIVDEVAYHEKYPTIYHLRKKLVDSTDKADLRLIYLALAHMIKFRGHFLIEGDLNPDNSDVDKLFIQLVQTYNQLFEENPINASGVDAKAILSARLSKSRRLENLIAQLPGEKKNGLFGNLIALSLGLTPNFKSNFDLAEDAKLQLSKDTYDDDLDNLLAQIGDQYADLFLAAKNLSDAILLSDILRVNTEITKAPLSASMIKRYDEHHQDLTLLKALVRQQLPEKYKEIFFDQSKNGYAGYIDGGASQEEFYKFIKPILEKMDGTEELLVKLNREDLLRKQRTFDNGSIPHQIHLGELHAILRRQEDFYPFLKDNREKIEKILTFRIPYYVGPLARGNSRFAWMTRKSEETITPWNFEEVVDKGASAQSFIERMTNFDKNLPNEKVLPKHSLLYEYFTVYNELTKVKYVTEGMRKPAFLSGEQKKAIVDLLFKTNRKVTVKQLKEDYFKKIECFDSVEISGVEDRFNASLGTYHDLLKIIKDKDFLDNEENEDILEDIVLTLTLFEDREMIEERLKTYAHLFDDKVMKQLKRRRYTGWGRLSRKLINGIRDKQSGKTILDFLKSDGFANRNFMQLIHDDSLTFKEDIQKAQVSGQGDSLHEHIANLAGSPAIKKGILQTVKVVDELVKVMGRHKPENIVIEMARENQTTQKGQKNSRERMKRIEEGIKELGSQILKEHPVENTQLQNEKLYLYYLQNGRDMYVDQELDINRLSDYDVDHIVPQSFLKDDSIDNKVLTRSDKARGKSDNVPSEEVVKKMKNYWRQLLNAKLITQRKFDNLTKAERGGLSELDKAGFIKRQLVETRQITKHVAQILDSRMNTKYDENDKLIREVKVITLKSKLVSDFRKDFQFYKVREINNYHHAHDAYLNAVVGTALIKKYPKLESEFVYGDYKVYDVRKMIAKSEQEIGKATAKYFFYSNIMNFFKTEITLANGEIRKRPLIETNGETGEIVWDKGRDFATVRKVLSMPQVNIVKKTEVQTGGFSKESILPKRNSDKLIARKKDWDPKKYGGFDSPTVAYSVLVVAKVEKGKSKKLKSVKELLGITIMERSSFEKNPIDFLEAKGYKEVKKDLIIKLPKYSLFELENGRKRMLASAGELQKGNELALPSKYVNFLYLASHYEKLKGSPEDNEQKQLFVEQHKHYLDEIIEQISEFSKRVILADANLDKVLSAYNKHRDKPIREQAENIIHLFTLTNLGAPAAFKYFDTTIDRKRYTSTKEVLDATLIHQSITGLYETRIDLSQLGGDGGEAAAKPAPGSSGGTLNIEDEYRLHETSKEPDVSLGSTWLSDFPQAWAETGGMGLAVRQAPLIIPLKATSTPVSIKQYPMSQEARLGIKPHIQRLLDQGILVPCQSPWNTPLLPVKKPGTNDYRPVQDLREVNKRVEDIHPTVPNPYNLLSGLPPSHQWYTVLDLKDAFFCLRLHPTSQPLFAFEWRDPEMGISGQLTWTRLPQGFKNSPTLFNEALHRDLAGFRIQHPDLILLQYVDDLLLAATSELDCQQGTRALLQTLGDLGYRASAKKAQICQKQVKYLGYLLKEGQRWLTEARKETVMGQPIPKTPRQLREFLGTAGFCRLWIPGFAEMAAPLYPLTKPGTLFNWGPDQQKAFQEIKQALLTAPALGLPDLTKPFELFVDEKQGYAKGVLTQKLGPWRRPVAYLSKKLDPVAAGWPPCLRMVAAIAVLTKDAGKLTMGQPLVILAPHAVEALVKQPPDRWLSNARMTHYQALLLDTDRVQFGPVVALNPATLLPLPEEGLQHDCLDILAEAHGTRSDLMDQPLPDADHTWYTDGSSFLQEGQRKAGAAVTTETEVIWARALPAGTSAQRAELIALTQALKMAEGKKLNVYTDSRYAFATAHIHGEIYRRRGWLTSEGKEIKNKDEILALLKALFLPKRLSIIHCPGHQKGNSAEARGNRMADQAAREVATRETPETSTLLAGKRTADGSEFEKRTADGSEFESPKKKAKVE

SEQ ID NO: 2256 - protein, 2096 aa, synthetic construct
MPAAKRVKLDGGDKKYSIGLDIGTNSVGWAVITDEYKVPSKKFKVLGNTDRHSIKKNLIGALLFDSGETAEATRLKRTARRRYTRRKNRICYLQEIFSNEMAKVDDSFFHRLEESFLVEEDKKHERHPIFGNIVDEVAYHEKYPTIYHLRKKLVDSTDKADLRLIYLALAHMIKFRGHFLIEGDLNPDNSDVDKLFIQLVQTYNQLFEENPINASGVDAKAILSARLSKSRRLENLIAQLPGEKKNGLFGNLIALSLGLTPNFKSNFDLAEDAKLQLSKDTYDDDLDNLLAQIGDQYADLFLAAKNLSDAILLSDILRVNTEITKAPLSASMIKRYDEHHQDLTLLKALVRQQLPEKYKEIFFDQSKNGYAGYIDGGASQEEFYKFIKPILEKMDGTEELLVKLNREDLLRKQRTFDNGSIPHQIHLGELHAILRRQEDFYPFLKDNREKIEKILTFRIPYYVGPLARGNSRFAWMTRKSEETITPWNFEEVVDKGASAQSFIERMTNFDKNLPNEKVLPKHSLLYEYFTVYNELTKVKYVTEGMRKPAFLSGEQKKAIVDLLFKTNRKVTVKQLKEDYFKKIECFDSVEISGVEDRFNASLGTYHDLLKIIKDKDFLDNEENEDILEDIVLTLTLFEDREMIEERLKTYAHLFDDKVMKQLKRRRYTGWGRLSRKLINGIRDKQSGKTILDFLKSDGFANRNFMQLIHDDSLTFKEDIQKAQVSGQGDSLHEHIANLAGSPAIKKGILQTVKVVDELVKVMGRHKPENIVIEMARENQTTQKGQKNSRERMKRIEEGIKELGSQILKEHPVENTQLQNEKLYLYYLQNGRDMYVDQELDINRLSDYDVDHIVPQSFLKDDSIDNKVLTRSDKARGKSDNVPSEEVVKKMKNYWRQLLNAKLITQRKFDNLTKAERGGLSELDKAGFIKRQLVETRQITKHVAQILDSRMNTKYDENDKLIREVKVITLKSKLVSDFRKDFQFYKVREINNYHHAHDAYLNAVVGTALIKKYPKLESEFVYGDYKVYDVRKMIAKSEQEIGKATAKYFFYSNIMNFFKTEITLANGEIRKRPLIETNGETGEIVWDKGRDFATVRKVLSMPQVNIVKKTEVQTGGFSKESILPKRNSDKLIARKKDWDPKKYGGFDSPTVAYSVLVVAKVEKGKSKKLKSVKELLGITIMERSSFEKNPIDFLEAKGYKEVKKDLIIKLPKYSLFELENGRKRMLASAGELQKGNELALPSKYVNFLYLASHYEKLKGSPEDNEQKQLFVEQHKHYLDEIIEQISEFSKRVILADANLDKVLSAYNKHRDKPIREQAENIIHLFTLTNLGAPAAFKYFDTTIDRKRYTSTKEVLDATLIHQSITGLYETRIDLSQLGGDGGEAAAKGGGGGSGGTLNIEDEYRLHETSKEPDVSLGSTWLSDFPQAWAETGGMGLAVRQAPLIIPLKATSTPVSIKQYPMSQEARLGIKPHIQRLLDQGILVPCQSPWNTPLLPVKKPGTNDYRPVQDLREVNKRVEDIHPTVPNPYNLLSGLPPSHQWYTVLDLKDAFFCLRLHPTSQPLFAFEWRDPEMGISGQLTWTRLPQGFKNSPTLFNEALHRDLAGFRIQHPDLILLQYVDDLLLAATSELDCQQGTRALLQTLGDLGYRASAKKAQICQKQVKYLGYLLKEGQRWLTEARKETVMGQPIPKTPRQLREFLGTAGFCRLWIPGFAEMAAPLYPLTKPGTLFNWGPDQQKAFQEIKQALLTAPALGLPDLTKPFELFVDEKQGYAKGVLTQKLGPWRRPVAYLSKKLDPVAAGWPPCLRMVAAIAVLTKDAGKLTMGQPLVILAPHAVEALVKQPPDRWLSNARMTHYQALLLDTDRVQFGPVVALNPATLLPLPEEGLQHDCLDILAEAHGTRSDLMDQPLPDADHTWYTDGSSFLQEGQRKAGAAVTTETEVIWARALPAGTSAQRAELIALTQALKMAEGKKLNVYTDSRYAFATAHIHGEIYRRRGWLTSEGKEIKNKDEILALLKALFLPKRLSIIHCPGHQKGNSAEARGNRMADQAAREVATRETPETSTLLAGKRTADGSEFEKRTADGSEFESPKKKAKVE

SEQ ID NO: 2257 - protein, 2096 aa, synthetic construct
MPAAKRVKLDGGDKKYSIGLDIGTNSVGWAVITDEYKVPSKKFKVLGNTDRHSIKKNLIGALLFDSGETAEATRLKRTARRRYTRRKNRICYLQEIFSNEMAKVDDSFFHRLEESFLVEEDKKHERHPIFGNIVDEVAYHEKYPTIYHLRKKLVDSTDKADLRLIYLALAHMIKFRGHFLIEGDLNPDNSDVDKLFIQLVQTYNQLFEENPINASGVDAKAILSARLSKSRRLENLIAQLPGEKKNGLFGNLIALSLGLTPNFKSNFDLAEDAKLQLSKDTYDDDLDNLLAQIGDQYADLFLAAKNLSDAILLSDILRVNTEITKAPLSASMIKRYDEHHQDLTLLKALVRQQLPEKYKEIFFDQSKNGYAGYIDGGASQEEFYKFIKPILEKMDGTEELLVKLNREDLLRKQRTFDNGSIPHQIHLGELHAILRRQEDFYPFLKDNREKIEKILTFRIPYYVGPLARGNSRFAWMTRKSEETITPWNFEEVVDKGASAQSFIERMTNFDKNLPNEKVLPKHSLLYEYFTVYNELTKVKYVTEGMRKPAFLSGEQKKAIVDLLFKTNRKVTVKQLKEDYFKKIECFDSVEISGVEDRFNASLGTYHDLLKIIKDKDFLDNEENEDILEDIVLTLTLFEDREMIEERLKTYAHLFDDKVMKQLKRRRYTGWGRLSRKLINGIRDKQSGKTILDFLKSDGFANRNFMQLIHDDSLTFKEDIQKAQVSGQGDSLHEHIANLAGSPAIKKGILQTVKVVDELVKVMGRHKPENIVIEMARENQTTQKGQKNSRERMKRIEEGIKELGSQILKEHPVENTQLQNEKLYLYYLQNGRDMYVDQELDINRLSDYDVDHIVPQSFLKDDSIDNKVLTRSDKARGKSDNVPSEEVVKKMKNYWRQLLNAKLITQRKFDNLTKAERGGLSELDKAGFIKRQLVETRQITKHVAQILDSRMNTKYDENDKLIREVKVITLKSKLVSDFRKDFQFYKVREINNYHHAHDAYLNAVVGTALIKKYPKLESEFVYGDYKVYDVRKMIAKSEQEIGKATAKYFFYSNIMNFFKTEITLANGEIRKRPLIETNGETGEIVWDKGRDFATVRKVLSMPQVNIVKKTEVQTGGFSKESILPKRNSDKLIARKKDWDPKKYGGFDSPTVAYSVLVVAKVEKGKSKKLKSVKELLGITIMERSSFEKNPIDFLEAKGYKEVKKDLIIKLPKYSLFELENGRKRMLASAGELQKGNELALPSKYVNFLYLASHYEKLKGSPEDNEQKQLFVEQHKHYLDEIIEQISEFSKRVILADANLDKVLSAYNKHRDKPIREQAENIIHLFTLTNLGAPAAFKYFDTTIDRKRYTSTKEVLDATLIHQSITGLYETRIDLSQLGGDGGEAAAKGGSPAPGGTLNIEDEYRLHETSKEPDVSLGSTWLSDFPQAWAETGGMGLAVRQAPLIIPLKATSTPVSIKQYPMSQEARLGIKPHIQRLLDQGILVPCQSPWNTPLLPVKKPGTNDYRPVQDLREVNKRVEDIHPTVPNPYNLLSGLPPSHQWYTVLDLKDAFFCLRLHPTSQPLFAFEWRDPEMGISGQLTWTRLPQGFKNSPTLFNEALHRDLAGFRIQHPDLILLQYVDDLLLAATSELDCQQGTRALLQTLGDLGYRASAKKAQICQKQVKYLGYLLKEGQRWLTEARKETVMGQPIPKTPRQLREFLGTAGFCRLWIPGFAEMAAPLYPLTKPGTLFNWGPDQQKAFQEIKQALLTAPALGLPDLTKPFELFVDEKQGYAKGVLTQKLGPWRRPVAYLSKKLDPVAAGWPPCLRMVAAIAVLTKDAGKLTMGQPLVILAPHAVEALVKQPPDRWLSNARMTHYQALLLDTDRVQFGPVVALNPATLLPLPEEGLQHDCLDILAEAHGTRSDLMDQPLPDADHTWYTDGSSFLQEGQRKAGAAVTTETEVIWARALPAGTSAQRAELIALTQALKMAEGKKLNVYTDSRYAFATAHIHGEIYRRRGWLTSEGKEIKNKDEILALLKALFLPKRLSIIHCPGHQKGNSAEARGNRMADQAAREVATRETPETSTLLAGKRTADGSEFEKRTADGSEFESPKKKAKVE

SEQ ID NO: 2258 - protein, 2088 aa, synthetic construct
MPAAKRVKLDGGDKKYSIGLDIGTNSVGWAVITDEYKVPSKKFKVLGNTDRHSIKKNLIGALLFDSGETAEATRLKRTARRRYTRRKNRICYLQEIFSNEMAKVDDSFFHRLEESFLVEEDKKHERHPIFGNIVDEVAYHEKYPTIYHLRKKLVDSTDKADLRLIYLALAHMIKFRGHFLIEGDLNPDNSDVDKLFIQLVQTYNQLFEENPINASGVDAKAILSARLSKSRRLENLIAQLPGEKKNGLFGNLIALSLGLTPNFKSNFDLAEDAKLQLSKDTYDDDLDNLLAQIGDQYADLFLAAKNLSDAILLSDILRVNTEITKAPLSASMIKRYDEHHQDLTLLKALVRQQLPEKYKEIFFDQSKNGYAGYIDGGASQEEFYKFIKPILEKMDGTEELLVKLNREDLLRKQRTFDNGSIPHQIHLGELHAILRRQEDFYPFLKDNREKIEKILTFRIPYYVGPLARGNSRFAWMTRKSEETITPWNFEEVVDKGASAQSFIERMTNFDKNLPNEKVLPKHSLLYEYFTVYNELTKVKYVTEGMRKPAFLSGEQKKAIVDLLFKTNRKVTVKQLKEDYFKKIECFDSVEISGVEDRFNASLGTYHDLLKIIKDKDFLDNEENEDILEDIVLTLTLFEDREMIEERLKTYAHLFDDKVMKQLKRRRYTGWGRLSRKLINGIRDKQSGKTILDFLKSDGFANRNFMQLIHDDSLTFKEDIQKAQVSGQGDSLHEHIANLAGSPAIKKGILQTVKVVDELVKVMGRHKPENIVIEMARENQTTQKGQKNSRERMKRIEEGIKELGSQILKEHPVENTQLQNEKLYLYYLQNGRDMYVDQELDINRLSDYDVDHIVPQSFLKDDSIDNKVLTRSDKARGKSDNVPSEEVVKKMKNYWRQLLNAKLITQRKFDNLTKAERGGLSELDKAGFIKRQLVETRQITKHVAQILDSRMNTKYDENDKLIREVKVITLKSKLVSDFRKDFQFYKVREINNYHHAHDAYLNAVVGTALIKKYPKLESEFVYGDYKVYDVRKMIAKSEQEIGKATAKYFFYSNIMNFFKTEITLANGEIRKRPLIETNGETGEIVWDKGRDFATVRKVLSMPQVNIVKKTEVQTGGFSKESILPKRNSDKLIARKKDWDPKKYGGFDSPTVAYSVLVVAKVEKGKSKKLKSVKELLGITIMERSSFEKNPIDFLEAKGYKEVKKDLIIKLPKYSLFELENGRKRMLASAGELQKGNELALPSKYVNFLYLASHYEKLKGSPEDNEQKQLFVEQHKHYLDEIIEQISEFSKRVILADANLDKVLSAYNKHRDKPIREQAENIIHLFTLTNLGAPAAFKYFDTTIDRKRYTSTKEVLDATLIHQSITGLYETRIDLSQLGGDGGPAPGGTLNIEDEYRLHETSKEPDVSLGSTWLSDFPQAWAETGGMGLAVRQAPLIIPLKATSTPVSIKQYPMSQEARLGIKPHIQRLLDQGILVPCQSPWNTPLLPVKKPGTNDYRPVQDLREVNKRVEDIHPTVPNPYNLLSGLPPSHQWYTVLDLKDAFFCLRLHPTSQPLFAFEWRDPEMGISGQLTWTRLPQGFKNSPTLFNEALHRDLAGFRIQHPDLILLQYVDDLLLAATSELDCQQGTRALLQTLGDLGYRASAKKAQICQKQVKYLGYLLKEGQRWLTEARKETVMGQPIPKTPRQLREFLGTAGFCRLWIPGFAEMAAPLYPLTKPGTLFNWGPDQQKAFQEIKQALLTAPALGLPDLTKPFELFVDEKQGYAKGVLTQKLGPWRRPVAYLSKKLDPVAAGWPPCLRMVAAIAVLTKDAGKLTMGQPLVILAPHAVEALVKQPPDRWLSNARMTHYQALLLDTDRVQFGPVVALNPATLLPLPEEGLQHDCLDILAEAHGTRSDLMDQPLPDADHTWYTDGSSFLQEGQRKAGAAVTTETEVIWARALPAGTSAQRAELIALTQALKMAEGKKLNVYTDSRYAFATAHIHGEIYRRRGWLTSEGKEIKNKDEILALLKALFLPKRLSIIHCPGHQKGNSAEARGNRMADQAAREVATRETPETSTLLAGKRTADGSEFEKRTADGSEFESPKKKAKVE

SEQ ID NO: 2259 - protein, 2094 aa, synthetic construct
MPAAKRVKLDGGDKKYSIGLDIGTNSVGWAVITDEYKVPSKKFKVLGNTDRHSIKKNLIGALLFDSGETAEATRLKRTARRRYTRRKNRICYLQEIFSNEMAKVDDSFFHRLEESFLVEEDKKHERHPIFGNIVDEVAYHEKYPTIYHLRKKLVDSTDKADLRLIYLALAHMIKFRGHFLIEGDLNPDNSDVDKLFIQLVQTYNQLFEENPINASGVDAKAILSARLSKSRRLENLIAQLPGEKKNGLFGNLIALSLGLTPNFKSNFDLAEDAKLQLSKDTYDDDLDNLLAQIGDQYADLFLAAKNLSDAILLSDILRVNTEITKAPLSASMIKRYDEHHQDLTLLKALVRQQLPEKYKEIFFDQSKNGYAGYIDGGASQEEFYKFIKPILEKMDGTEELLVKLNREDLLRKQRTFDNGSIPHQIHLGELHAILRRQEDFYPFLKDNREKIEKILTFRIPYYVGPLARGNSRFAWMTRKSEETITPWNFEEVVDKGASAQSFIERMTNFDKNLPNEKVLPKHSLLYEYFTVYNELTKVKYVTEGMRKPAFLSGEQKKAIVDLLFKTNRKVTVKQLKEDYFKKIECFDSVEISGVEDRFNASLGTYHDLLKIIKDKDFLDNEENEDILEDIVLTLTLFEDREMIEERLKTYAHLFDDKVMKQLKRRRYTGWGRLSRKLINGIRDKQSGKTILDFLKSDGFANRNFMQLIHDDSLTFKEDIQKAQVSGQGDSLHEHIANLAGSPAIKKGILQTVKVVDELVKVMGRHKPENIVIEMARENQTTQKGQKNSRERMKRIEEGIKELGSQILKEHPVENTQLQNEKLYLYYLQNGRDMYVDQELDINRLSDYDVDHIVPQSFLKDDSIDNKVLTRSDKARGKSDNVPSEEVVKKMKNYWRQLLNAKLITQRKFDNLTKAERGGLSELDKAGFIKRQLVETRQITKHVAQILDSRMNTKYDENDKLIREVKVITLKSKLVSDFRKDFQFYKVREINNYHHAHDAYLNAVVGTALIKKYPKLESEFVYGDYKVYDVRKMIAKSEQEIGKATAKYFFYSNIMNFFKTEITLANGEIRKRPLIETNGETGEIVWDKGRDFATVRKVLSMPQVNIVKKTEVQTGGFSKESILPKRNSDKLIARKKDWDPKKYGGFDSPTVAYSVLVVAKVEKGKSKKLKSVKELLGITIMERSSFEKNPIDFLEAKGYKEVKKDLIIKLPKYSLFELENGRKRMLASAGELQKGNELALPSKYVNFLYLASHYEKLKGSPEDNEQKQLFVEQHKHYLDEIIEQISEFSKRVILADANLDKVLSAYNKHRDKPIREQAENIIHLFTLTNLGAPAAFKYFDTTIDRKRYTSTKEVLDATLIHQSITGLYETRIDLSQLGGDGGGGSGGGPAPGGTLNIEDEYRLHETSKEPDVSLGSTWLSDFPQAWAETGGMGLAVRQAPLIIPLKATSTPVSIKQYPMSQEARLGIKPHIQRLLDQGILVPCQSPWNTPLLPVKKPGTNDYRPVQDLREVNKRVEDIHPTVPNPYNLLSGLPPSHQWYTVLDLKDAFFCLRLHPTSQPLFAFEWRDPEMGISGQLTWTRLPQGFKNSPTLFNEALHRDLAGFRIQHPDLILLQYVDDLLLAATSELDCQQGTRALLQTLGDLGYRASAKKAQICQKQVKYLGYLLKEGQRWLTEARKETVMGQPIPKTPRQLREFLGTAGFCRLWIPGFAEMAAPLYPLTKPGTLFNWGPDQQKAFQEIKQALLTAPALGLPDLTKPFELFVDEKQGYAKGVLTQKLGPWRRPVAYLSKKLDPVAAGWPPCLRMVAAIAVLTKDAGKLTMGQPLVILAPHAVEALVKQPPDRWLSNARMTHYQALLLDTDRVQFGPVVALNPATLLPLPEEGLQHDCLDILAEAHGTRSDLMDQPLPDADHTWYTDGSSFLQEGQRKAGAAVTTETEVIWARALPAGTSAQRAELIALTQALKMAEGKKLNVYTDSRYAFATAHIHGEIYRRRGWLTSEGKEIKNKDEILALLKALFLPKRLSIIHCPGHQKGNSAEARGNRMADQAAREVATRETPETSTLLAGKRTADGSEFEKRTADGSEFESPKKKAKVE

SEQ ID NO: 2260 - protein, 2094 aa, synthetic construct
MPAAKRVKLDGGDKKYSIGLDIGTNSVGWAVITDEYKVPSKKFKVLGNTDRHSIKKNLIGALLFDSGETAEATRLKRTARRRYTRRKNRICYLQEIFSNEMAKVDDSFFHRLEESFLVEEDKKHERHPIFGNIVDEVAYHEKYPTIYHLRKKLVDSTDKADLRLIYLALAHMIKFRGHFLIEGDLNPDNSDVDKLFIQLVQTYNQLFEENPINASGVDAKAILSARLSKSRRLENLIAQLPGEKKNGLFGNLIALSLGLTPNFKSNFDLAEDAKLQLSKDTYDDDLDNLLAQIGDQYADLFLAAKNLSDAILLSDILRVNTEITKAPLSASMIKRYDEHHQDLTLLKALVRQQLPEKYKEIFFDQSKNGYAGYIDGGASQEEFYKFIKPILEKMDGTEELLVKLNREDLLRKQRTFDNGSIPHQIHLGELHAILRRQEDFYPFLKDNREKIEKILTFRIPYYVGPLARGNSRFAWMTRKSEETITPWNFEEVVDKGASAQSFIERMTNFDKNLPNEKVLPKHSLLYEYFTVYNELTKVKYVTEGMRKPAFLSGEQKKAIVDLLFKTNRKVTVKQLKEDYFKKIECFDSVEISGVEDRFNASLGTYHDLLKIIKDKDFLDNEENEDILEDIVLTLTLFEDREMIEERLKTYAHLFDDKVMKQLKRRRYTGWGRLSRKLINGIRDKQSGKTILDFLKSDGFANRNFMQLIHDDSLTFKEDIQKAQVSGQGDSLHEHIANLAGSPAIKKGILQTVKVVDELVKVMGRHKPENIVIEMARENQTTQKGQKNSRERMKRIEEGIKELGSQILKEHPVENTQLQNEKLYLYYLQNGRDMYVDQELDINRLSDYDVDHIVPQSFLKDDSIDNKVLTRSDKARGKSDNVPSEEVVKKMKNYWRQLLNAKLITQRKFDNLTKAERGGLSELDKAGFIKRQLVETRQITKHVAQILDSRMNTKYDENDKLIREVKVITLKSKLVSDFRKDFQFYKVREINNYHHAHDAYLNAVVGTALIKKYPKLESEFVYGDYKVYDVRKMIAKSEQEIGKATAKYFFYSNIMNFFKTEITLANGEIRKRPLIETNGETGEIVWDKGRDFATVRKVLSMPQVNIVKKTEVQTGGFSKESILPKRNSDKLIARKKDWDPKKYGGFDSPTVAYSVLVVAKVEKGKSKKLKSVKELLGITIMERSSFEKNPIDFLEAKGYKEVKKDLIIKLPKYSLFELENGRKRMLASAGELQKGNELALPSKYVNFLYLASHYEKLKGSPEDNEQKQLFVEQHKHYLDEIIEQISEFSKRVILADANLDKVLSAYNKHRDKPIREQAENIIHLFTLTNLGAPAAFKYFDTTIDRKRYTSTKEVLDATLIHQSITGLYETRIDLSQLGGDGGGGSPAPGSSGGTLNIEDEYRLHETSKEPDVSLGSTWLSDFPQAWAETGGMGLAVRQAPLIIPLKATSTPVSIKQYPMSQEARLGIKPHIQRLLDQGILVPCQSPWNTPLLPVKKPGTNDYRPVQDLREVNKRVEDIHPTVPNPYNLLSGLPPSHQWYTVLDLKDAFFCLRLHPTSQPLFAFEWRDPEMGISGQLTWTRLPQGFKNSPTLFNEALHRDLAGFRIQHPDLILLQYVDDLLLAATSELDCQQGTRALLQTLGDLGYRASAKKAQICQKQVKYLGYLLKEGQRWLTEARKETVMGQPIPKTPRQLREFLGTAGFCRLWIPGFAEMAAPLYPLTKPGTLFNWGPDQQKAFQEIKQALLTAPALGLPDLTKPFELFVDEKQGYAKGVLTQKLGPWRRPVAYLSKKLDPVAAGWPPCLRMVAAIAVLTKDAGKLTMGQPLVILAPHAVEALVKQPPDRWLSNARMTHYQALLLDTDRVQFGPVVALNPATLLPLPEEGLQHDCLDILAEAHGTRSDLMDQPLPDADHTWYTDGSSFLQEGQRKAGAAVTTETEVIWARALPAGTSAQRAELIALTQALKMAEGKKLNVYTDSRYAFATAHIHGEIYRRRGWLTSEGKEIKNKDEILALLKALFLPKRLSIIHCPGHQKGNSAEARGNRMADQAAREVATRETPETSTLLAGKRTADGSEFEKRTADGSEFESPKKKAKVE

SEQ ID NO: 2261 - protein, 2096 aa, synthetic construct
MPAAKRVKLDGGDKKYSIGLDIGTNSVGWAVITDEYKVPSKKFKVLGNTDRHSIKKNLIGALLFDSGETAEATRLKRTARRRYTRRKNRICYLQEIFSNEMAKVDDSFFHRLEESFLVEEDKKHERHPIFGNIVDEVAYHEKYPTIYHLRKKLVDSTDKADLRLIYLALAHMIKFRGHFLIEGDLNPDNSDVDKLFIQLVQTYNQLFEENPINASGVDAKAILSARLSKSRRLENLIAQLPGEKKNGLFGNLIALSLGLTPNFKSNFDLAEDAKLQLSKDTYDDDLDNLLAQIGDQYADLFLAAKNLSDAILLSDILRVNTEITKAPLSASMIKRYDEHHQDLTLLKALVRQQLPEKYKEIFFDQSKNGYAGYIDGGASQEEFYKFIKPILEKMDGTEELLVKLNREDLLRKQRTFDNGSIPHQIHLGELHAILRRQEDFYPFLKDNREKIEKILTFRIPYYVGPLARGNSRFAWMTRKSEETITPWNFEEVVDKGASAQSFIERMTNFDKNLPNEKVLPKHSLLYEYFTVYNELTKVKYVTEGMRKPAFLSGEQKKAIVDLLFKTNRKVTVKQLKEDYFKKIECFDSVEISGVEDRFNASLGTYHDLLKIIKDKDFLDNEENEDILEDIVLTLTLFEDREMIEERLKTYAHLFDDKVMKQLKRRRYTGWGRLSRKLINGIRDKQSGKTILDFLKSDGFANRNFMQLIHDDSLTFKEDIQKAQVSGQGDSLHEHIANLAGSPAIKKGILQTVKVVDELVKVMGRHKPENIVIEMARENQTTQKGQKNSRERMKRIEEGIKELGSQILKEHPVENTQLQNEKLYLYYLQNGRDMYVDQELDINRLSDYDVDHIVPQSFLKDDSIDNKVLTRSDKARGKSDNVPSEEVVKKMKNYWRQLLNAKLITQRKFDNLTKAERGGLSELDKAGFIKRQLVETRQITKHVAQILDSRMNTKYDENDKLIREVKVITLKSKLVSDFRKDFQFYKVREINNYHHAHDAYLNAVVGTALIKKYPKLESEFVYGDYKVYDVRKMIAKSEQEIGKATAKYFFYSNIMNFFKTEITLANGEIRKRPLIETNGETGEIVWDKGRDFATVRKVLSMPQVNIVKKTEVQTGGFSKESILPKRNSDKLIARKKDWDPKKYGGFDSPTVAYSVLVVAKVEKGKSKKLKSVKELLGITIMERSSFEKNPIDFLEAKGYKEVKKDLIIKLPKYSLFELENGRKRMLASAGELQKGNELALPSKYVNFLYLASHYEKLKGSPEDNEQKQLFVEQHKHYLDEIIEQISEFSKRVILADANLDKVLSAYNKHRDKPIREQAENIIHLFTLTNLGAPAAFKYFDTTIDRKRYTSTKEVLDATLIHQSITGLYETRIDLSQLGGDGGEAAAKGGGGSSGGTLNIEDEYRLHETSKEPDVSLGSTWLSDFPQAWAETGGMGLAVRQAPLIIPLKATSTPVSIKQYPMSQEARLGIKPHIQRLLDQGILVPCQSPWNTPLLPVKKPGTNDYRPVQDLREVNKRVEDIHPTVPNPYNLLSGLPPSHQWYTVLDLKDAFFCLRLHPTSQPLFAFEWRDPEMGISGQLTWTRLPQGFKNSPTLFNEALHRDLAGFRIQHPDLILLQYVDDLLLAATSELDCQQGTRALLQTLGDLGYRASAKKAQICQKQVKYLGYLLKEGQRWLTEARKETVMGQPIPKTPRQLREFLGTAGFCRLWIPGFAEMAAPLYPLTKPGTLFNWGPDQQKAFQEIKQALLTAPALGLPDLTKPFELFVDEKQGYAKGVLTQKLGPWRRPVAYLSKKLDPVAAGWPPCLRMVAAIAVLTKDAGKLTMGQPLVILAPHAVEALVKQPPDRWLSNARMTHYQALLLDTDRVQFGPVVALNPATLLPLPEEGLQHDCLDILAEAHGTRSDLMDQPLPDADHTWYTDGSSFLQEGQRKAGAAVTTETEVIWARALPAGTSAQRAELIALTQALKMAEGKKLNVYTDSRYAFATAHIHGEIYRRRGWLTSEGKEIKNKDEILALLKALFLPKRLSIIHCPGHQKGNSAEARGNRMADQAAREVATRETPETSTLLAGKRTADGSEFEKRTADGSEFESPKKKAKVE

SEQ ID NO: 2262 - protein, 2094 aa, synthetic construct
MPAAKRVKLDGGDKKYSIGLDIGTNSVGWAVITDEYKVPSKKFKVLGNTDRHSIKKNLIGALLFDSGETAEATRLKRTARRRYTRRKNRICYLQEIFSNEMAKVDDSFFHRLEESFLVEEDKKHERHPIFGNIVDEVAYHEKYPTIYHLRKKLVDSTDKADLRLIYLALAHMIKFRGHFLIEGDLNPDNSDVDKLFIQLVQTYNQLFEENPINASGVDAKAILSARLSKSRRLENLIAQLPGEKKNGLFGNLIALSLGLTPNFKSNFDLAEDAKLQLSKDTYDDDLDNLLAQIGDQYADLFLAAKNLSDAILLSDILRVNTEITKAPLSASMIKRYDEHHQDLTLLKALVRQQLPEKYKEIFFDQSKNGYAGYIDGGASQEEFYKFIKPILEKMDGTEELLVKLNREDLLRKQRTFDNGSIPHQIHLGELHAILRRQEDFYPFLKDNREKIEKILTFRIPYYVGPLARGNSRFAWMTRKSEETITPWNFEEVVDKGASAQSFIERMTNFDKNLPNEKVLPKHSLLYEYFTVYNELTKVKYVTEGMRKPAFLSGEQKKAIVDLLFKTNRKVTVKQLKEDYFKKIECFDSVEISGVEDRFNASLGTYHDLLKIIKDKDFLDNEENEDILEDIVLTLTLFEDREMIEERLKTYAHLFDDKVMKQLKRRRYTGWGRLSRKLINGIRDKQSGKTILDFLKSDGFANRNFMQLIHDDSLTFKEDIQKAQVSGQGDSLHEHIANLAGSPAIKKGILQTVKVVDELVKVMGRHKPENIVIEMARENQTTQKGQKNSRERMKRIEEGIKELGSQILKEHPVENTQLQNEKLYLYYLQNGRDMYVDQELDINRLSDYDVDHIVPQSFLKDDSIDNKVLTRSDKARGKSDNVPSEEVVKKMKNYWRQLLNAKLITQRKFDNLTKAERGGLSELDKAGFIKRQLVETRQITKHVAQILDSRMNTKYDENDKLIREVKVITLKSKLVSDFRKDFQFYKVREINNYHHAHDAYLNAVVGTALIKKYPKLESEFVYGDYKVYDVRKMIAKSEQEIGKATAKYFFYSNIMNFFKTEITLANGEIRKRPLIETNGETGEIVWDKGRDFATVRKVLSMPQVNIVKKTEVQTGGFSKESILPKRNSDKLIARKKDWDPKKYGGFDSPTVAYSVLVVAKVEKGKSKKLKSVKELLGITIMERSSFEKNPIDFLEAKGYKEVKKDLIIKLPKYSLFELENGRKRMLASAGELQKGNELALPSKYVNFLYLASHYEKLKGSPEDNEQKQLFVEQHKHYLDEIIEQISEFSKRVILADANLDKVLSAYNKHRDKPIREQAENIIHLFTLTNLGAPAAFKYFDTTIDRKRYTSTKEVLDATLIHQSITGLYETRIDLSQLGGDGGPAPGSSGGGGGTLNIEDEYRLHETSKEPDVSLGSTWLSDFPQAWAETGGMGLAVRQAPLIIPLKATSTPVSIKQYPMSQEARLGIKPHIQRLLDQGILVPCQSPWNTPLLPVKKPGTNDYRPVQDLREVNKRVEDIHPTVPNPYNLLSGLPPSHQWYTVLDLKDAFFCLRLHPTSQPLFAFEWRDPEMGISGQLTWTRLPQGFKNSPTLFNEALHRDLAGFRIQHPDLILLQYVDDLLLAATSELDCQQGTRALLQTLGDLGYRASAKKAQICQKQVKYLGYLLKEGQRWLTEARKETVMGQPIPKTPRQLREFLGTAGFCRLWIPGFAEMAAPLYPLTKPGTLFNWGPDQQKAFQEIKQALLTAPALGLPDLTKPFELFVDEKQGYAKGVLTQKLGPWRRPVAYLSKKLDPVAAGWPPCLRMVAAIAVLTKDAGKLTMGQPLVILAPHAVEALVKQPPDRWLSNARMTHYQALLLDTDRVQFGPVVALNPATLLPLPEEGLQHDCLDILAEAHGTRSDLMDQPLPDADHTWYTDGSSFLQEGQRKAGAAVTTETEVIWARALPAGTSAQRAELIALTQALKMAEGKKLNVYTDSRYAFATAHIHGEIYRRRGWLTSEGKEIKNKDEILALLKALFLPKRLSIIHCPGHQKGNSAEARGNRMADQAAREVATRETPETSTLLAGKRTADGSEFEKRTADGSEFESPKKKAKVE

SEQ ID NO: 2263 - protein, 2096 aa, synthetic construct
MPAAKRVKLDGGDKKYSIGLDIGTNSVGWAVITDEYKVPSKKFKVLGNTDRHSIKKNLIGALLFDSGETAEATRLKRTARRRYTRRKNRICYLQEIFSNEMAKVDDSFFHRLEESFLVEEDKKHERHPIFGNIVDEVAYHEKYPTIYHLRKKLVDSTDKADLRLIYLALAHMIKFRGHFLIEGDLNPDNSDVDKLFIQLVQTYNQLFEENPINASGVDAKAILSARLSKSRRLENLIAQLPGEKKNGLFGNLIALSLGLTPNFKSNFDLAEDAKLQLSKDTYDDDLDNLLAQIGDQYADLFLAAKNLSDAILLSDILRVNTEITKAPLSASMIKRYDEHHQDLTLLKALVRQQLPEKYKEIFFDQSKNGYAGYIDGGASQEEFYKFIKPILEKMDGTEELLVKLNREDLLRKQRTFDNGSIPHQIHLGELHAILRRQEDFYPFLKDNREKIEKILTFRIPYYVGPLARGNSRFAWMTRKSEETITPWNFEEVVDKGASAQSFIERMTNFDKNLPNEKVLPKHSLLYEYFTVYNELTKVKYVTEGMRKPAFLSGEQKKAIVDLLFKTNRKVTVKQLKEDYFKKIECFDSVEISGVEDRFNASLGTYHDLLKIIKDKDFLDNEENEDILEDIVLTLTLFEDREMIEERLKTYAHLFDDKVMKQLKRRRYTGWGRLSRKLINGIRDKQSGKTILDFLKSDGFANRNFMQLIHDDSLTFKEDIQKAQVSGQGDSLHEHIANLAGSPAIKKGILQTVKVVDELVKVMGRHKPENIVIEMARENQTTQKGQKNSRERMKRIEEGIKELGSQILKEHPVENTQLQNEKLYLYYLQNGRDMYVDQELDINRLSDYDVDHIVPQSFLKDDSIDNKVLTRSDKARGKSDNVPSEEVVKKMKNYWRQLLNAKLITQRKFDNLTKAERGGLSELDKAGFIKRQLVETRQITKHVAQILDSRMNTKYDENDKLIREVKVITLKSKLVSDFRKDFQFYKVREINNYHHAHDAYLNAVVGTALIKKYPKLESEFVYGDYKVYDVRKMIAKSEQEIGKATAKYFFYSNIMNFFKTEITLANGEIRKRPLIETNGETGEIVWDKGRDFATVRKVLSMPQVNIVKKTEVQTGGFSKESILPKRNSDKLIARKKDWDPKKYGGFDSPTVAYSVLVVAKVEKGKSKKLKSVKELLGITIMERSSFEKNPIDFLEAKGYKEVKKDLIIKLPKYSLFELENGRKRMLASAGELQKGNELALPSKYVNFLYLASHYEKLKGSPEDNEQKQLFVEQHKHYLDEIIEQISEFSKRVILADANLDKVLSAYNKHRDKPIREQAENIIHLFTLTNLGAPAAFKYFDTTIDRKRYTSTKEVLDATLIHQSITGLYETRIDLSQLGGDGGGGSGSSEAAAKGGTLNIEDEYRLHETSKEPDVSLGSTWLSDFPQAWAETGGMGLAVRQAPLIIPLKATSTPVSIKQYPMSQEARLGIKPHIQRLLDQGILVPCQSPWNTPLLPVKKPGTNDYRPVQDLREVNKRVEDIHPTVPNPYNLLSGLPPSHQWYTVLDLKDAFFCLRLHPTSQPLFAFEWRDPEMGISGQLTWTRLPQGFKNSPTLFNEALHRDLAGFRIQHPDLILLQYVDDLLLAATSELDCQQGTRALLQTLGDLGYRASAKKAQICQKQVKYLGYLLKEGQRWLTEARKETVMGQPIPKTPRQLREFLGTAGFCRLWIPGFAEMAAPLYPLTKPGTLFNWGPDQQKAFQEIKQALLTAPALGLPDLTKPFELFVDEKQGYAKGVLTQKLGPWRRPVAYLSKKLDPVAAGWPPCLRMVAAIAVLTKDAGKLTMGQPLVILAPHAVEALVKQPPDRWLSNARMTHYQALLLDTDRVQFGPVVALNPATLLPLPEEGLQHDCLDILAEAHGTRSDLMDQPLPDADHTWYTDGSSFLQEGQRKAGAAVTTETEVIWARALPAGTSAQRAELIALTQALKMAEGKKLNVYTDSRYAFATAHIHGEIYRRRGWLTSEGKEIKNKDEILALLKALFLPKRLSIIHCPGHQKGNSAEARGNRMADQAAREVATRETPETSTLLAGKRTADGSEFEKRTADGSEFESPKKKAKVE

SEQ ID NO: 2264 - protein, 2091 aa, synthetic construct
MPAAKRVKLDGGDKKYSIGLDIGTNSVGWAVITDEYKVPSKKFKVLGNTDRHSIKKNLIGALLFDSGETAEATRLKRTARRRYTRRKNRICYLQEIFSNEMAKVDDSFFHRLEESFLVEEDKKHERHPIFGNIVDEVAYHEKYPTIYHLRKKLVDSTDKADLRLIYLALAHMIKFRGHFLIEGDLNPDNSDVDKLFIQLVQTYNQLFEENPINASGVDAKAILSARLSKSRRLENLIAQLPGEKKNGLFGNLIALSLGLTPNFKSNFDLAEDAKLQLSKDTYDDDLDNLLAQIGDQYADLFLAAKNLSDAILLSDILRVNTEITKAPLSASMIKRYDEHHQDLTLLKALVRQQLPEKYKEIFFDQSKNGYAGYIDGGASQEEFYKFIKPILEKMDGTEELLVKLNREDLLRKQRTFDNGSIPHQIHLGELHAILRRQEDFYPFLKDNREKIEKILTFRIPYYVGPLARGNSRFAWMTRKSEETITPWNFEEVVDKGASAQSFIERMTNFDKNLPNEKVLPKHSLLYEYFTVYNELTKVKYVTEGMRKPAFLSGEQKKAIVDLLFKTNRKVTVKQLKEDYFKKIECFDSVEISGVEDRFNASLGTYHDLLKIIKDKDFLDNEENEDILEDIVLTLTLFEDREMIEERLKTYAHLFDDKVMKQLKRRRYTGWGRLSRKLINGIRDKQSGKTILDFLKSDGFANRNFMQLIHDDSLTFKEDIQKAQVSGQGDSLHEHIANLAGSPAIKKGILQTVKVVDELVKVMGRHKPENIVIEMARENQTTQKGQKNSRERMKRIEEGIKELGSQILKEHPVENTQLQNEKLYLYYLQNGRDMYVDQELDINRLSDYDVDHIVPQSFLKDDSIDNKVLTRSDKARGKSDNVPSEEVVKKMKNYWRQLLNAKLITQRKFDNLTKAERGGLSELDKAGFIKRQLVETRQITKHVAQILDSRMNTKYDENDKLIREVKVITLKSKLVSDFRKDFQFYKVREINNYHHAHDAYLNAVVGTALIKKYPKLESEFVYGDYKVYDVRKMIAKSEQEIGKATAKYFFYSNIMNFFKTEITLANGEIRKRPLIETNGETGEIVWDKGRDFATVRKVLSMPQVNIVKKTEVQTGGFSKESILPKRNSDKLIARKKDWDPKKYGGFDSPTVAYSVLVVAKVEKGKSKKLKSVKELLGITIMERSSFEKNPIDFLEAKGYKEVKKDLIIKLPKYSLFELENGRKRMLASAGELQKGNELALPSKYVNFLYLASHYEKLKGSPEDNEQKQLFVEQHKHYLDEIIEQISEFSKRVILADANLDKVLSAYNKHRDKPIREQAENIIHLFTLTNLGAPAAFKYFDTTIDRKRYTSTKEVLDATLIHQSITGLYETRIDLSQLGGDGGGSSGGGGGTLNIEDEYRLHETSKEPDVSLGSTWLSDFPQAWAETGGMGLAVRQAPLIIPLKATSTPVSIKQYPMSQEARLGIKPHIQRLLDQGILVPCQSPWNTPLLPVKKPGTNDYRPVQDLREVNKRVEDIHPTVPNPYNLLSGLPPSHQWYTVLDLKDAFFCLRLHPTSQPLFAFEWRDPEMGISGQLTWTRLPQGFKNSPTLFNEALHRDLAGFRIQHPDLILLQYVDDLLLAATSELDCQQGTRALLQTLGDLGYRASAKKAQICQKQVKYLGYLLKEGQRWLTEARKETVMGQPIPKTPRQLREFLGTAGFCRLWIPGFAEMAAPLYPLTKPGTLFNWGPDQQKAFQEIKQALLTAPALGLPDLTKPFELFVDEKQGYAKGVLTQKLGPWRRPVAYLSKKLDPVAAGWPPCLRMVAAIAVLTKDAGKLTMGQPLVILAPHAVEALVKQPPDRWLSNARMTHYQALLLDTDRVQFGPVVALNPATLLPLPEEGLQHDCLDILAEAHGTRSDLMDQPLPDADHTWYTDGSSFLQEGQRKAGAAVTTETEVIWARALPAGTSAQRAELIALTQALKMAEGKKLNVYTDSRYAFATAHIHGEIYRRRGWLTSEGKEIKNKDEILALLKALFLPKRLSIIHCPGHQKGNSAEARGNRMADQAAREVATRETPETSTLLAGKRTADGSEFEKRTADGSEFESPKKKAKVE

SEQ ID NO: 2265 - protein, 2094 aa, synthetic construct
MPAAKRVKLDGGDKKYSIGLDIGTNSVGWAVITDEYKVPSKKFKVLGNTDRHSIKKNLIGALLFDSGETAEATRLKRTARRRYTRRKNRICYLQEIFSNEMAKVDDSFFHRLEESFLVEEDKKHERHPIFGNIVDEVAYHEKYPTIYHLRKKLVDSTDKADLRLIYLALAHMIKFRGHFLIEGDLNPDNSDVDKLFIQLVQTYNQLFEENPINASGVDAKAILSARLSKSRRLENLIAQLPGEKKNGLFGNLIALSLGLTPNFKSNFDLAEDAKLQLSKDTYDDDLDNLLAQIGDQYADLFLAAKNLSDAILLSDILRVNTEITKAPLSASMIKRYDEHHQDLTLLKALVRQQLPEKYKEIFFDQSKNGYAGYIDGGASQEEFYKFIKPILEKMDGTEELLVKLNREDLLRKQRTFDNGSIPHQIHLGELHAILRRQEDFYPFLKDNREKIEKILTFRIPYYVGPLARGNSRFAWMTRKSEETITPWNFEEVVDKGASAQSFIERMTNFDKNLPNEKVLPKHSLLYEYFTVYNELTKVKYVTEGMRKPAFLSGEQKKAIVDLLFKTNRKVTVKQLKEDYFKKIECFDSVEISGVEDRFNASLGTYHDLLKIIKDKDFLDNEENEDILEDIVLTLTLFEDREMIEERLKTYAHLFDDKVMKQLKRRRYTGWGRLSRKLINGIRDKQSGKTILDFLKSDGFANRNFMQLIHDDSLTFKEDIQKAQVSGQGDSLHEHIANLAGSPAIKKGILQTVKVVDELVKVMGRHKPENIVIEMARENQTTQKGQKNSRERMKRIEEGIKELGSQILKEHPVENTQLQNEKLYLYYLQNGRDMYVDQELDINRLSDYDVDHIVPQSFLKDDSIDNKVLTRSDKARGKSDNVPSEEVVKKMKNYWRQLLNAKLITQRKFDNLTKAERGGLSELDKAGFIKRQLVETRQITKHVAQILDSRMNTKYDENDKLIREVKVITLKSKLVSDFRKDFQFYKVREINNYHHAHDAYLNAVVGTALIKKYPKLESEFVYGDYKVYDVRKMIAKSEQEIGKATAKYFFYSNIMNFFKTEITLANGEIRKRPLIETNGETGEIVWDKGRDFATVRKVLSMPQVNIVKKTEVQTGGFSKESILPKRNSDKLIARKKDWDPKKYGGFDSPTVAYSVLVVAKVEKGKSKKLKSVKELLGITIMERSSFEKNPIDFLEAKGYKEVKKDLIIKLPKYSLFELENGRKRMLASAGELQKGNELALPSKYVNFLYLASHYEKLKGSPEDNEQKQLFVEQHKHYLDEIIEQISEFSKRVILADANLDKVLSAYNKHRDKPIREQAENIIHLFTLTNLGAPAAFKYFDTTIDRKRYTSTKEVLDATLIHQSITGLYETRIDLSQLGGDGGGGSGSSPAPGGTLNIEDEYRLHETSKEPDVSLGSTWLSDFPQAWAETGGMGLAVRQAPLIIPLKATSTPVSIKQYPMSQEARLGIKPHIQRLLDQGILVPCQSPWNTPLLPVKKPGTNDYRPVQDLREVNKRVEDIHPTVPNPYNLLSGLPPSHQWYTVLDLKDAFFCLRLHPTSQPLFAFEWRDPEMGISGQLTWTRLPQGFKNSPTLFNEALHRDLAGFRIQHPDLILLQYVDDLLLAATSELDCQQGTRALLQTLGDLGYRASAKKAQICQKQVKYLGYLLKEGQRWLTEARKETVMGQPIPKTPRQLREFLGTAGFCRLWIPGFAEMAAPLYPLTKPGTLFNWGPDQQKAFQEIKQALLTAPALGLPDLTKPFELFVDEKQGYAKGVLTQKLGPWRRPVAYLSKKLDPVAAGWPPCLRMVAAIAVLTKDAGKLTMGQPLVILAPHAVEALVKQPPDRWLSNARMTHYQALLLDTDRVQFGPVVALNPATLLPLPEEGLQHDCLDILAEAHGTRSDLMDQPLPDADHTWYTDGSSFLQEGQRKAGAAVTTETEVIWARALPAGTSAQRAELIALTQALKMAEGKKLNVYTDSRYAFATAHIHGEIYRRRGWLTSEGKEIKNKDEILALLKALFLPKRLSIIHCPGHQKGNSAEARGNRMADQAAREVATRETPETSTLLAGKRTADGSEFEKRTADGSEFESPKKKAKVE

SEQ ID NO: 2266 - protein, 2096 aa, synthetic construct
MPAAKRVKLDGGDKKYSIGLDIGTNSVGWAVITDEYKVPSKKFKVLGNTDRHSIKKNLIGALLFDSGETAEATRLKRTARRRYTRRKNRICYLQEIFSNEMAKVDDSFFHRLEESFLVEEDKKHERHPIFGNIVDEVAYHEKYPTIYHLRKKLVDSTDKADLRLIYLALAHMIKFRGHFLIEGDLNPDNSDVDKLFIQLVQTYNQLFEENPINASGVDAKAILSARLSKSRRLENLIAQLPGEKKNGLFGNLIALSLGLTPNFKSNFDLAEDAKLQLSKDTYDDDLDNLLAQIGDQYADLFLAAKNLSDAILLSDILRVNTEITKAPLSASMIKRYDEHHQDLTLLKALVRQQLPEKYKEIFFDQSKNGYAGYIDGGASQEEFYKFIKPILEKMDGTEELLVKLNREDLLRKQRTFDNGSIPHQIHLGELHAILRRQEDFYPFLKDNREKIEKILTFRIPYYVGPLARGNSRFAWMTRKSEETITPWNFEEVVDKGASAQSFIERMTNFDKNLPNEKVLPKHSLLYEYFTVYNELTKVKYVTEGMRKPAFLSGEQKKAIVDLLFKTNRKVTVKQLKEDYFKKIECFDSVEISGVEDRFNASLGTYHDLLKIIKDKDFLDNEENEDILEDIVLTLTLFEDREMIEERLKTYAHLFDDKVMKQLKRRRYTGWGRLSRKLINGIRDKQSGKTILDFLKSDGFANRNFMQLIHDDSLTFKEDIQKAQVSGQGDSLHEHIANLAGSPAIKKGILQTVKVVDELVKVMGRHKPENIVIEMARENQTTQKGQKNSRERMKRIEEGIKELGSQILKEHPVENTQLQNEKLYLYYLQNGRDMYVDQELDINRLSDYDVDHIVPQSFLKDDSIDNKVLTRSDKARGKSDNVPSEEVVKKMKNYWRQLLNAKLITQRKFDNLTKAERGGLSELDKAGFIKRQLVETRQITKHVAQILDSRMNTKYDENDKLIREVKVITLKSKLVSDFRKDFQFYKVREINNYHHAHDAYLNAVVGTALIKKYPKLESEFVYGDYKVYDVRKMIAKSEQEIGKATAKYFFYSNIMNFFKTEITLANGEIRKRPLIETNGETGEIVWDKGRDFATVRKVLSMPQVNIVKKTEVQTGGFSKESILPKRNSDKLIARKKDWDPKKYGGFDSPTVAYSVLVVAKVEKGKSKKLKSVKELLGITIMERSSFEKNPIDFLEAKGYKEVKKDLIIKLPKYSLFELENGRKRMLASAGELQKGNELALPSKYVNFLYLASHYEKLKGSPEDNEQKQLFVEQHKHYLDEIIEQISEFSKRVILADANLDKVLSAYNKHRDKPIREQAENIIHLFTLTNLGAPAAFKYFDTTIDRKRYTSTKEVLDATLIHQSITGLYETRIDLSQLGGDGGGGSGGGEAAAKGGTLNIEDEYRLHETSKEPDVSLGSTWLSDFPQAWAETGGMGLAVRQAPLIIPLKATSTPVSIKQYPMSQEARLGIKPHIQRLLDQGILVPCQSPWNTPLLPVKKPGTNDYRPVQDLREVNKRVEDIHPTVPNPYNLLSGLPPSHQWYTVLDLKDAFFCLRLHPTSQPLFAFEWRDPEMGISGQLTWTRLPQGFKNSPTLFNEALHRDLAGFRIQHPDLILLQYVDDLLLAATSELDCQQGTRALLQTLGDLGYRASAKKAQICQKQVKYLGYLLKEGQRWLTEARKETVMGQPIPKTPRQLREFLGTAGFCRLWIPGFAEMAAPLYPLTKPGTLFNWGPDQQKAFQEIKQALLTAPALGLPDLTKPFELFVDEKQGYAKGVLTQKLGPWRRPVAYLSKKLDPVAAGWPPCLRMVAAIAVLTKDAGKLTMGQPLVILAPHAVEALVKQPPDRWLSNARMTHYQALLLDTDRVQFGPVVALNPATLLPLPEEGLQHDCLDILAEAHGTRSDLMDQPLPDADHTWYTDGSSFLQEGQRKAGAAVTTETEVIWARALPAGTSAQRAELIALTQALKMAEGKKLNVYTDSRYAFATAHIHGEIYRRRGWLTSEGKEIKNKDEILALLKALFLPKRLSIIHCPGHQKGNSAEARGNRMADQAAREVATRETPETSTLLAGKRTADGSEFEKRTADGSEFESPKKKAKVE

SEQ ID NO: 2267 - protein, 2092 aa, synthetic construct
MPAAKRVKLDGGDKKYSIGLDIGTNSVGWAVITDEYKVPSKKFKVLGNTDRHSIKKNLIGALLFDSGETAEATRLKRTARRRYTRRKNRICYLQEIFSNEMAKVDDSFFHRLEESFLVEEDKKHERHPIFGNIVDEVAYHEKYPTIYHLRKKLVDSTDKADLRLIYLALAHMIKFRGHFLIEGDLNPDNSDVDKLFIQLVQTYNQLFEENPINASGVDAKAILSARLSKSRRLENLIAQLPGEKKNGLFGNLIALSLGLTPNFKSNFDLAEDAKLQLSKDTYDDDLDNLLAQIGDQYADLFLAAKNLSDAILLSDILRVNTEITKAPLSASMIKRYDEHHQDLTLLKALVRQQLPEKYKEIFFDQSKNGYAGYIDGGASQEEFYKFIKPILEKMDGTEELLVKLNREDLLRKQRTFDNGSIPHQIHLGELHAILRRQEDFYPFLKDNREKIEKILTFRIPYYVGPLARGNSRFAWMTRKSEETITPWNFEEVVDKGASAQSFIERMTNFDKNLPNEKVLPKHSLLYEYFTVYNELTKVKYVTEGMRKPAFLSGEQKKAIVDLLFKTNRKVTVKQLKEDYFKKIECFDSVEISGVEDRFNASLGTYHDLLKIIKDKDFLDNEENEDILEDIVLTLTLFEDREMIEERLKTYAHLFDDKVMKQLKRRRYTGWGRLSRKLINGIRDKQSGKTILDFLKSDGFANRNFMQLIHDDSLTFKEDIQKAQVSGQGDSLHEHIANLAGSPAIKKGILQTVKVVDELVKVMGRHKPENIVIEMARENQTTQKGQKNSRERMKRIEEGIKELGSQILKEHPVENTQLQNEKLYLYYLQNGRDMYVDQELDINRLSDYDVDHIVPQSFLKDDSIDNKVLTRSDKARGKSDNVPSEEVVKKMKNYWRQLLNAKLITQRKFDNLTKAERGGLSELDKAGFIKRQLVETRQITKHVAQILDSRMNTKYDENDKLIREVKVITLKSKLVSDFRKDFQFYKVREINNYHHAHDAYLNAVVGTALIKKYPKLESEFVYGDYKVYDVRKMIAKSEQEIGKATAKYFFYSNIMNFFKTEITLANGEIRKRPLIETNGETGEIVWDKGRDFATVRKVLSMPQVNIVKKTEVQTGGFSKESILPKRNSDKLIARKKDWDPKKYGGFDSPTVAYSVLVVAKVEKGKSKKLKSVKELLGITIMERSSFEKNPIDFLEAKGYKEVKKDLIIKLPKYSLFELENGRKRMLASAGELQKGNELALPSKYVNFLYLASHYEKLKGSPEDNEQKQLFVEQHKHYLDEIIEQISEFSKRVILADANLDKVLSAYNKHRDKPIREQAENIIHLFTLTNLGAPAAFKYFDTTIDRKRYTSTKEVLDATLIHQSITGLYETRIDLSQLGGDGGGGGGGGGGGTLNIEDEYRLHETSKEPDVSLGSTWLSDFPQAWAETGGMGLAVRQAPLIIPLKATSTPVSIKQYPMSQEARLGIKPHIQRLLDQGILVPCQSPWNTPLLPVKKPGTNDYRPVQDLREVNKRVEDIHPTVPNPYNLLSGLPPSHQWYTVLDLKDAFFCLRLHPTSQPLFAFEWRDPEMGISGQLTWTRLPQGFKNSPTLFNEALHRDLAGFRIQHPDLILLQYVDDLLLAATSELDCQQGTRALLQTLGDLGYRASAKKAQICQKQVKYLGYLLKEGQRWLTEARKETVMGQPIPKTPRQLREFLGTAGFCRLWIPGFAEMAAPLYPLTKPGTLFNWGPDQQKAFQEIKQALLTAPALGLPDLTKPFELFVDEKQGYAKGVLTQKLGPWRRPVAYLSKKLDPVAAGWPPCLRMVAAIAVLTKDAGKLTMGQPLVILAPHAVEALVKQPPDRWLSNARMTHYQALLLDTDRVQFGPVVALNPATLLPLPEEGLQHDCLDILAEAHGTRSDLMDQPLPDADHTWYTDGSSFLQEGQRKAGAAVTTETEVIWARALPAGTSAQRAELIALTQALKMAEGKKLNVYTDSRYAFATAHIHGEIYRRRGWLTSEGKEIKNKDEILALLKALFLPKRLSIIHCPGHQKGNSAEARGNRMADQAAREVATRETPETSTLLAGKRTADGSEFEKRTADGSEFESPKKKAKVE

SEQ ID NO: 2268 - protein, 2089 aa, synthetic construct
MPAAKRVKLDGGDKKYSIGLDIGTNSVGWAVITDEYKVPSKKFKVLGNTDRHSIKKNLIGALLFDSGETAEATRLKRTARRRYTRRKNRICYLQEIFSNEMAKVDDSFFHRLEESFLVEEDKKHERHPIFGNIVDEVAYHEKYPTIYHLRKKLVDSTDKADLRLIYLALAHMIKFRGHFLIEGDLNPDNSDVDKLFIQLVQTYNQLFEENPINASGVDAKAILSARLSKSRRLENLIAQLPGEKKNGLFGNLIALSLGLTPNFKSNFDLAEDAKLQLSKDTYDDDLDNLLAQIGDQYADLFLAAKNLSDAILLSDILRVNTEITKAPLSASMIKRYDEHHQDLTLLKALVRQQLPEKYKEIFFDQSKNGYAGYIDGGASQEEFYKFIKPILEKMDGTEELLVKLNREDLLRKQRTFDNGSIPHQIHLGELHAILRRQEDFYPFLKDNREKIEKILTFRIPYYVGPLARGNSRFAWMTRKSEETITPWNFEEVVDKGASAQSFIERMTNFDKNLPNEKVLPKHSLLYEYFTVYNELTKVKYVTEGMRKPAFLSGEQKKAIVDLLFKTNRKVTVKQLKEDYFKKIECFDSVEISGVEDRFNASLGTYHDLLKIIKDKDFLDNEENEDILEDIVLTLTLFEDREMIEERLKTYAHLFDDKVMKQLKRRRYTGWGRLSRKLINGIRDKQSGKTILDFLKSDGFANRNFMQLIHDDSLTFKEDIQKAQVSGQGDSLHEHIANLAGSPAIKKGILQTVKVVDELVKVMGRHKPENIVIEMARENQTTQKGQKNSRERMKRIEEGIKELGSQILKEHPVENTQLQNEKLYLYYLQNGRDMYVDQELDINRLSDYDVDHIVPQSFLKDDSIDNKVLTRSDKARGKSDNVPSEEVVKKMKNYWRQLLNAKLITQRKFDNLTKAERGGLSELDKAGFIKRQLVETRQITKHVAQILDSRMNTKYDENDKLIREVKVITLKSKLVSDFRKDFQFYKVREINNYHHAHDAYLNAVVGTALIKKYPKLESEFVYGDYKVYDVRKMIAKSEQEIGKATAKYFFYSNIMNFFKTEITLANGEIRKRPLIETNGETGEIVWDKGRDFATVRKVLSMPQVNIVKKTEVQTGGFSKESILPKRNSDKLIARKKDWDPKKYGGFDSPTVAYSVLVVAKVEKGKSKKLKSVKELLGITIMERSSFEKNPIDFLEAKGYKEVKKDLIIKLPKYSLFELENGRKRMLASAGELQKGNELALPSKYVNFLYLASHYEKLKGSPEDNEQKQLFVEQHKHYLDEIIEQISEFSKRVILADANLDKVLSAYNKHRDKPIREQAENIIHLFTLTNLGAPAAFKYFDTTIDRKRYTSTKEVLDATLIHQSITGLYETRIDLSQLGGDGGGGGGGGTLNIEDEYRLHETSKEPDVSLGSTWLSDFPQAWAETGGMGLAVRQAPLIIPLKATSTPVSIKQYPMSQEARLGIKPHIQRLLDQGILVPCQSPWNTPLLPVKKPGTNDYRPVQDLREVNKRVEDIHPTVPNPYNLLSGLPPSHQWYTVLDLKDAFFCLRLHPTSQPLFAFEWRDPEMGISGQLTWTRLPQGFKNSPTLFNEALHRDLAGFRIQHPDLILLQYVDDLLLAATSELDCQQGTRALLQTLGDLGYRASAKKAQICQKQVKYLGYLLKEGQRWLTEARKETVMGQPIPKTPRQLREFLGTAGFCRLWIPGFAEMAAPLYPLTKPGTLFNWGPDQQKAFQEIKQALLTAPALGLPDLTKPFELFVDEKQGYAKGVLTQKLGPWRRPVAYLSKKLDPVAAGWPPCLRMVAAIAVLTKDAGKLTMGQPLVILAPHAVEALVKQPPDRWLSNARMTHYQALLLDTDRVQFGPVVALNPATLLPLPEEGLQHDCLDILAEAHGTRSDLMDQPLPDADHTWYTDGSSFLQEGQRKAGAAVTTETEVIWARALPAGTSAQRAELIALTQALKMAEGKKLNVYTDSRYAFATAHIHGEIYRRRGWLTSEGKEIKNKDEILALLKALFLPKRLSIIHCPGHQKGNSAEARGNRMADQAAREVATRETPETSTLLAGKRTADGSEFEKRTADGSEFESPKKKAKVE

SEQ ID NO: 2269 - protein, 2096 aa, synthetic construct
MPAAKRVKLDGGDKKYSIGLDIGTNSVGWAVITDEYKVPSKKFKVLGNTDRHSIKKNLIGALLFDSGETAEATRLKRTARRRYTRRKNRICYLQEIFSNEMAKVDDSFFHRLEESFLVEEDKKHERHPIFGNIVDEVAYHEKYPTIYHLRKKLVDSTDKADLRLIYLALAHMIKFRGHFLIEGDLNPDNSDVDKLFIQLVQTYNQLFEENPINASGVDAKAILSARLSKSRRLENLIAQLPGEKKNGLFGNLIALSLGLTPNFKSNFDLAEDAKLQLSKDTYDDDLDNLLAQIGDQYADLFLAAKNLSDAILLSDILRVNTEITKAPLSASMIKRYDEHHQDLTLLKALVRQQLPEKYKEIFFDQSKNGYAGYIDGGASQEEFYKFIKPILEKMDGTEELLVKLNREDLLRKQRTFDNGSIPHQIHLGELHAILRRQEDFYPFLKDNREKIEKILTFRIPYYVGPLARGNSRFAWMTRKSEETITPWNFEEVVDKGASAQSFIERMTNFDKNLPNEKVLPKHSLLYEYFTVYNELTKVKYVTEGMRKPAFLSGEQKKAIVDLLFKTNRKVTVKQLKEDYFKKIECFDSVEISGVEDRFNASLGTYHDLLKIIKDKDFLDNEENEDILEDIVLTLTLFEDREMIEERLKTYAHLFDDKVMKQLKRRRYTGWGRLSRKLINGIRDKQSGKTILDFLKSDGFANRNFMQLIHDDSLTFKEDIQKAQVSGQGDSLHEHIANLAGSPAIKKGILQTVKVVDELVKVMGRHKPENIVIEMARENQTTQKGQKNSRERMKRIEEGIKELGSQILKEHPVENTQLQNEKLYLYYLQNGRDMYVDQELDINRLSDYDVDHIVPQSFLKDDSIDNKVLTRSDKARGKSDNVPSEEVVKKMKNYWRQLLNAKLITQRKFDNLTKAERGGLSELDKAGFIKRQLVETRQITKHVAQILDSRMNTKYDENDKLIREVKVITLKSKLVSDFRKDFQFYKVREINNYHHAHDAYLNAVVGTALIKKYPKLESEFVYGDYKVYDVRKMIAKSEQEIGKATAKYFFYSNIMNFFKTEITLANGEIRKRPLIETNGETGEIVWDKGRDFATVRKVLSMPQVNIVKKTEVQTGGFSKESILPKRNSDKLIARKKDWDPKKYGGFDSPTVAYSVLVVAKVEKGKSKKLKSVKELLGITIMERSSFEKNPIDFLEAKGYKEVKKDLIIKLPKYSLFELENGRKRMLASAGELQKGNELALPSKYVNFLYLASHYEKLKGSPEDNEQKQLFVEQHKHYLDEIIEQISEFSKRVILADANLDKVLSAYNKHRDKPIREQAENIIHLFTLTNLGAPAAFKYFDTTIDRKRYTSTKEVLDATLIHQSITGLYETRIDLSQLGGDGGPAPEAAAKGGGGGTLNIEDEYRLHETSKEPDVSLGSTWLSDFPQAWAETGGMGLAVRQAPLIIPLKATSTPVSIKQYPMSQEARLGIKPHIQRLLDQGILVPCQSPWNTPLLPVKKPGTNDYRPVQDLREVNKRVEDIHPTVPNPYNLLSGLPPSHQWYTVLDLKDAFFCLRLHPTSQPLFAFEWRDPEMGISGQLTWTRLPQGFKNSPTLFNEALHRDLAGFRIQHPDLILLQYVDDLLLAATSELDCQQGTRALLQTLGDLGYRASAKKAQICQKQVKYLGYLLKEGQRWLTEARKETVMGQPIPKTPRQLREFLGTAGFCRLWIPGFAEMAAPLYPLTKPGTLFNWGPDQQKAFQEIKQALLTAPALGLPDLTKPFELFVDEKQGYAKGVLTQKLGPWRRPVAYLSKKLDPVAAGWPPCLRMVAAIAVLTKDAGKLTMGQPLVILAPHAVEALVKQPPDRWLSNARMTHYQALLLDTDRVQFGPVVALNPATLLPLPEEGLQHDCLDILAEAHGTRSDLMDQPLPDADHTWYTDGSSFLQEGQRKAGAAVTTETEVIWARALPAGTSAQRAELIALTQALKMAEGKKLNVYTDSRYAFATAHIHGEIYRRRGWLTSEGKEIKNKDEILALLKALFLPKRLSIIHCPGHQKGNSAEARGNRMADQAAREVATRETPETSTLLAGKRTADGSEFEKRTADGSEFESPKKKAKVE

SEQ ID NO: 2270 - protein, 2091 aa, synthetic construct
MPAAKRVKLDGGDKKYSIGLDIGTNSVGWAVITDEYKVPSKKFKVLGNTDRHSIKKNLIGALLFDSGETAEATRLKRTARRRYTRRKNRICYLQEIFSNEMAKVDDSFFHRLEESFLVEEDKKHERHPIFGNIVDEVAYHEKYPTIYHLRKKLVDSTDKADLRLIYLALAHMIKFRGHFLIEGDLNPDNSDVDKLFIQLVQTYNQLFEENPINASGVDAKAILSARLSKSRRLENLIAQLPGEKKNGLFGNLIALSLGLTPNFKSNFDLAEDAKLQLSKDTYDDDLDNLLAQIGDQYADLFLAAKNLSDAILLSDILRVNTEITKAPLSASMIKRYDEHHQDLTLLKALVRQQLPEKYKEIFFDQSKNGYAGYIDGGASQEEFYKFIKPILEKMDGTEELLVKLNREDLLRKQRTFDNGSIPHQIHLGELHAILRRQEDFYPFLKDNREKIEKILTFRIPYYVGPLARGNSRFAWMTRKSEETITPWNFEEVVDKGASAQSFIERMTNFDKNLPNEKVLPKHSLLYEYFTVYNELTKVKYVTEGMRKPAFLSGEQKKAIVDLLFKTNRKVTVKQLKEDYFKKIECFDSVEISGVEDRFNASLGTYHDLLKIIKDKDFLDNEENEDILEDIVLTLTLFEDREMIEERLKTYAHLFDDKVMKQLKRRRYTGWGRLSRKLINGIRDKQSGKTILDFLKSDGFANRNFMQLIHDDSLTFKEDIQKAQVSGQGDSLHEHIANLAGSPAIKKGILQTVKVVDELVKVMGRHKPENIVIEMARENQTTQKGQKNSRERMKRIEEGIKELGSQILKEHPVENTQLQNEKLYLYYLQNGRDMYVDQELDINRLSDYDVDHIVPQSFLKDDSIDNKVLTRSDKARGKSDNVPSEEVVKKMKNYWRQLLNAKLITQRKFDNLTKAERGGLSELDKAGFIKRQLVETRQITKHVAQILDSRMNTKYDENDKLIREVKVITLKSKLVSDFRKDFQFYKVREINNYHHAHDAYLNAVVGTALIKKYPKLESEFVYGDYKVYDVRKMIAKSEQEIGKATAKYFFYSNIMNFFKTEITLANGEIRKRPLIETNGETGEIVWDKGRDFATVRKVLSMPQVNIVKKTEVQTGGFSKESILPKRNSDKLIARKKDWDPKKYGGFDSPTVAYSVLVVAKVEKGKSKKLKSVKELLGITIMERSSFEKNPIDFLEAKGYKEVKKDLIIKLPKYSLFELENGRKRMLASAGELQKGNELALPSKYVNFLYLASHYEKLKGSPEDNEQKQLFVEQHKHYLDEIIEQISEFSKRVILADANLDKVLSAYNKHRDKPIREQAENIIHLFTLTNLGAPAAFKYFDTTIDRKRYTSTKEVLDATLIHQSITGLYETRIDLSQLGGDGGGGSGSSGGTLNIEDEYRLHETSKEPDVSLGSTWLSDFPQAWAETGGMGLAVRQAPLIIPLKATSTPVSIKQYPMSQEARLGIKPHIQRLLDQGILVPCQSPWNTPLLPVKKPGTNDYRPVQDLREVNKRVEDIHPTVPNPYNLLSGLPPSHQWYTVLDLKDAFFCLRLHPTSQPLFAFEWRDPEMGISGQLTWTRLPQGFKNSPTLFNEALHRDLAGFRIQHPDLILLQYVDDLLLAATSELDCQQGTRALLQTLGDLGYRASAKKAQICQKQVKYLGYLLKEGQRWLTEARKETVMGQPIPKTPRQLREFLGTAGFCRLWIPGFAEMAAPLYPLTKPGTLFNWGPDQQKAFQEIKQALLTAPALGLPDLTKPFELFVDEKQGYAKGVLTQKLGPWRRPVAYLSKKLDPVAAGWPPCLRMVAAIAVLTKDAGKLTMGQPLVILAPHAVEALVKQPPDRWLSNARMTHYQALLLDTDRVQFGPVVALNPATLLPLPEEGLQHDCLDILAEAHGTRSDLMDQPLPDADHTWYTDGSSFLQEGQRKAGAAVTTETEVIWARALPAGTSAQRAELIALTQALKMAEGKKLNVYTDSRYAFATAHIHGEIYRRRGWLTSEGKEIKNKDEILALLKALFLPKRLSIIHCPGHQKGNSAEARGNRMADQAAREVATRETPETSTLLAGKRTADGSEFEKRTADGSEFESPKKKAKVE

SEQ ID NO: 2271 - protein, 2091 aa, synthetic construct
MPAAKRVKLDGGDKKYSIGLDIGTNSVGWAVITDEYKVPSKKFKVLGNTDRHSIKKNLIGALLFDSGETAEATRLKRTARRRYTRRKNRICYLQEIFSNEMAKVDDSFFHRLEESFLVEEDKKHERHPIFGNIVDEVAYHEKYPTIYHLRKKLVDSTDKADLRLIYLALAHMIKFRGHFLIEGDLNPDNSDVDKLFIQLVQTYNQLFEENPINASGVDAKAILSARLSKSRRLENLIAQLPGEKKNGLFGNLIALSLGLTPNFKSNFDLAEDAKLQLSKDTYDDDLDNLLAQIGDQYADLFLAAKNLSDAILLSDILRVNTEITKAPLSASMIKRYDEHHQDLTLLKALVRQQLPEKYKEIFFDQSKNGYAGYIDGGASQEEFYKFIKPILEKMDGTEELLVKLNREDLLRKQRTFDNGSIPHQIHLGELHAILRRQEDFYPFLKDNREKIEKILTFRIPYYVGPLARGNSRFAWMTRKSEETITPWNFEEVVDKGASAQSFIERMTNFDKNLPNEKVLPKHSLLYEYFTVYNELTKVKYVTEGMRKPAFLSGEQKKAIVDLLFKTNRKVTVKQLKEDYFKKIECFDSVEISGVEDRFNASLGTYHDLLKIIKDKDFLDNEENEDILEDIVLTLTLFEDREMIEERLKTYAHLFDDKVMKQLKRRRYTGWGRLSRKLINGIRDKQSGKTILDFLKSDGFANRNFMQLIHDDSLTFKEDIQKAQVSGQGDSLHEHIANLAGSPAIKKGILQTVKVVDELVKVMGRHKPENIVIEMARENQTTQKGQKNSRERMKRIEEGIKELGSQILKEHPVENTQLQNEKLYLYYLQNGRDMYVDQELDINRLSDYDVDHIVPQSFLKDDSIDNKVLTRSDKARGKSDNVPSEEVVKKMKNYWRQLLNAKLITQRKFDNLTKAERGGLSELDKAGFIKRQLVETRQITKHVAQILDSRMNTKYDENDKLIREVKVITLKSKLVSDFRKDFQFYKVREINNYHHAHDAYLNAVVGTALIKKYPKLESEFVYGDYKVYDVRKMIAKSEQEIGKATAKYFFYSNIMNFFKTEITLANGEIRKRPLIETNGETGEIVWDKGRDFATVRKVLSMPQVNIVKKTEVQTGGFSKESILPKRNSDKLIARKKDWDPKKYGGFDSPTVAYSVLVVAKVEKGKSKKLKSVKELLGITIMERSSFEKNPIDFLEAKGYKEVKKDLIIKLPKYSLFELENGRKRMLASAGELQKGNELALPSKYVNFLYLASHYEKLKGSPEDNEQKQLFVEQHKHYLDEIIEQISEFSKRVILADANLDKVLSAYNKHRDKPIREQAENIIHLFTLTNLGAPAAFKYFDTTIDRKRYTSTKEVLDATLIHQSITGLYETRIDLSQLGGDGGPAPGSSGGTLNIEDEYRLHETSKEPDVSLGSTWLSDFPQAWAETGGMGLAVRQAPLIIPLKATSTPVSIKQYPMSQEARLGIKPHIQRLLDQGILVPCQSPWNTPLLPVKKPGTNDYRPVQDLREVNKRVEDIHPTVPNPYNLLSGLPPSHQWYTVLDLKDAFFCLRLHPTSQPLFAFEWRDPEMGISGQLTWTRLPQGFKNSPTLFNEALHRDLAGFRIQHPDLILLQYVDDLLLAATSELDCQQGTRALLQTLGDLGYRASAKKAQICQKQVKYLGYLLKEGQRWLTEARKETVMGQPIPKTPRQLREFLGTAGFCRLWIPGFAEMAAPLYPLTKPGTLFNWGPDQQKAFQEIKQALLTAPALGLPDLTKPFELFVDEKQGYAKGVLTQKLGPWRRPVAYLSKKLDPVAAGWPPCLRMVAAIAVLTKDAGKLTMGQPLVILAPHAVEALVKQPPDRWLSNARMTHYQALLLDTDRVQFGPVVALNPATLLPLPEEGLQHDCLDILAEAHGTRSDLMDQPLPDADHTWYTDGSSFLQEGQRKAGAAVTTETEVIWARALPAGTSAQRAELIALTQALKMAEGKKLNVYTDSRYAFATAHIHGEIYRRRGWLTSEGKEIKNKDEILALLKALFLPKRLSIIHCPGHQKGNSAEARGNRMADQAAREVATRETPETSTLLAGKRTADGSEFEKRTADGSEFESPKKKAKVE

SEQ ID NO: 2272 - protein, 2094 aa, synthetic construct
MPAAKRVKLDGGDKKYSIGLDIGTNSVGWAVITDEYKVPSKKFKVLGNTDRHSIKKNLIGALLFDSGETAEATRLKRTARRRYTRRKNRICYLQEIFSNEMAKVDDSFFHRLEESFLVEEDKKHERHPIFGNIVDEVAYHEKYPTIYHLRKKLVDSTDKADLRLIYLALAHMIKFRGHFLIEGDLNPDNSDVDKLFIQLVQTYNQLFEENPINASGVDAKAILSARLSKSRRLENLIAQLPGEKKNGLFGNLIALSLGLTPNFKSNFDLAEDAKLQLSKDTYDDDLDNLLAQIGDQYADLFLAAKNLSDAILLSDILRVNTEITKAPLSASMIKRYDEHHQDLTLLKALVRQQLPEKYKEIFFDQSKNGYAGYIDGGASQEEFYKFIKPILEKMDGTEELLVKLNREDLLRKQRTFDNGSIPHQIHLGELHAILRRQEDFYPFLKDNREKIEKILTFRIPYYVGPLARGNSRFAWMTRKSEETITPWNFEEVVDKGASAQSFIERMTNFDKNLPNEKVLPKHSLLYEYFTVYNELTKVKYVTEGMRKPAFLSGEQKKAIVDLLFKTNRKVTVKQLKEDYFKKIECFDSVEISGVEDRFNASLGTYHDLLKIIKDKDFLDNEENEDILEDIVLTLTLFEDREMIEERLKTYAHLFDDKVMKQLKRRRYTGWGRLSRKLINGIRDKQSGKTILDFLKSDGFANRNFMQLIHDDSLTFKEDIQKAQVSGQGDSLHEHIANLAGSPAIKKGILQTVKVVDELVKVMGRHKPENIVIEMARENQTTQKGQKNSRERMKRIEEGIKELGSQILKEHPVENTQLQNEKLYLYYLQNGRDMYVDQELDINRLSDYDVDHIVPQSFLKDDSIDNKVLTRSDKARGKSDNVPSEEVVKKMKNYWRQLLNAKLITQRKFDNLTKAERGGLSELDKAGFIKRQLVETRQITKHVAQILDSRMNTKYDENDKLIREVKVITLKSKLVSDFRKDFQFYKVREINNYHHAHDAYLNAVVGTALIKKYPKLESEFVYGDYKVYDVRKMIAKSEQEIGKATAKYFFYSNIMNFFKTEITLANGEIRKRPLIETNGETGEIVWDKGRDFATVRKVLSMPQVNIVKKTEVQTGGFSKESILPKRNSDKLIARKKDWDPKKYGGFDSPTVAYSVLVVAKVEKGKSKKLKSVKELLGITIMERSSFEKNPIDFLEAKGYKEVKKDLIIKLPKYSLFELENGRKRMLASAGELQKGNELALPSKYVNFLYLASHYEKLKGSPEDNEQKQLFVEQHKHYLDEIIEQISEFSKRVILADANLDKVLSAYNKHRDKPIREQAENIIHLFTLTNLGAPAAFKYFDTTIDRKRYTSTKEVLDATLIHQSITGLYETRIDLSQLGGDGGGGSPAPGGGGGTLNIEDEYRLHETSKEPDVSLGSTWLSDFPQAWAETGGMGLAVRQAPLIIPLKATSTPVSIKQYPMSQEARLGIKPHIQRLLDQGILVPCQSPWNTPLLPVKKPGTNDYRPVQDLREVNKRVEDIHPTVPNPYNLLSGLPPSHQWYTVLDLKDAFFCLRLHPTSQPLFAFEWRDPEMGISGQLTWTRLPQGFKNSPTLFNEALHRDLAGFRIQHPDLILLQYVDDLLLAATSELDCQQGTRALLQTLGDLGYRASAKKAQICQKQVKYLGYLLKEGQRWLTEARKETVMGQPIPKTPRQLREFLGTAGFCRLWIPGFAEMAAPLYPLTKPGTLFNWGPDQQKAFQEIKQALLTAPALGLPDLTKPFELFVDEKQGYAKGVLTQKLGPWRRPVAYLSKKLDPVAAGWPPCLRMVAAIAVLTKDAGKLTMGQPLVILAPHAVEALVKQPPDRWLSNARMTHYQALLLDTDRVQFGPVVALNPATLLPLPEEGLQHDCLDILAEAHGTRSDLMDQPLPDADHTWYTDGSSFLQEGQRKAGAAVTTETEVIWARALPAGTSAQRAELIALTQALKMAEGKKLNVYTDSRYAFATAHIHGEIYRRRGWLTSEGKEIKNKDEILALLKALFLPKRLSIIHCPGHQKGNSAEARGNRMADQAAREVATRETPETSTLLAGKRTADGSEFEKRTADGSEFESPKKKAKVE

SEQ ID NO: 2273 - protein, 2096 aa, synthetic construct
MPAAKRVKLDGGDKKYSIGLDIGTNSVGWAVITDEYKVPSKKFKVLGNTDRHSIKKNLIGALLFDSGETAEATRLKRTARRRYTRRKNRICYLQEIFSNEMAKVDDSFFHRLEESFLVEEDKKHERHPIFGNIVDEVAYHEKYPTIYHLRKKLVDSTDKADLRLIYLALAHMIKFRGHFLIEGDLNPDNSDVDKLFIQLVQTYNQLFEENPINASGVDAKAILSARLSKSRRLENLIAQLPGEKKNGLFGNLIALSLGLTPNFKSNFDLAEDAKLQLSKDTYDDDLDNLLAQIGDQYADLFLAAKNLSDAILLSDILRVNTEITKAPLSASMIKRYDEHHQDLTLLKALVRQQLPEKYKEIFFDQSKNGYAGYIDGGASQEEFYKFIKPILEKMDGTEELLVKLNREDLLRKQRTFDNGSIPHQIHLGELHAILRRQEDFYPFLKDNREKIEKILTFRIPYYVGPLARGNSRFAWMTRKSEETITPWNFEEVVDKGASAQSFIERMTNFDKNLPNEKVLPKHSLLYEYFTVYNELTKVKYVTEGMRKPAFLSGEQKKAIVDLLFKTNRKVTVKQLKEDYFKKIECFDSVEISGVEDRFNASLGTYHDLLKIIKDKDFLDNEENEDILEDIVLTLTLFEDREMIEERLKTYAHLFDDKVMKQLKRRRYTGWGRLSRKLINGIRDKQSGKTILDFLKSDGFANRNFMQLIHDDSLTFKEDIQKAQVSGQGDSLHEHIANLAGSPAIKKGILQTVKVVDELVKVMGRHKPENIVIEMARENQTTQKGQKNSRERMKRIEEGIKELGSQILKEHPVENTQLQNEKLYLYYLQNGRDMYVDQELDINRLSDYDVDHIVPQSFLKDDSIDNKVLTRSDKARGKSDNVPSEEVVKKMKNYWRQLLNAKLITQRKFDNLTKAERGGLSELDKAGFIKRQLVETRQITKHVAQILDSRMNTKYDENDKLIREVKVITLKSKLVSDFRKDFQFYKVREINNYHHAHDAYLNAVVGTALIKKYPKLESEFVYGDYKVYDVRKMIAKSEQEIGKATAKYFFYSNIMNFFKTEITLANGEIRKRPLIETNGETGEIVWDKGRDFATVRKVLSMPQVNIVKKTEVQTGGFSKESILPKRNSDKLIARKKDWDPKKYGGFDSPTVAYSVLVVAKVEKGKSKKLKSVKELLGITIMERSSFEKNPIDFLEAKGYKEVKKDLIIKLPKYSLFELENGRKRMLASAGELQKGNELALPSKYVNFLYLASHYEKLKGSPEDNEQKQLFVEQHKHYLDEIIEQISEFSKRVILADANLDKVLSAYNKHRDKPIREQAENIIHLFTLTNLGAPAAFKYFDTTIDRKRYTSTKEVLDATLIHQSITGLYETRIDLSQLGGDGGGSSGGSEAAAKGGTLNIEDEYRLHETSKEPDVSLGSTWLSDFPQAWAETGGMGLAVRQAPLIIPLKATSTPVSIKQYPMSQEARLGIKPHIQRLLDQGILVPCQSPWNTPLLPVKKPGTNDYRPVQDLREVNKRVEDIHPTVPNPYNLLSGLPPSHQWYTVLDLKDAFFCLRLHPTSQPLFAFEWRDPEMGISGQLTWTRLPQGFKNSPTLFNEALHRDLAGFRIQHPDLILLQYVDDLLLAATSELDCQQGTRALLQTLGDLGYRASAKKAQICQKQVKYLGYLLKEGQRWLTEARKETVMGQPIPKTPRQLREFLGTAGFCRLWIPGFAEMAAPLYPLTKPGTLFNWGPDQQKAFQEIKQALLTAPALGLPDLTKPFELFVDEKQGYAKGVLTQKLGPWRRPVAYLSKKLDPVAAGWPPCLRMVAAIAVLTKDAGKLTMGQPLVILAPHAVEALVKQPPDRWLSNARMTHYQALLLDTDRVQFGPVVALNPATLLPLPEEGLQHDCLDILAEAHGTRSDLMDQPLPDADHTWYTDGSSFLQEGQRKAGAAVTTETEVIWARALPAGTSAQRAELIALTQALKMAEGKKLNVYTDSRYAFATAHIHGEIYRRRGWLTSEGKEIKNKDEILALLKALFLPKRLSIIHCPGHQKGNSAEARGNRMADQAAREVATRETPETSTLLAGKRTADGSEFEKRTADGSEFESPKKKAKVE

SEQ ID NO: 2274 - protein, 2094 aa, synthetic construct
MPAAKRVKLDGGDKKYSIGLDIGTNSVGWAVITDEYKVPSKKFKVLGNTDRHSIKKNLIGALLFDSGETAEATRLKRTARRRYTRRKNRICYLQEIFSNEMAKVDDSFFHRLEESFLVEEDKKHERHPIFGNIVDEVAYHEKYPTIYHLRKKLVDSTDKADLRLIYLALAHMIKFRGHFLIEGDLNPDNSDVDKLFIQLVQTYNQLFEENPINASGVDAKAILSARLSKSRRLENLIAQLPGEKKNGLFGNLIALSLGLTPNFKSNFDLAEDAKLQLSKDTYDDDLDNLLAQIGDQYADLFLAAKNLSDAILLSDILRVNTEITKAPLSASMIKRYDEHHQDLTLLKALVRQQLPEKYKEIFFDQSKNGYAGYIDGGASQEEFYKFIKPILEKMDGTEELLVKLNREDLLRKQRTFDNGSIPHQIHLGELHAILRRQEDFYPFLKDNREKIEKILTFRIPYYVGPLARGNSRFAWMTRKSEETITPWNFEEVVDKGASAQSFIERMTNFDKNLPNEKVLPKHSLLYEYFTVYNELTKVKYVTEGMRKPAFLSGEQKKAIVDLLFKTNRKVTVKQLKEDYFKKIECFDSVEISGVEDRFNASLGTYHDLLKIIKDKDFLDNEENEDILEDIVLTLTLFEDREMIEERLKTYAHLFDDKVMKQLKRRRYTGWGRLSRKLINGIRDKQSGKTILDFLKSDGFANRNFMQLIHDDSLTFKEDIQKAQVSGQGDSLHEHIANLAGSPAIKKGILQTVKVVDELVKVMGRHKPENIVIEMARENQTTQKGQKNSRERMKRIEEGIKELGSQILKEHPVENTQLQNEKLYLYYLQNGRDMYVDQELDINRLSDYDVDHIVPQSFLKDDSIDNKVLTRSDKARGKSDNVPSEEVVKKMKNYWRQLLNAKLITQRKFDNLTKAERGGLSELDKAGFIKRQLVETRQITKHVAQILDSRMNTKYDENDKLIREVKVITLKSKLVSDFRKDFQFYKVREINNYHHAHDAYLNAVVGTALIKKYPKLESEFVYGDYKVYDVRKMIAKSEQEIGKATAKYFFYSNIMNFFKTEITLANGEIRKRPLIETNGETGEIVWDKGRDFATVRKVLSMPQVNIVKKTEVQTGGFSKESILPKRNSDKLIARKKDWDPKKYGGFDSPTVAYSVLVVAKVEKGKSKKLKSVKELLGITIMERSSFEKNPIDFLEAKGYKEVKKDLIIKLPKYSLFELENGRKRMLASAGELQKGNELALPSKYVNFLYLASHYEKLKGSPEDNEQKQLFVEQHKHYLDEIIEQISEFSKRVILADANLDKVLSAYNKHRDKPIREQAENIIHLFTLTNLGAPAAFKYFDTTIDRKRYTSTKEVLDATLIHQSITGLYETRIDLSQLGGDGGGGSGGSGGSGGTLNIEDEYRLHETSKEPDVSLGSTWLSDFPQAWAETGGMGLAVRQAPLIIPLKATSTPVSIKQYPMSQEARLGIKPHIQRLLDQGILVPCQSPWNTPLLPVKKPGTNDYRPVQDLREVNKRVEDIHPTVPNPYNLLSGLPPSHQWYTVLDLKDAFFCLRLHPTSQPLFAFEWRDPEMGISGQLTWTRLPQGFKNSPTLFNEALHRDLAGFRIQHPDLILLQYVDDLLLAATSELDCQQGTRALLQTLGDLGYRASAKKAQICQKQVKYLGYLLKEGQRWLTEARKETVMGQPIPKTPRQLREFLGTAGFCRLWIPGFAEMAAPLYPLTKPGTLFNWGPDQQKAFQEIKQALLTAPALGLPDLTKPFELFVDEKQGYAKGVLTQKLGPWRRPVAYLSKKLDPVAAGWPPCLRMVAAIAVLTKDAGKLTMGQPLVILAPHAVEALVKQPPDRWLSNARMTHYQALLLDTDRVQFGPVVALNPATLLPLPEEGLQHDCLDILAEAHGTRSDLMDQPLPDADHTWYTDGSSFLQEGQRKAGAAVTTETEVIWARALPAGTSAQRAELIALTQALKMAEGKKLNVYTDSRYAFATAHIHGEIYRRRGWLTSEGKEIKNKDEILALLKALFLPKRLSIIHCPGHQKGNSAEARGNRMADQAAREVATRETPETSTLLAGKRTADGSEFEKRTADGSEFESPKKKAKVE

SEQ ID NO: 2275 - protein, 2096 aa, synthetic construct
MPAAKRVKLDGGDKKYSIGLDIGTNSVGWAVITDEYKVPSKKFKVLGNTDRHSIKKNLIGALLFDSGETAEATRLKRTARRRYTRRKNRICYLQEIFSNEMAKVDDSFFHRLEESFLVEEDKKHERHPIFGNIVDEVAYHEKYPTIYHLRKKLVDSTDKADLRLIYLALAHMIKFRGHFLIEGDLNPDNSDVDKLFIQLVQTYNQLFEENPINASGVDAKAILSARLSKSRRLENLIAQLPGEKKNGLFGNLIALSLGLTPNFKSNFDLAEDAKLQLSKDTYDDDLDNLLAQIGDQYADLFLAAKNLSDAILLSDILRVNTEITKAPLSASMIKRYDEHHQDLTLLKALVRQQLPEKYKEIFFDQSKNGYAGYIDGGASQEEFYKFIKPILEKMDGTEELLVKLNREDLLRKQRTFDNGSIPHQIHLGELHAILRRQEDFYPFLKDNREKIEKILTFRIPYYVGPLARGNSRFAWMTRKSEETITPWNFEEVVDKGASAQSFIERMTNFDKNLPNEKVLPKHSLLYEYFTVYNELTKVKYVTEGMRKPAFLSGEQKKAIVDLLFKTNRKVTVKQLKEDYFKKIECFDSVEISGVEDRFNASLGTYHDLLKIIKDKDFLDNEENEDILEDIVLTLTLFEDREMIEERLKTYAHLFDDKVMKQLKRRRYTGWGRLSRKLINGIRDKQSGKTILDFLKSDGFANRNFMQLIHDDSLTFKEDIQKAQVSGQGDSLHEHIANLAGSPAIKKGILQTVKVVDELVKVMGRHKPENIVIEMARENQTTQKGQKNSRERMKRIEEGIKELGSQILKEHPVENTQLQNEKLYLYYLQNGRDMYVDQELDINRLSDYDVDHIVPQSFLKDDSIDNKVLTRSDKARGKSDNVPSEEVVKKMKNYWRQLLNAKLITQRKFDNLTKAERGGLSELDKAGFIKRQLVETRQITKHVAQILDSRMNTKYDENDKLIREVKVITLKSKLVSDFRKDFQFYKVREINNYHHAHDAYLNAVVGTALIKKYPKLESEFVYGDYKVYDVRKMIAKSEQEIGKATAKYFFYSNIMNFFKTEITLANGEIRKRPLIETNGETGEIVWDKGRDFATVRKVLSMPQVNIVKKTEVQTGGFSKESILPKRNSDKLIARKKDWDPKKYGGFDSPTVAYSVLVVAKVEKGKSKKLKSVKELLGITIMERSSFEKNPIDFLEAKGYKEVKKDLIIKLPKYSLFELENGRKRMLASAGELQKGNELALPSKYVNFLYLASHYEKLKGSPEDNEQKQLFVEQHKHYLDEIIEQISEFSKRVILADANLDKVLSAYNKHRDKPIREQAENIIHLFTLTNLGAPAAFKYFDTTIDRKRYTSTKEVLDATLIHQSITGLYETRIDLSQLGGDGGGGGEAAAKGGSGGTLNIEDEYRLHETSKEPDVSLGSTWLSDFPQAWAETGGMGLAVRQAPLIIPLKATSTPVSIKQYPMSQEARLGIKPHIQRLLDQGILVPCQSPWNTPLLPVKKPGTNDYRPVQDLREVNKRVEDIHPTVPNPYNLLSGLPPSHQWYTVLDLKDAFFCLRLHPTSQPLFAFEWRDPEMGISGQLTWTRLPQGFKNSPTLFNEALHRDLAGFRIQHPDLILLQYVDDLLLAATSELDCQQGTRALLQTLGDLGYRASAKKAQICQKQVKYLGYLLKEGQRWLTEARKETVMGQPIPKTPRQLREFLGTAGFCRLWIPGFAEMAAPLYPLTKPGTLFNWGPDQQKAFQEIKQALLTAPALGLPDLTKPFELFVDEKQGYAKGVLTQKLGPWRRPVAYLSKKLDPVAAGWPPCLRMVAAIAVLTKDAGKLTMGQPLVILAPHAVEALVKQPPDRWLSNARMTHYQALLLDTDRVQFGPVVALNPATLLPLPEEGLQHDCLDILAEAHGTRSDLMDQPLPDADHTWYTDGSSFLQEGQRKAGAAVTTETEVIWARALPAGTSAQRAELIALTQALKMAEGKKLNVYTDSRYAFATAHIHGEIYRRRGWLTSEGKEIKNKDEILALLKALFLPKRLSIIHCPGHQKGNSAEARGNRMADQAAREVATRETPETSTLLAGKRTADGSEFEKRTADGSEFESPKKKAKVE

SEQ ID NO: 2276 - protein, 2095 aa, synthetic construct
MPAAKRVKLDGGDKKYSIGLDIGTNSVGWAVITDEYKVPSKKFKVLGNTDRHSIKKNLIGALLFDSGETAEATRLKRTARRRYTRRKNRICYLQEIFSNEMAKVDDSFFHRLEESFLVEEDKKHERHPIFGNIVDEVAYHEKYPTIYHLRKKLVDSTDKADLRLIYLALAHMIKFRGHFLIEGDLNPDNSDVDKLFIQLVQTYNQLFEENPINASGVDAKAILSARLSKSRRLENLIAQLPGEKKNGLFGNLIALSLGLTPNFKSNFDLAEDAKLQLSKDTYDDDLDNLLAQIGDQYADLFLAAKNLSDAILLSDILRVNTEITKAPLSASMIKRYDEHHQDLTLLKALVRQQLPEKYKEIFFDQSKNGYAGYIDGGASQEEFYKFIKPILEKMDGTEELLVKLNREDLLRKQRTFDNGSIPHQIHLGELHAILRRQEDFYPFLKDNREKIEKILTFRIPYYVGPLARGNSRFAWMTRKSEETITPWNFEEVVDKGASAQSFIERMTNFDKNLPNEKVLPKHSLLYEYFTVYNELTKVKYVTEGMRKPAFLSGEQKKAIVDLLFKTNRKVTVKQLKEDYFKKIECFDSVEISGVEDRFNASLGTYHDLLKIIKDKDFLDNEENEDILEDIVLTLTLFEDREMIEERLKTYAHLFDDKVMKQLKRRRYTGWGRLSRKLINGIRDKQSGKTILDFLKSDGFANRNFMQLIHDDSLTFKEDIQKAQVSGQGDSLHEHIANLAGSPAIKKGILQTVKVVDELVKVMGRHKPENIVIEMARENQTTQKGQKNSRERMKRIEEGIKELGSQILKEHPVENTQLQNEKLYLYYLQNGRDMYVDQELDINRLSDYDVDHIVPQSFLKDDSIDNKVLTRSDKARGKSDNVPSEEVVKKMKNYWRQLLNAKLITQRKFDNLTKAERGGLSELDKAGFIKRQLVETRQITKHVAQILDSRMNTKYDENDKLIREVKVITLKSKLVSDFRKDFQFYKVREINNYHHAHDAYLNAVVGTALIKKYPKLESEFVYGDYKVYDVRKMIAKSEQEIGKATAKYFFYSNIMNFFKTEITLANGEIRKRPLIETNGETGEIVWDKGRDFATVRKVLSMPQVNIVKKTEVQTGGFSKESILPKRNSDKLIARKKDWDPKKYGGFDSPTVAYSVLVVAKVEKGKSKKLKSVKELLGITIMERSSFEKNPIDFLEAKGYKEVKKDLIIKLPKYSLFELENGRKRMLASAGELQKGNELALPSKYVNFLYLASHYEKLKGSPEDNEQKQLFVEQHKHYLDEIIEQISEFSKRVILADANLDKVLSAYNKHRDKPIREQAENIIHLFTLTNLGAPAAFKYFDTTIDRKRYTSTKEVLDATLIHQSITGLYETRIDLSQLGGDGGGGGGSGGGGSGGTLNIEDEYRLHETSKEPDVSLGSTWLSDFPQAWAETGGMGLAVRQAPLIIPLKATSTPVSIKQYPMSQEARLGIKPHIQRLLDQGILVPCQSPWNTPLLPVKKPGTNDYRPVQDLREVNKRVEDIHPTVPNPYNLLSGLPPSHQWYTVLDLKDAFFCLRLHPTSQPLFAFEWRDPEMGISGQLTWTRLPQGFKNSPTLFNEALHRDLAGFRIQHPDLILLQYVDDLLLAATSELDCQQGTRALLQTLGDLGYRASAKKAQICQKQVKYLGYLLKEGQRWLTEARKETVMGQPIPKTPRQLREFLGTAGFCRLWIPGFAEMAAPLYPLTKPGTLFNWGPDQQKAFQEIKQALLTAPALGLPDLTKPFELFVDEKQGYAKGVLTQKLGPWRRPVAYLSKKLDPVAAGWPPCLRMVAAIAVLTKDAGKLTMGQPLVILAPHAVEALVKQPPDRWLSNARMTHYQALLLDTDRVQFGPVVALNPATLLPLPEEGLQHDCLDILAEAHGTRSDLMDQPLPDADHTWYTDGSSFLQEGQRKAGAAVTTETEVIWARALPAGTSAQRAELIALTQALKMAEGKKLNVYTDSRYAFATAHIHGEIYRRRGWLTSEGKEIKNKDEILALLKALFLPKRLSIIHCPGHQKGNSAEARGNRMADQAAREVATRETPETSTLLAGKRTADGSEFEKRTADGSEFESPKKKAKVE

SEQ ID NO: 2277 - protein, 2096 aa, synthetic construct
MPAAKRVKLDGGDKKYSIGLDIGTNSVGWAVITDEYKVPSKKFKVLGNTDRHSIKKNLIGALLFDSGETAEATRLKRTARRRYTRRKNRICYLQEIFSNEMAKVDDSFFHRLEESFLVEEDKKHERHPIFGNIVDEVAYHEKYPTIYHLRKKLVDSTDKADLRLIYLALAHMIKFRGHFLIEGDLNPDNSDVDKLFIQLVQTYNQLFEENPINASGVDAKAILSARLSKSRRLENLIAQLPGEKKNGLFGNLIALSLGLTPNFKSNFDLAEDAKLQLSKDTYDDDLDNLLAQIGDQYADLFLAAKNLSDAILLSDILRVNTEITKAPLSASMIKRYDEHHQDLTLLKALVRQQLPEKYKEIFFDQSKNGYAGYIDGGASQEEFYKFIKPILEKMDGTEELLVKLNREDLLRKQRTFDNGSIPHQIHLGELHAILRRQEDFYPFLKDNREKIEKILTFRIPYYVGPLARGNSRFAWMTRKSEETITPWNFEEVVDKGASAQSFIERMTNFDKNLPNEKVLPKHSLLYEYFTVYNELTKVKYVTEGMRKPAFLSGEQKKAIVDLLFKTNRKVTVKQLKEDYFKKIECFDSVEISGVEDRFNASLGTYHDLLKIIKDKDFLDNEENEDILEDIVLTLTLFEDREMIEERLKTYAHLFDDKVMKQLKRRRYTGWGRLSRKLINGIRDKQSGKTILDFLKSDGFANRNFMQLIHDDSLTFKEDIQKAQVSGQGDSLHEHIANLAGSPAIKKGILQTVKVVDELVKVMGRHKPENIVIEMARENQTTQKGQKNSRERMKRIEEGIKELGSQILKEHPVENTQLQNEKLYLYYLQNGRDMYVDQELDINRLSDYDVDHIVPQSFLKDDSIDNKVLTRSDKARGKSDNVPSEEVVKKMKNYWRQLLNAKLITQRKFDNLTKAERGGLSELDKAGFIKRQLVETRQITKHVAQILDSRMNTKYDENDKLIREVKVITLKSKLVSDFRKDFQFYKVREINNYHHAHDAYLNAVVGTALIKKYPKLESEFVYGDYKVYDVRKMIAKSEQEIGKATAKYFFYSNIMNFFKTEITLANGEIRKRPLIETNGETGEIVWDKGRDFATVRKVLSMPQVNIVKKTEVQTGGFSKESILPKRNSDKLIARKKDWDPKKYGGFDSPTVAYSVLVVAKVEKGKSKKLKSVKELLGITIMERSSFEKNPIDFLEAKGYKEVKKDLIIKLPKYSLFELENGRKRMLASAGELQKGNELALPSKYVNFLYLASHYEKLKGSPEDNEQKQLFVEQHKHYLDEIIEQISEFSKRVILADANLDKVLSAYNKHRDKPIREQAENIIHLFTLTNLGAPAAFKYFDTTIDRKRYTSTKEVLDATLIHQSITGLYETRIDLSQLGGDGGEAAAKPAPGGSGGTLNIEDEYRLHETSKEPDVSLGSTWLSDFPQAWAETGGMGLAVRQAPLIIPLKATSTPVSIKQYPMSQEARLGIKPHIQRLLDQGILVPCQSPWNTPLLPVKKPGTNDYRPVQDLREVNKRVEDIHPTVPNPYNLLSGLPPSHQWYTVLDLKDAFFCLRLHPTSQPLFAFEWRDPEMGISGQLTWTRLPQGFKNSPTLFNEALHRDLAGFRIQHPDLILLQYVDDLLLAATSELDCQQGTRALLQTLGDLGYRASAKKAQICQKQVKYLGYLLKEGQRWLTEARKETVMGQPIPKTPRQLREFLGTAGFCRLWIPGFAEMAAPLYPLTKPGTLFNWGPDQQKAFQEIKQALLTAPALGLPDLTKPFELFVDEKQGYAKGVLTQKLGPWRRPVAYLSKKLDPVAAGWPPCLRMVAAIAVLTKDAGKLTMGQPLVILAPHAVEALVKQPPDRWLSNARMTHYQALLLDTDRVQFGPVVALNPATLLPLPEEGLQHDCLDILAEAHGTRSDLMDQPLPDADHTWYTDGSSFLQEGQRKAGAAVTTETEVIWARALPAGTSAQRAELIALTQALKMAEGKKLNVYTDSRYAFATAHIHGEIYRRRGWLTSEGKEIKNKDEILALLKALFLPKRLSIIHCPGHQKGNSAEARGNRMADQAAREVATRETPETSTLLAGKRTADGSEFEKRTADGSEFESPKKKAKVE

SEQ ID NO: 2278 - protein, 2096 aa, synthetic construct
MPAAKRVKLDGGDKKYSIGLDIGTNSVGWAVITDEYKVPSKKFKVLGNTDRHSIKKNLIGALLFDSGETAEATRLKRTARRRYTRRKNRICYLQEIFSNEMAKVDDSFFHRLEESFLVEEDKKHERHPIFGNIVDEVAYHEKYPTIYHLRKKLVDSTDKADLRLIYLALAHMIKFRGHFLIEGDLNPDNSDVDKLFIQLVQTYNQLFEENPINASGVDAKAILSARLSKSRRLENLIAQLPGEKKNGLFGNLIALSLGLTPNFKSNFDLAEDAKLQLSKDTYDDDLDNLLAQIGDQYADLFLAAKNLSDAILLSDILRVNTEITKAPLSASMIKRYDEHHQDLTLLKALVRQQLPEKYKEIFFDQSKNGYAGYIDGGASQEEFYKFIKPILEKMDGTEELLVKLNREDLLRKQRTFDNGSIPHQIHLGELHAILRRQEDFYPFLKDNREKIEKILTFRIPYYVGPLARGNSRFAWMTRKSEETITPWNFEEVVDKGASAQSFIERMTNFDKNLPNEKVLPKHSLLYEYFTVYNELTKVKYVTEGMRKPAFLSGEQKKAIVDLLFKTNRKVTVKQLKEDYFKKIECFDSVEISGVEDRFNASLGTYHDLLKIIKDKDFLDNEENEDILEDIVLTLTLFEDREMIEERLKTYAHLFDDKVMKQLKRRRYTGWGRLSRKLINGIRDKQSGKTILDFLKSDGFANRNFMQLIHDDSLTFKEDIQKAQVSGQGDSLHEHIANLAGSPAIKKGILQTVKVVDELVKVMGRHKPENIVIEMARENQTTQKGQKNSRERMKRIEEGIKELGSQILKEHPVENTQLQNEKLYLYYLQNGRDMYVDQELDINRLSDYDVDHIVPQSFLKDDSIDNKVLTRSDKARGKSDNVPSEEVVKKMKNYWRQLLNAKLITQRKFDNLTKAERGGLSELDKAGFIKRQLVETRQITKHVAQILDSRMNTKYDENDKLIREVKVITLKSKLVSDFRKDFQFYKVREINNYHHAHDAYLNAVVGTALIKKYPKLESEFVYGDYKVYDVRKMIAKSEQEIGKATAKYFFYSNIMNFFKTEITLANGEIRKRPLIETNGETGEIVWDKGRDFATVRKVLSMPQVNIVKKTEVQTGGFSKESILPKRNSDKLIARKKDWDPKKYGGFDSPTVAYSVLVVAKVEKGKSKKLKSVKELLGITIMERSSFEKNPIDFLEAKGYKEVKKDLIIKLPKYSLFELENGRKRMLASAGELQKGNELALPSKYVNFLYLASHYEKLKGSPEDNEQKQLFVEQHKHYLDEIIEQISEFSKRVILADANLDKVLSAYNKHRDKPIREQAENIIHLFTLTNLGAPAAFKYFDTTIDRKRYTSTKEVLDATLIHQSITGLYETRIDLSQLGGDGGEAAAKGGGPAPGGTLNIEDEYRLHETSKEPDVSLGSTWLSDFPQAWAETGGMGLAVRQAPLIIPLKATSTPVSIKQYPMSQEARLGIKPHIQRLLDQGILVPCQSPWNTPLLPVKKPGTNDYRPVQDLREVNKRVEDIHPTVPNPYNLLSGLPPSHQWYTVLDLKDAFFCLRLHPTSQPLFAFEWRDPEMGISGQLTWTRLPQGFKNSPTLFNEALHRDLAGFRIQHPDLILLQYVDDLLLAATSELDCQQGTRALLQTLGDLGYRASAKKAQICQKQVKYLGYLLKEGQRWLTEARKETVMGQPIPKTPRQLREFLGTAGFCRLWIPGFAEMAAPLYPLTKPGTLFNWGPDQQKAFQEIKQALLTAPALGLPDLTKPFELFVDEKQGYAKGVLTQKLGPWRRPVAYLSKKLDPVAAGWPPCLRMVAAIAVLTKDAGKLTMGQPLVILAPHAVEALVKQPPDRWLSNARMTHYQALLLDTDRVQFGPVVALNPATLLPLPEEGLQHDCLDILAEAHGTRSDLMDQPLPDADHTWYTDGSSFLQEGQRKAGAAVTTETEVIWARALPAGTSAQRAELIALTQALKMAEGKKLNVYTDSRYAFATAHIHGEIYRRRGWLTSEGKEIKNKDEILALLKALFLPKRLSIIHCPGHQKGNSAEARGNRMADQAAREVATRETPETSTLLAGKRTADGSEFEKRTADGSEFESPKKKAKVE

SEQ ID NO: 2279 - protein, 2096 aa, synthetic construct
MPAAKRVKLDGGDKKYSIGLDIGTNSVGWAVITDEYKVPSKKFKVLGNTDRHSIKKNLIGALLFDSGETAEATRLKRTARRRYTRRKNRICYLQEIFSNEMAKVDDSFFHRLEESFLVEEDKKHERHPIFGNIVDEVAYHEKYPTIYHLRKKLVDSTDKADLRLIYLALAHMIKFRGHFLIEGDLNPDNSDVDKLFIQLVQTYNQLFEENPINASGVDAKAILSARLSKSRRLENLIAQLPGEKKNGLFGNLIALSLGLTPNFKSNFDLAEDAKLQLSKDTYDDDLDNLLAQIGDQYADLFLAAKNLSDAILLSDILRVNTEITKAPLSASMIKRYDEHHQDLTLLKALVRQQLPEKYKEIFFDQSKNGYAGYIDGGASQEEFYKFIKPILEKMDGTEELLVKLNREDLLRKQRTFDNGSIPHQIHLGELHAILRRQEDFYPFLKDNREKIEKILTFRIPYYVGPLARGNSRFAWMTRKSEETITPWNFEEVVDKGASAQSFIERMTNFDKNLPNEKVLPKHSLLYEYFTVYNELTKVKYVTEGMRKPAFLSGEQKKAIVDLLFKTNRKVTVKQLKEDYFKKIECFDSVEISGVEDRFNASLGTYHDLLKIIKDKDFLDNEENEDILEDIVLTLTLFEDREMIEERLKTYAHLFDDKVMKQLKRRRYTGWGRLSRKLINGIRDKQSGKTILDFLKSDGFANRNFMQLIHDDSLTFKEDIQKAQVSGQGDSLHEHIANLAGSPAIKKGILQTVKVVDELVKVMGRHKPENIVIEMARENQTTQKGQKNSRERMKRIEEGIKELGSQILKEHPVENTQLQNEKLYLYYLQNGRDMYVDQELDINRLSDYDVDHIVPQSFLKDDSIDNKVLTRSDKARGKSDNVPSEEVVKKMKNYWRQLLNAKLITQRKFDNLTKAERGGLSELDKAGFIKRQLVETRQITKHVAQILDSRMNTKYDENDKLIREVKVITLKSKLVSDFRKDFQFYKVREINNYHHAHDAYLNAVVGTALIKKYPKLESEFVYGDYKVYDVRKMIAKSEQEIGKATAKYFFYSNIMNFFKTEITLANGEIRKRPLIETNGETGEIVWDKGRDFATVRKVLSMPQVNIVKKTEVQTGGFSKESILPKRNSDKLIARKKDWDPKKYGGFDSPTVAYSVLVVAKVEKGKSKKLKSVKELLGITIMERSSFEKNPIDFLEAKGYKEVKKDLIIKLPKYSLFELENGRKRMLASAGELQKGNELALPSKYVNFLYLASHYEKLKGSPEDNEQKQLFVEQHKHYLDEIIEQISEFSKRVILADANLDKVLSAYNKHRDKPIREQAENIIHLFTLTNLGAPAAFKYFDTTIDRKRYTSTKEVLDATLIHQSITGLYETRIDLSQLGGDGGGGGEAAAKPAPGGTLNIEDEYRLHETSKEPDVSLGSTWLSDFPQAWAETGGMGLAVRQAPLIIPLKATSTPVSIKQYPMSQEARLGIKPHIQRLLDQGILVPCQSPWNTPLLPVKKPGTNDYRPVQDLREVNKRVEDIHPTVPNPYNLLSGLPPSHQWYTVLDLKDAFFCLRLHPTSQPLFAFEWRDPEMGISGQLTWTRLPQGFKNSPTLFNEALHRDLAGFRIQHPDLILLQYVDDLLLAATSELDCQQGTRALLQTLGDLGYRASAKKAQICQKQVKYLGYLLKEGQRWLTEARKETVMGQPIPKTPRQLREFLGTAGFCRLWIPGFAEMAAPLYPLTKPGTLFNWGPDQQKAFQEIKQALLTAPALGLPDLTKPFELFVDEKQGYAKGVLTQKLGPWRRPVAYLSKKLDPVAAGWPPCLRMVAAIAVLTKDAGKLTMGQPLVILAPHAVEALVKQPPDRWLSNARMTHYQALLLDTDRVQFGPVVALNPATLLPLPEEGLQHDCLDILAEAHGTRSDLMDQPLPDADHTWYTDGSSFLQEGQRKAGAAVTTETEVIWARALPAGTSAQRAELIALTQALKMAEGKKLNVYTDSRYAFATAHIHGEIYRRRGWLTSEGKEIKNKDEILALLKALFLPKRLSIIHCPGHQKGNSAEARGNRMADQAAREVATRETPETSTLLAGKRTADGSEFEKRTADGSEFESPKKKAKVE

SEQ ID NO: 2280 - protein, 2100 aa, synthetic construct
MPAAKRVKLDGGDKKYSIGLDIGTNSVGWAVITDEYKVPSKKFKVLGNTDRHSIKKNLIGALLFDSGETAEATRLKRTARRRYTRRKNRICYLQEIFSNEMAKVDDSFFHRLEESFLVEEDKKHERHPIFGNIVDEVAYHEKYPTIYHLRKKLVDSTDKADLRLIYLALAHMIKFRGHFLIEGDLNPDNSDVDKLFIQLVQTYNQLFEENPINASGVDAKAILSARLSKSRRLENLIAQLPGEKKNGLFGNLIALSLGLTPNFKSNFDLAEDAKLQLSKDTYDDDLDNLLAQIGDQYADLFLAAKNLSDAILLSDILRVNTEITKAPLSASMIKRYDEHHQDLTLLKALVRQQLPEKYKEIFFDQSKNGYAGYIDGGASQEEFYKFIKPILEKMDGTEELLVKLNREDLLRKQRTFDNGSIPHQIHLGELHAILRRQEDFYPFLKDNREKIEKILTFRIPYYVGPLARGNSRFAWMTRKSEETITPWNFEEVVDKGASAQSFIERMTNFDKNLPNEKVLPKHSLLYEYFTVYNELTKVKYVTEGMRKPAFLSGEQKKAIVDLLFKTNRKVTVKQLKEDYFKKIECFDSVEISGVEDRFNASLGTYHDLLKIIKDKDFLDNEENEDILEDIVLTLTLFEDREMIEERLKTYAHLFDDKVMKQLKRRRYTGWGRLSRKLINGIRDKQSGKTILDFLKSDGFANRNFMQLIHDDSLTFKEDIQKAQVSGQGDSLHEHIANLAGSPAIKKGILQTVKVVDELVKVMGRHKPENIVIEMARENQTTQKGQKNSRERMKRIEEGIKELGSQILKEHPVENTQLQNEKLYLYYLQNGRDMYVDQELDINRLSDYDVDHIVPQSFLKDDSIDNKVLTRSDKARGKSDNVPSEEVVKKMKNYWRQLLNAKLITQRKFDNLTKAERGGLSELDKAGFIKRQLVETRQITKHVAQILDSRMNTKYDENDKLIREVKVITLKSKLVSDFRKDFQFYKVREINNYHHAHDAYLNAVVGTALIKKYPKLESEFVYGDYKVYDVRKMIAKSEQEIGKATAKYFFYSNIMNFFKTEITLANGEIRKRPLIETNGETGEIVWDKGRDFATVRKVLSMPQVNIVKKTEVQTGGFSKESILPKRNSDKLIARKKDWDPKKYGGFDSPTVAYSVLVVAKVEKGKSKKLKSVKELLGITIMERSSFEKNPIDFLEAKGYKEVKKDLIIKLPKYSLFELENGRKRMLASAGELQKGNELALPSKYVNFLYLASHYEKLKGSPEDNEQKQLFVEQHKHYLDEIIEQISEFSKRVILADANLDKVLSAYNKHRDKPIREQAENIIHLFTLTNLGAPAAFKYFDTTIDRKRYTSTKEVLDATLIHQSITGLYETRIDLSQLGGDGGGSSGSSGSSGSSGSSGGTLNIEDEYRLHETSKEPDVSLGSTWLSDFPQAWAETGGMGLAVRQAPLIIPLKATSTPVSIKQYPMSQEARLGIKPHIQRLLDQGILVPCQSPWNTPLLPVKKPGTNDYRPVQDLREVNKRVEDIHPTVPNPYNLLSGLPPSHQWYTVLDLKDAFFCLRLHPTSQPLFAFEWRDPEMGISGQLTWTRLPQGFKNSPTLFNEALHRDLAGFRIQHPDLILLQYVDDLLLAATSELDCQQGTRALLQTLGDLGYRASAKKAQICQKQVKYLGYLLKEGQRWLTEARKETVMGQPIPKTPRQLREFLGTAGFCRLWIPGFAEMAAPLYPLTKPGTLFNWGPDQQKAFQEIKQALLTAPALGLPDLTKPFELFVDEKQGYAKGVLTQKLGPWRRPVAYLSKKLDPVAAGWPPCLRMVAAIAVLTKDAGKLTMGQPLVILAPHAVEALVKQPPDRWLSNARMTHYQALLLDTDRVQFGPVVALNPATLLPLPEEGLQHDCLDILAEAHGTRSDLMDQPLPDADHTWYTDGSSFLQEGQRKAGAAVTTETEVIWARALPAGTSAQRAELIALTQALKMAEGKKLNVYTDSRYAFATAHIHGEIYRRRGWLTSEGKEIKNKDEILALLKALFLPKRLSIIHCPGHQKGNSAEARGNRMADQAAREVATRETPETSTLLAGKRTADGSEFEKRTADGSEFESPKKKAKVE

SEQ ID NO: 2281 - protein, 2093 aa, synthetic construct
MPAAKRVKLDGGDKKYSIGLDIGTNSVGWAVITDEYKVPSKKFKVLGNTDRHSIKKNLIGALLFDSGETAEATRLKRTARRRYTRRKNRICYLQEIFSNEMAKVDDSFFHRLEESFLVEEDKKHERHPIFGNIVDEVAYHEKYPTIYHLRKKLVDSTDKADLRLIYLALAHMIKFRGHFLIEGDLNPDNSDVDKLFIQLVQTYNQLFEENPINASGVDAKAILSARLSKSRRLENLIAQLPGEKKNGLFGNLIALSLGLTPNFKSNFDLAEDAKLQLSKDTYDDDLDNLLAQIGDQYADLFLAAKNLSDAILLSDILRVNTEITKAPLSASMIKRYDEHHQDLTLLKALVRQQLPEKYKEIFFDQSKNGYAGYIDGGASQEEFYKFIKPILEKMDGTEELLVKLNREDLLRKQRTFDNGSIPHQIHLGELHAILRRQEDFYPFLKDNREKIEKILTFRIPYYVGPLARGNSRFAWMTRKSEETITPWNFEEVVDKGASAQSFIERMTNFDKNLPNEKVLPKHSLLYEYFTVYNELTKVKYVTEGMRKPAFLSGEQKKAIVDLLFKTNRKVTVKQLKEDYFKKIECFDSVEISGVEDRFNASLGTYHDLLKIIKDKDFLDNEENEDILEDIVLTLTLFEDREMIEERLKTYAHLFDDKVMKQLKRRRYTGWGRLSRKLINGIRDKQSGKTILDFLKSDGFANRNFMQLIHDDSLTFKEDIQKAQVSGQGDSLHEHIANLAGSPAIKKGILQTVKVVDELVKVMGRHKPENIVIEMARENQTTQKGQKNSRERMKRIEEGIKELGSQILKEHPVENTQLQNEKLYLYYLQNGRDMYVDQELDINRLSDYDVDHIVPQSFLKDDSIDNKVLTRSDKARGKSDNVPSEEVVKKMKNYWRQLLNAKLITQRKFDNLTKAERGGLSELDKAGFIKRQLVETRQITKHVAQILDSRMNTKYDENDKLIREVKVITLKSKLVSDFRKDFQFYKVREINNYHHAHDAYLNAVVGTALIKKYPKLESEFVYGDYKVYDVRKMIAKSEQEIGKATAKYFFYSNIMNFFKTEITLANGEIRKRPLIETNGETGEIVWDKGRDFATVRKVLSMPQVNIVKKTEVQTGGFSKESILPKRNSDKLIARKKDWDPKKYGGFDSPTVAYSVLVVAKVEKGKSKKLKSVKELLGITIMERSSFEKNPIDFLEAKGYKEVKKDLIIKLPKYSLFELENGRKRMLASAGELQKGNELALPSKYVNFLYLASHYEKLKGSPEDNEQKQLFVEQHKHYLDEIIEQISEFSKRVILADANLDKVLSAYNKHRDKPIREQAENIIHLFTLTNLGAPAAFKYFDTTIDRKRYTSTKEVLDATLIHQSITGLYETRIDLSQLGGDGGEAAAKGGGGGTLNIEDEYRLHETSKEPDVSLGSTWLSDFPQAWAETGGMGLAVRQAPLIIPLKATSTPVSIKQYPMSQEARLGIKPHIQRLLDQGILVPCQSPWNTPLLPVKKPGTNDYRPVQDLREVNKRVEDIHPTVPNPYNLLSGLPPSHQWYTVLDLKDAFFCLRLHPTSQPLFAFEWRDPEMGISGQLTWTRLPQGFKNSPTLFNEALHRDLAGFRIQHPDLILLQYVDDLLLAATSELDCQQGTRALLQTLGDLGYRASAKKAQICQKQVKYLGYLLKEGQRWLTEARKETVMGQPIPKTPRQLREFLGTAGFCRLWIPGFAEMAAPLYPLTKPGTLFNWGPDQQKAFQEIKQALLTAPALGLPDLTKPFELFVDEKQGYAKGVLTQKLGPWRRPVAYLSKKLDPVAAGWPPCLRMVAAIAVLTKDAGKLTMGQPLVILAPHAVEALVKQPPDRWLSNARMTHYQALLLDTDRVQFGPVVALNPATLLPLPEEGLQHDCLDILAEAHGTRSDLMDQPLPDADHTWYTDGSSFLQEGQRKAGAAVTTETEVIWARALPAGTSAQRAELIALTQALKMAEGKKLNVYTDSRYAFATAHIHGEIYRRRGWLTSEGKEIKNKDEILALLKALFLPKRLSIIHCPGHQKGNSAEARGNRMADQAAREVATRETPETSTLLAGKRTADGSEFEKRTADGSEFESPKKKAKVE

SEQ ID NO: 2282 - protein, 2096 aa, synthetic construct
MPAAKRVKLDGGDKKYSIGLDIGTNSVGWAVITDEYKVPSKKFKVLGNTDRHSIKKNLIGALLFDSGETAEATRLKRTARRRYTRRKNRICYLQEIFSNEMAKVDDSFFHRLEESFLVEEDKKHERHPIFGNIVDEVAYHEKYPTIYHLRKKLVDSTDKADLRLIYLALAHMIKFRGHFLIEGDLNPDNSDVDKLFIQLVQTYNQLFEENPINASGVDAKAILSARLSKSRRLENLIAQLPGEKKNGLFGNLIALSLGLTPNFKSNFDLAEDAKLQLSKDTYDDDLDNLLAQIGDQYADLFLAAKNLSDAILLSDILRVNTEITKAPLSASMIKRYDEHHQDLTLLKALVRQQLPEKYKEIFFDQSKNGYAGYIDGGASQEEFYKFIKPILEKMDGTEELLVKLNREDLLRKQRTFDNGSIPHQIHLGELHAILRRQEDFYPFLKDNREKIEKILTFRIPYYVGPLARGNSRFAWMTRKSEETITPWNFEEVVDKGASAQSFIERMTNFDKNLPNEKVLPKHSLLYEYFTVYNELTKVKYVTEGMRKPAFLSGEQKKAIVDLLFKTNRKVTVKQLKEDYFKKIECFDSVEISGVEDRFNASLGTYHDLLKIIKDKDFLDNEENEDILEDIVLTLTLFEDREMIEERLKTYAHLFDDKVMKQLKRRRYTGWGRLSRKLINGIRDKQSGKTILDFLKSDGFANRNFMQLIHDDSLTFKEDIQKAQVSGQGDSLHEHIANLAGSPAIKKGILQTVKVVDELVKVMGRHKPENIVIEMARENQTTQKGQKNSRERMKRIEEGIKELGSQILKEHPVENTQLQNEKLYLYYLQNGRDMYVDQELDINRLSDYDVDHIVPQSFLKDDSIDNKVLTRSDKARGKSDNVPSEEVVKKMKNYWRQLLNAKLITQRKFDNLTKAERGGLSELDKAGFIKRQLVETRQITKHVAQILDSRMNTKYDENDKLIREVKVITLKSKLVSDFRKDFQFYKVREINNYHHAHDAYLNAVVGTALIKKYPKLESEFVYGDYKVYDVRKMIAKSEQEIGKATAKYFFYSNIMNFFKTEITLANGEIRKRPLIETNGETGEIVWDKGRDFATVRKVLSMPQVNIVKKTEVQTGGFSKESILPKRNSDKLIARKKDWDPKKYGGFDSPTVAYSVLVVAKVEKGKSKKLKSVKELLGITIMERSSFEKNPIDFLEAKGYKEVKKDLIIKLPKYSLFELENGRKRMLASAGELQKGNELALPSKYVNFLYLASHYEKLKGSPEDNEQKQLFVEQHKHYLDEIIEQISEFSKRVILADANLDKVLSAYNKHRDKPIREQAENIIHLFTLTNLGAPAAFKYFDTTIDRKRYTSTKEVLDATLIHQSITGLYETRIDLSQLGGDGGGSSPAPEAAAKGGTLNIEDEYRLHETSKEPDVSLGSTWLSDFPQAWAETGGMGLAVRQAPLIIPLKATSTPVSIKQYPMSQEARLGIKPHIQRLLDQGILVPCQSPWNTPLLPVKKPGTNDYRPVQDLREVNKRVEDIHPTVPNPYNLLSGLPPSHQWYTVLDLKDAFFCLRLHPTSQPLFAFEWRDPEMGISGQLTWTRLPQGFKNSPTLFNEALHRDLAGFRIQHPDLILLQYVDDLLLAATSELDCQQGTRALLQTLGDLGYRASAKKAQICQKQVKYLGYLLKEGQRWLTEARKETVMGQPIPKTPRQLREFLGTAGFCRLWIPGFAEMAAPLYPLTKPGTLFNWGPDQQKAFQEIKQALLTAPALGLPDLTKPFELFVDEKQGYAKGVLTQKLGPWRRPVAYLSKKLDPVAAGWPPCLRMVAAIAVLTKDAGKLTMGQPLVILAPHAVEALVKQPPDRWLSNARMTHYQALLLDTDRVQFGPVVALNPATLLPLPEEGLQHDCLDILAEAHGTRSDLMDQPLPDADHTWYTDGSSFLQEGQRKAGAAVTTETEVIWARALPAGTSAQRAELIALTQALKMAEGKKLNVYTDSRYAFATAHIHGEIYRRRGWLTSEGKEIKNKDEILALLKALFLPKRLSIIHCPGHQKGNSAEARGNRMADQAAREVATRETPETSTLLAGKRTADGSEFEKRTADGSEFESPKKKAKVE

SEQ ID NO: 2283 - protein, 2094 aa, synthetic construct
MPAAKRVKLDGGDKKYSIGLDIGTNSVGWAVITDEYKVPSKKFKVLGNTDRHSIKKNLIGALLFDSGETAEATRLKRTARRRYTRRKNRICYLQEIFSNEMAKVDDSFFHRLEESFLVEEDKKHERHPIFGNIVDEVAYHEKYPTIYHLRKKLVDSTDKADLRLIYLALAHMIKFRGHFLIEGDLNPDNSDVDKLFIQLVQTYNQLFEENPINASGVDAKAILSARLSKSRRLENLIAQLPGEKKNGLFGNLIALSLGLTPNFKSNFDLAEDAKLQLSKDTYDDDLDNLLAQIGDQYADLFLAAKNLSDAILLSDILRVNTEITKAPLSASMIKRYDEHHQDLTLLKALVRQQLPEKYKEIFFDQSKNGYAGYIDGGASQEEFYKFIKPILEKMDGTEELLVKLNREDLLRKQRTFDNGSIPHQIHLGELHAILRRQEDFYPFLKDNREKIEKILTFRIPYYVGPLARGNSRFAWMTRKSEETITPWNFEEVVDKGASAQSFIERMTNFDKNLPNEKVLPKHSLLYEYFTVYNELTKVKYVTEGMRKPAFLSGEQKKAIVDLLFKTNRKVTVKQLKEDYFKKIECFDSVEISGVEDRFNASLGTYHDLLKIIKDKDFLDNEENEDILEDIVLTLTLFEDREMIEERLKTYAHLFDDKVMKQLKRRRYTGWGRLSRKLINGIRDKQSGKTILDFLKSDGFANRNFMQLIHDDSLTFKEDIQKAQVSGQGDSLHEHIANLAGSPAIKKGILQTVKVVDELVKVMGRHKPENIVIEMARENQTTQKGQKNSRERMKRIEEGIKELGSQILKEHPVENTQLQNEKLYLYYLQNGRDMYVDQELDINRLSDYDVDHIVPQSFLKDDSIDNKVLTRSDKARGKSDNVPSEEVVKKMKNYWRQLLNAKLITQRKFDNLTKAERGGLSELDKAGFIKRQLVETRQITKHVAQILDSRMNTKYDENDKLIREVKVITLKSKLVSDFRKDFQFYKVREINNYHHAHDAYLNAVVGTALIKKYPKLESEFVYGDYKVYDVRKMIAKSEQEIGKATAKYFFYSNIMNFFKTEITLANGEIRKRPLIETNGETGEIVWDKGRDFATVRKVLSMPQVNIVKKTEVQTGGFSKESILPKRNSDKLIARKKDWDPKKYGGFDSPTVAYSVLVVAKVEKGKSKKLKSVKELLGITIMERSSFEKNPIDFLEAKGYKEVKKDLIIKLPKYSLFELENGRKRMLASAGELQKGNELALPSKYVNFLYLASHYEKLKGSPEDNEQKQLFVEQHKHYLDEIIEQISEFSKRVILADANLDKVLSAYNKHRDKPIREQAENIIHLFTLTNLGAPAAFKYFDTTIDRKRYTSTKEVLDATLIHQSITGLYETRIDLSQLGGDGGGSSPAPGGGGGTLNIEDEYRLHETSKEPDVSLGSTWLSDFPQAWAETGGMGLAVRQAPLIIPLKATSTPVSIKQYPMSQEARLGIKPHIQRLLDQGILVPCQSPWNTPLLPVKKPGTNDYRPVQDLREVNKRVEDIHPTVPNPYNLLSGLPPSHQWYTVLDLKDAFFCLRLHPTSQPLFAFEWRDPEMGISGQLTWTRLPQGFKNSPTLFNEALHRDLAGFRIQHPDLILLQYVDDLLLAATSELDCQQGTRALLQTLGDLGYRASAKKAQICQKQVKYLGYLLKEGQRWLTEARKETVMGQPIPKTPRQLREFLGTAGFCRLWIPGFAEMAAPLYPLTKPGTLFNWGPDQQKAFQEIKQALLTAPALGLPDLTKPFELFVDEKQGYAKGVLTQKLGPWRRPVAYLSKKLDPVAAGWPPCLRMVAAIAVLTKDAGKLTMGQPLVILAPHAVEALVKQPPDRWLSNARMTHYQALLLDTDRVQFGPVVALNPATLLPLPEEGLQHDCLDILAEAHGTRSDLMDQPLPDADHTWYTDGSSFLQEGQRKAGAAVTTETEVIWARALPAGTSAQRAELIALTQALKMAEGKKLNVYTDSRYAFATAHIHGEIYRRRGWLTSEGKEIKNKDEILALLKALFLPKRLSIIHCPGHQKGNSAEARGNRMADQAAREVATRETPETSTLLAGKRTADGSEFEKRTADGSEFESPKKKAKVE

SEQ ID NO: 2284 - protein, 2090 aa, synthetic construct
MPAAKRVKLDGGDKKYSIGLDIGTNSVGWAVITDEYKVPSKKFKVLGNTDRHSIKKNLIGALLFDSGETAEATRLKRTARRRYTRRKNRICYLQEIFSNEMAKVDDSFFHRLEESFLVEEDKKHERHPIFGNIVDEVAYHEKYPTIYHLRKKLVDSTDKADLRLIYLALAHMIKFRGHFLIEGDLNPDNSDVDKLFIQLVQTYNQLFEENPINASGVDAKAILSARLSKSRRLENLIAQLPGEKKNGLFGNLIALSLGLTPNFKSNFDLAEDAKLQLSKDTYDDDLDNLLAQIGDQYADLFLAAKNLSDAILLSDILRVNTEITKAPLSASMIKRYDEHHQDLTLLKALVRQQLPEKYKEIFFDQSKNGYAGYIDGGASQEEFYKFIKPILEKMDGTEELLVKLNREDLLRKQRTFDNGSIPHQIHLGELHAILRRQEDFYPFLKDNREKIEKILTFRIPYYVGPLARGNSRFAWMTRKSEETITPWNFEEVVDKGASAQSFIERMTNFDKNLPNEKVLPKHSLLYEYFTVYNELTKVKYVTEGMRKPAFLSGEQKKAIVDLLFKTNRKVTVKQLKEDYFKKIECFDSVEISGVEDRFNASLGTYHDLLKIIKDKDFLDNEENEDILEDIVLTLTLFEDREMIEERLKTYAHLFDDKVMKQLKRRRYTGWGRLSRKLINGIRDKQSGKTILDFLKSDGFANRNFMQLIHDDSLTFKEDIQKAQVSGQGDSLHEHIANLAGSPAIKKGILQTVKVVDELVKVMGRHKPENIVIEMARENQTTQKGQKNSRERMKRIEEGIKELGSQILKEHPVENTQLQNEKLYLYYLQNGRDMYVDQELDINRLSDYDVDHIVPQSFLKDDSIDNKVLTRSDKARGKSDNVPSEEVVKKMKNYWRQLLNAKLITQRKFDNLTKAERGGLSELDKAGFIKRQLVETRQITKHVAQILDSRMNTKYDENDKLIREVKVITLKSKLVSDFRKDFQFYKVREINNYHHAHDAYLNAVVGTALIKKYPKLESEFVYGDYKVYDVRKMIAKSEQEIGKATAKYFFYSNIMNFFKTEITLANGEIRKRPLIETNGETGEIVWDKGRDFATVRKVLSMPQVNIVKKTEVQTGGFSKESILPKRNSDKLIARKKDWDPKKYGGFDSPTVAYSVLVVAKVEKGKSKKLKSVKELLGITIMERSSFEKNPIDFLEAKGYKEVKKDLIIKLPKYSLFELENGRKRMLASAGELQKGNELALPSKYVNFLYLASHYEKLKGSPEDNEQKQLFVEQHKHYLDEIIEQISEFSKRVILADANLDKVLSAYNKHRDKPIREQAENIIHLFTLTNLGAPAAFKYFDTTIDRKRYTSTKEVLDATLIHQSITGLYETRIDLSQLGGDGGEAAAKGGTLNIEDEYRLHETSKEPDVSLGSTWLSDFPQAWAETGGMGLAVRQAPLIIPLKATSTPVSIKQYPMSQEARLGIKPHIQRLLDQGILVPCQSPWNTPLLPVKKPGTNDYRPVQDLREVNKRVEDIHPTVPNPYNLLSGLPPSHQWYTVLDLKDAFFCLRLHPTSQPLFAFEWRDPEMGISGQLTWTRLPQGFKNSPTLFNEALHRDLAGFRIQHPDLILLQYVDDLLLAATSELDCQQGTRALLQTLGDLGYRASAKKAQICQKQVKYLGYLLKEGQRWLTEARKETVMGQPIPKTPRQLREFLGTAGFCRLWIPGFAEMAAPLYPLTKPGTLFNWGPDQQKAFQEIKQALLTAPALGLPDLTKPFELFVDEKQGYAKGVLTQKLGPWRRPVAYLSKKLDPVAAGWPPCLRMVAAIAVLTKDAGKLTMGQPLVILAPHAVEALVKQPPDRWLSNARMTHYQALLLDTDRVQFGPVVALNPATLLPLPEEGLQHDCLDILAEAHGTRSDLMDQPLPDADHTWYTDGSSFLQEGQRKAGAAVTTETEVIWARALPAGTSAQRAELIALTQALKMAEGKKLNVYTDSRYAFATAHIHGEIYRRRGWLTSEGKEIKNKDEILALLKALFLPKRLSIIHCPGHQKGNSAEARGNRMADQAAREVATRETPETSTLLAGKRTADGSEFEKRTADGSEFESPKKKAKVE

SEQ ID NO: 2285 - protein, 2091 aa, synthetic construct
MPAAKRVKLDGGDKKYSIGLDIGTNSVGWAVITDEYKVPSKKFKVLGNTDRHSIKKNLIGALLFDSGETAEATRLKRTARRRYTRRKNRICYLQEIFSNEMAKVDDSFFHRLEESFLVEEDKKHERHPIFGNIVDEVAYHEKYPTIYHLRKKLVDSTDKADLRLIYLALAHMIKFRGHFLIEGDLNPDNSDVDKLFIQLVQTYNQLFEENPINASGVDAKAILSARLSKSRRLENLIAQLPGEKKNGLFGNLIALSLGLTPNFKSNFDLAEDAKLQLSKDTYDDDLDNLLAQIGDQYADLFLAAKNLSDAILLSDILRVNTEITKAPLSASMIKRYDEHHQDLTLLKALVRQQLPEKYKEIFFDQSKNGYAGYIDGGASQEEFYKFIKPILEKMDGTEELLVKLNREDLLRKQRTFDNGSIPHQIHLGELHAILRRQEDFYPFLKDNREKIEKILTFRIPYYVGPLARGNSRFAWMTRKSEETITPWNFEEVVDKGASAQSFIERMTNFDKNLPNEKVLPKHSLLYEYFTVYNELTKVKYVTEGMRKPAFLSGEQKKAIVDLLFKTNRKVTVKQLKEDYFKKIECFDSVEISGVEDRFNASLGTYHDLLKIIKDKDFLDNEENEDILEDIVLTLTLFEDREMIEERLKTYAHLFDDKVMKQLKRRRYTGWGRLSRKLINGIRDKQSGKTILDFLKSDGFANRNFMQLIHDDSLTFKEDIQKAQVSGQGDSLHEHIANLAGSPAIKKGILQTVKVVDELVKVMGRHKPENIVIEMARENQTTQKGQKNSRERMKRIEEGIKELGSQILKEHPVENTQLQNEKLYLYYLQNGRDMYVDQELDINRLSDYDVDHIVPQSFLKDDSIDNKVLTRSDKARGKSDNVPSEEVVKKMKNYWRQLLNAKLITQRKFDNLTKAERGGLSELDKAGFIKRQLVETRQITKHVAQILDSRMNTKYDENDKLIREVKVITLKSKLVSDFRKDFQFYKVREINNYHHAHDAYLNAVVGTALIKKYPKLESEFVYGDYKVYDVRKMIAKSEQEIGKATAKYFFYSNIMNFFKTEITLANGEIRKRPLIETNGETGEIVWDKGRDFATVRKVLSMPQVNIVKKTEVQTGGFSKESILPKRNSDKLIARKKDWDPKKYGGFDSPTVAYSVLVVAKVEKGKSKKLKSVKELLGITIMERSSFEKNPIDFLEAKGYKEVKKDLIIKLPKYSLFELENGRKRMLASAGELQKGNELALPSKYVNFLYLASHYEKLKGSPEDNEQKQLFVEQHKHYLDEIIEQISEFSKRVILADANLDKVLSAYNKHRDKPIREQAENIIHLFTLTNLGAPAAFKYFDTTIDRKRYTSTKEVLDATLIHQSITGLYETRIDLSQLGGDGGGSSPAPGGTLNIEDEYRLHETSKEPDVSLGSTWLSDFPQAWAETGGMGLAVRQAPLIIPLKATSTPVSIKQYPMSQEARLGIKPHIQRLLDQGILVPCQSPWNTPLLPVKKPGTNDYRPVQDLREVNKRVEDIHPTVPNPYNLLSGLPPSHQWYTVLDLKDAFFCLRLHPTSQPLFAFEWRDPEMGISGQLTWTRLPQGFKNSPTLFNEALHRDLAGFRIQHPDLILLQYVDDLLLAATSELDCQQGTRALLQTLGDLGYRASAKKAQICQKQVKYLGYLLKEGQRWLTEARKETVMGQPIPKTPRQLREFLGTAGFCRLWIPGFAEMAAPLYPLTKPGTLFNWGPDQQKAFQEIKQALLTAPALGLPDLTKPFELFVDEKQGYAKGVLTQKLGPWRRPVAYLSKKLDPVAAGWPPCLRMVAAIAVLTKDAGKLTMGQPLVILAPHAVEALVKQPPDRWLSNARMTHYQALLLDTDRVQFGPVVALNPATLLPLPEEGLQHDCLDILAEAHGTRSDLMDQPLPDADHTWYTDGSSFLQEGQRKAGAAVTTETEVIWARALPAGTSAQRAELIALTQALKMAEGKKLNVYTDSRYAFATAHIHGEIYRRRGWLTSEGKEIKNKDEILALLKALFLPKRLSIIHCPGHQKGNSAEARGNRMADQAAREVATRETPETSTLLAGKRTADGSEFEKRTADGSEFESPKKKAKVE

SEQ ID NO: 2286 - protein, 2096 aa, synthetic construct
MPAAKRVKLDGGDKKYSIGLDIGTNSVGWAVITDEYKVPSKKFKVLGNTDRHSIKKNLIGALLFDSGETAEATRLKRTARRRYTRRKNRICYLQEIFSNEMAKVDDSFFHRLEESFLVEEDKKHERHPIFGNIVDEVAYHEKYPTIYHLRKKLVDSTDKADLRLIYLALAHMIKFRGHFLIEGDLNPDNSDVDKLFIQLVQTYNQLFEENPINASGVDAKAILSARLSKSRRLENLIAQLPGEKKNGLFGNLIALSLGLTPNFKSNFDLAEDAKLQLSKDTYDDDLDNLLAQIGDQYADLFLAAKNLSDAILLSDILRVNTEITKAPLSASMIKRYDEHHQDLTLLKALVRQQLPEKYKEIFFDQSKNGYAGYIDGGASQEEFYKFIKPILEKMDGTEELLVKLNREDLLRKQRTFDNGSIPHQIHLGELHAILRRQEDFYPFLKDNREKIEKILTFRIPYYVGPLARGNSRFAWMTRKSEETITPWNFEEVVDKGASAQSFIERMTNFDKNLPNEKVLPKHSLLYEYFTVYNELTKVKYVTEGMRKPAFLSGEQKKAIVDLLFKTNRKVTVKQLKEDYFKKIECFDSVEISGVEDRFNASLGTYHDLLKIIKDKDFLDNEENEDILEDIVLTLTLFEDREMIEERLKTYAHLFDDKVMKQLKRRRYTGWGRLSRKLINGIRDKQSGKTILDFLKSDGFANRNFMQLIHDDSLTFKEDIQKAQVSGQGDSLHEHIANLAGSPAIKKGILQTVKVVDELVKVMGRHKPENIVIEMARENQTTQKGQKNSRERMKRIEEGIKELGSQILKEHPVENTQLQNEKLYLYYLQNGRDMYVDQELDINRLSDYDVDHIVPQSFLKDDSIDNKVLTRSDKARGKSDNVPSEEVVKKMKNYWRQLLNAKLITQRKFDNLTKAERGGLSELDKAGFIKRQLVETRQITKHVAQILDSRMNTKYDENDKLIREVKVITLKSKLVSDFRKDFQFYKVREINNYHHAHDAYLNAVVGTALIKKYPKLESEFVYGDYKVYDVRKMIAKSEQEIGKATAKYFFYSNIMNFFKTEITLANGEIRKRPLIETNGETGEIVWDKGRDFATVRKVLSMPQVNIVKKTEVQTGGFSKESILPKRNSDKLIARKKDWDPKKYGGFDSPTVAYSVLVVAKVEKGKSKKLKSVKELLGITIMERSSFEKNPIDFLEAKGYKEVKKDLIIKLPKYSLFELENGRKRMLASAGELQKGNELALPSKYVNFLYLASHYEKLKGSPEDNEQKQLFVEQHKHYLDEIIEQISEFSKRVILADANLDKVLSAYNKHRDKPIREQAENIIHLFTLTNLGAPAAFKYFDTTIDRKRYTSTKEVLDATLIHQSITGLYETRIDLSQLGGDGGGGSPAPEAAAKGGTLNIEDEYRLHETSKEPDVSLGSTWLSDFPQAWAETGGMGLAVRQAPLIIPLKATSTPVSIKQYPMSQEARLGIKPHIQRLLDQGILVPCQSPWNTPLLPVKKPGTNDYRPVQDLREVNKRVEDIHPTVPNPYNLLSGLPPSHQWYTVLDLKDAFFCLRLHPTSQPLFAFEWRDPEMGISGQLTWTRLPQGFKNSPTLFNEALHRDLAGFRIQHPDLILLQYVDDLLLAATSELDCQQGTRALLQTLGDLGYRASAKKAQICQKQVKYLGYLLKEGQRWLTEARKETVMGQPIPKTPRQLREFLGTAGFCRLWIPGFAEMAAPLYPLTKPGTLFNWGPDQQKAFQEIKQALLTAPALGLPDLTKPFELFVDEKQGYAKGVLTQKLGPWRRPVAYLSKKLDPVAAGWPPCLRMVAAIAVLTKDAGKLTMGQPLVILAPHAVEALVKQPPDRWLSNARMTHYQALLLDTDRVQFGPVVALNPATLLPLPEEGLQHDCLDILAEAHGTRSDLMDQPLPDADHTWYTDGSSFLQEGQRKAGAAVTTETEVIWARALPAGTSAQRAELIALTQALKMAEGKKLNVYTDSRYAFATAHIHGEIYRRRGWLTSEGKEIKNKDEILALLKALFLPKRLSIIHCPGHQKGNSAEARGNRMADQAAREVATRETPETSTLLAGKRTADGSEFEKRTADGSEFESPKKKAKVE

SEQ ID NO: 2287 - protein, 2096 aa, synthetic construct
MPAAKRVKLDGGDKKYSIGLDIGTNSVGWAVITDEYKVPSKKFKVLGNTDRHSIKKNLIGALLFDSGETAEATRLKRTARRRYTRRKNRICYLQEIFSNEMAKVDDSFFHRLEESFLVEEDKKHERHPIFGNIVDEVAYHEKYPTIYHLRKKLVDSTDKADLRLIYLALAHMIKFRGHFLIEGDLNPDNSDVDKLFIQLVQTYNQLFEENPINASGVDAKAILSARLSKSRRLENLIAQLPGEKKNGLFGNLIALSLGLTPNFKSNFDLAEDAKLQLSKDTYDDDLDNLLAQIGDQYADLFLAAKNLSDAILLSDILRVNTEITKAPLSASMIKRYDEHHQDLTLLKALVRQQLPEKYKEIFFDQSKNGYAGYIDGGASQEEFYKFIKPILEKMDGTEELLVKLNREDLLRKQRTFDNGSIPHQIHLGELHAILRRQEDFYPFLKDNREKIEKILTFRIPYYVGPLARGNSRFAWMTRKSEETITPWNFEEVVDKGASAQSFIERMTNFDKNLPNEKVLPKHSLLYEYFTVYNELTKVKYVTEGMRKPAFLSGEQKKAIVDLLFKTNRKVTVKQLKEDYFKKIECFDSVEISGVEDRFNASLGTYHDLLKIIKDKDFLDNEENEDILEDIVLTLTLFEDREMIEERLKTYAHLFDDKVMKQLKRRRYTGWGRLSRKLINGIRDKQSGKTILDFLKSDGFANRNFMQLIHDDSLTFKEDIQKAQVSGQGDSLHEHIANLAGSPAIKKGILQTVKVVDELVKVMGRHKPENIVIEMARENQTTQKGQKNSRERMKRIEEGIKELGSQILKEHPVENTQLQNEKLYLYYLQNGRDMYVDQELDINRLSDYDVDHIVPQSFLKDDSIDNKVLTRSDKARGKSDNVPSEEVVKKMKNYWRQLLNAKLITQRKFDNLTKAERGGLSELDKAGFIKRQLVETRQITKHVAQILDSRMNTKYDENDKLIREVKVITLKSKLVSDFRKDFQFYKVREINNYHHAHDAYLNAVVGTALIKKYPKLESEFVYGDYKVYDVRKMIAKSEQEIGKATAKYFFYSNIMNFFKTEITLANGEIRKRPLIETNGETGEIVWDKGRDFATVRKVLSMPQVNIVKKTEVQTGGFSKESILPKRNSDKLIARKKDWDPKKYGGFDSPTVAYSVLVVAKVEKGKSKKLKSVKELLGITIMERSSFEKNPIDFLEAKGYKEVKKDLIIKLPKYSLFELENGRKRMLASAGELQKGNELALPSKYVNFLYLASHYEKLKGSPEDNEQKQLFVEQHKHYLDEIIEQISEFSKRVILADANLDKVLSAYNKHRDKPIREQAENIIHLFTLTNLGAPAAFKYFDTTIDRKRYTSTKEVLDATLIHQSITGLYETRIDLSQLGGDGGGGSEAAAKGGGGGTLNIEDEYRLHETSKEPDVSLGSTWLSDFPQAWAETGGMGLAVRQAPLIIPLKATSTPVSIKQYPMSQEARLGIKPHIQRLLDQGILVPCQSPWNTPLLPVKKPGTNDYRPVQDLREVNKRVEDIHPTVPNPYNLLSGLPPSHQWYTVLDLKDAFFCLRLHPTSQPLFAFEWRDPEMGISGQLTWTRLPQGFKNSPTLFNEALHRDLAGFRIQHPDLILLQYVDDLLLAATSELDCQQGTRALLQTLGDLGYRASAKKAQICQKQVKYLGYLLKEGQRWLTEARKETVMGQPIPKTPRQLREFLGTAGFCRLWIPGFAEMAAPLYPLTKPGTLFNWGPDQQKAFQEIKQALLTAPALGLPDLTKPFELFVDEKQGYAKGVLTQKLGPWRRPVAYLSKKLDPVAAGWPPCLRMVAAIAVLTKDAGKLTMGQPLVILAPHAVEALVKQPPDRWLSNARMTHYQALLLDTDRVQFGPVVALNPATLLPLPEEGLQHDCLDILAEAHGTRSDLMDQPLPDADHTWYTDGSSFLQEGQRKAGAAVTTETEVIWARALPAGTSAQRAELIALTQALKMAEGKKLNVYTDSRYAFATAHIHGEIYRRRGWLTSEGKEIKNKDEILALLKALFLPKRLSIIHCPGHQKGNSAEARGNRMADQAAREVATRETPETSTLLAGKRTADGSEFEKRTADGSEFESPKKKAKVE

SEQ ID NO: 2288 - protein, 2094 aa, synthetic construct
MPAAKRVKLDGGDKKYSIGLDIGTNSVGWAVITDEYKVPSKKFKVLGNTDRHSIKKNLIGALLFDSGETAEATRLKRTARRRYTRRKNRICYLQEIFSNEMAKVDDSFFHRLEESFLVEEDKKHERHPIFGNIVDEVAYHEKYPTIYHLRKKLVDSTDKADLRLIYLALAHMIKFRGHFLIEGDLNPDNSDVDKLFIQLVQTYNQLFEENPINASGVDAKAILSARLSKSRRLENLIAQLPGEKKNGLFGNLIALSLGLTPNFKSNFDLAEDAKLQLSKDTYDDDLDNLLAQIGDQYADLFLAAKNLSDAILLSDILRVNTEITKAPLSASMIKRYDEHHQDLTLLKALVRQQLPEKYKEIFFDQSKNGYAGYIDGGASQEEFYKFIKPILEKMDGTEELLVKLNREDLLRKQRTFDNGSIPHQIHLGELHAILRRQEDFYPFLKDNREKIEKILTFRIPYYVGPLARGNSRFAWMTRKSEETITPWNFEEVVDKGASAQSFIERMTNFDKNLPNEKVLPKHSLLYEYFTVYNELTKVKYVTEGMRKPAFLSGEQKKAIVDLLFKTNRKVTVKQLKEDYFKKIECFDSVEISGVEDRFNASLGTYHDLLKIIKDKDFLDNEENEDILEDIVLTLTLFEDREMIEERLKTYAHLFDDKVMKQLKRRRYTGWGRLSRKLINGIRDKQSGKTILDFLKSDGFANRNFMQLIHDDSLTFKEDIQKAQVSGQGDSLHEHIANLAGSPAIKKGILQTVKVVDELVKVMGRHKPENIVIEMARENQTTQKGQKNSRERMKRIEEGIKELGSQILKEHPVENTQLQNEKLYLYYLQNGRDMYVDQELDINRLSDYDVDHIVPQSFLKDDSIDNKVLTRSDKARGKSDNVPSEEVVKKMKNYWRQLLNAKLITQRKFDNLTKAERGGLSELDKAGFIKRQLVETRQITKHVAQILDSRMNTKYDENDKLIREVKVITLKSKLVSDFRKDFQFYKVREINNYHHAHDAYLNAVVGTALIKKYPKLESEFVYGDYKVYDVRKMIAKSEQEIGKATAKYFFYSNIMNFFKTEITLANGEIRKRPLIETNGETGEIVWDKGRDFATVRKVLSMPQVNIVKKTEVQTGGFSKESILPKRNSDKLIARKKDWDPKKYGGFDSPTVAYSVLVVAKVEKGKSKKLKSVKELLGITIMERSSFEKNPIDFLEAKGYKEVKKDLIIKLPKYSLFELENGRKRMLASAGELQKGNELALPSKYVNFLYLASHYEKLKGSPEDNEQKQLFVEQHKHYLDEIIEQISEFSKRVILADANLDKVLSAYNKHRDKPIREQAENIIHLFTLTNLGAPAAFKYFDTTIDRKRYTSTKEVLDATLIHQSITGLYETRIDLSQLGGDGGGSSPAPGGSGGTLNIEDEYRLHETSKEPDVSLGSTWLSDFPQAWAETGGMGLAVRQAPLIIPLKATSTPVSIKQYPMSQEARLGIKPHIQRLLDQGILVPCQSPWNTPLLPVKKPGTNDYRPVQDLREVNKRVEDIHPTVPNPYNLLSGLPPSHQWYTVLDLKDAFFCLRLHPTSQPLFAFEWRDPEMGISGQLTWTRLPQGFKNSPTLFNEALHRDLAGFRIQHPDLILLQYVDDLLLAATSELDCQQGTRALLQTLGDLGYRASAKKAQICQKQVKYLGYLLKEGQRWLTEARKETVMGQPIPKTPRQLREFLGTAGFCRLWIPGFAEMAAPLYPLTKPGTLFNWGPDQQKAFQEIKQALLTAPALGLPDLTKPFELFVDEKQGYAKGVLTQKLGPWRRPVAYLSKKLDPVAAGWPPCLRMVAAIAVLTKDAGKLTMGQPLVILAPHAVEALVKQPPDRWLSNARMTHYQALLLDTDRVQFGPVVALNPATLLPLPEEGLQHDCLDILAEAHGTRSDLMDQPLPDADHTWYTDGSSFLQEGQRKAGAAVTTETEVIWARALPAGTSAQRAELIALTQALKMAEGKKLNVYTDSRYAFATAHIHGEIYRRRGWLTSEGKEIKNKDEILALLKALFLPKRLSIIHCPGHQKGNSAEARGNRMADQAAREVATRETPETSTLLAGKRTADGSEFEKRTADGSEFESPKKKAKVE

SEQ ID NO: 2289 - protein, 2096 aa, synthetic construct
MPAAKRVKLDGGDKKYSIGLDIGTNSVGWAVITDEYKVPSKKFKVLGNTDRHSIKKNLIGALLFDSGETAEATRLKRTARRRYTRRKNRICYLQEIFSNEMAKVDDSFFHRLEESFLVEEDKKHERHPIFGNIVDEVAYHEKYPTIYHLRKKLVDSTDKADLRLIYLALAHMIKFRGHFLIEGDLNPDNSDVDKLFIQLVQTYNQLFEENPINASGVDAKAILSARLSKSRRLENLIAQLPGEKKNGLFGNLIALSLGLTPNFKSNFDLAEDAKLQLSKDTYDDDLDNLLAQIGDQYADLFLAAKNLSDAILLSDILRVNTEITKAPLSASMIKRYDEHHQDLTLLKALVRQQLPEKYKEIFFDQSKNGYAGYIDGGASQEEFYKFIKPILEKMDGTEELLVKLNREDLLRKQRTFDNGSIPHQIHLGELHAILRRQEDFYPFLKDNREKIEKILTFRIPYYVGPLARGNSRFAWMTRKSEETITPWNFEEVVDKGASAQSFIERMTNFDKNLPNEKVLPKHSLLYEYFTVYNELTKVKYVTEGMRKPAFLSGEQKKAIVDLLFKTNRKVTVKQLKEDYFKKIECFDSVEISGVEDRFNASLGTYHDLLKIIKDKDFLDNEENEDILEDIVLTLTLFEDREMIEERLKTYAHLFDDKVMKQLKRRRYTGWGRLSRKLINGIRDKQSGKTILDFLKSDGFANRNFMQLIHDDSLTFKEDIQKAQVSGQGDSLHEHIANLAGSPAIKKGILQTVKVVDELVKVMGRHKPENIVIEMARENQTTQKGQKNSRERMKRIEEGIKELGSQILKEHPVENTQLQNEKLYLYYLQNGRDMYVDQELDINRLSDYDVDHIVPQSFLKDDSIDNKVLTRSDKARGKSDNVPSEEVVKKMKNYWRQLLNAKLITQRKFDNLTKAERGGLSELDKAGFIKRQLVETRQITKHVAQILDSRMNTKYDENDKLIREVKVITLKSKLVSDFRKDFQFYKVREINNYHHAHDAYLNAVVGTALIKKYPKLESEFVYGDYKVYDVRKMIAKSEQEIGKATAKYFFYSNIMNFFKTEITLANGEIRKRPLIETNGETGEIVWDKGRDFATVRKVLSMPQVNIVKKTEVQTGGFSKESILPKRNSDKLIARKKDWDPKKYGGFDSPTVAYSVLVVAKVEKGKSKKLKSVKELLGITIMERSSFEKNPIDFLEAKGYKEVKKDLIIKLPKYSLFELENGRKRMLASAGELQKGNELALPSKYVNFLYLASHYEKLKGSPEDNEQKQLFVEQHKHYLDEIIEQISEFSKRVILADANLDKVLSAYNKHRDKPIREQAENIIHLFTLTNLGAPAAFKYFDTTIDRKRYTSTKEVLDATLIHQSITGLYETRIDLSQLGGDGGGSSEAAAKGGGGGTLNIEDEYRLHETSKEPDVSLGSTWLSDFPQAWAETGGMGLAVRQAPLIIPLKATSTPVSIKQYPMSQEARLGIKPHIQRLLDQGILVPCQSPWNTPLLPVKKPGTNDYRPVQDLREVNKRVEDIHPTVPNPYNLLSGLPPSHQWYTVLDLKDAFFCLRLHPTSQPLFAFEWRDPEMGISGQLTWTRLPQGFKNSPTLFNEALHRDLAGFRIQHPDLILLQYVDDLLLAATSELDCQQGTRALLQTLGDLGYRASAKKAQICQKQVKYLGYLLKEGQRWLTEARKETVMGQPIPKTPRQLREFLGTAGFCRLWIPGFAEMAAPLYPLTKPGTLFNWGPDQQKAFQEIKQALLTAPALGLPDLTKPFELFVDEKQGYAKGVLTQKLGPWRRPVAYLSKKLDPVAAGWPPCLRMVAAIAVLTKDAGKLTMGQPLVILAPHAVEALVKQPPDRWLSNARMTHYQALLLDTDRVQFGPVVALNPATLLPLPEEGLQHDCLDILAEAHGTRSDLMDQPLPDADHTWYTDGSSFLQEGQRKAGAAVTTETEVIWARALPAGTSAQRAELIALTQALKMAEGKKLNVYTDSRYAFATAHIHGEIYRRRGWLTSEGKEIKNKDEILALLKALFLPKRLSIIHCPGHQKGNSAEARGNRMADQAAREVATRETPETSTLLAGKRTADGSEFEKRTADGSEFESPKKKAKVE

SEQ ID NO: 2290 - protein, 2094 aa, synthetic construct
MPAAKRVKLDGGDKKYSIGLDIGTNSVGWAVITDEYKVPSKKFKVLGNTDRHSIKKNLIGALLFDSGETAEATRLKRTARRRYTRRKNRICYLQEIFSNEMAKVDDSFFHRLEESFLVEEDKKHERHPIFGNIVDEVAYHEKYPTIYHLRKKLVDSTDKADLRLIYLALAHMIKFRGHFLIEGDLNPDNSDVDKLFIQLVQTYNQLFEENPINASGVDAKAILSARLSKSRRLENLIAQLPGEKKNGLFGNLIALSLGLTPNFKSNFDLAEDAKLQLSKDTYDDDLDNLLAQIGDQYADLFLAAKNLSDAILLSDILRVNTEITKAPLSASMIKRYDEHHQDLTLLKALVRQQLPEKYKEIFFDQSKNGYAGYIDGGASQEEFYKFIKPILEKMDGTEELLVKLNREDLLRKQRTFDNGSIPHQIHLGELHAILRRQEDFYPFLKDNREKIEKILTFRIPYYVGPLARGNSRFAWMTRKSEETITPWNFEEVVDKGASAQSFIERMTNFDKNLPNEKVLPKHSLLYEYFTVYNELTKVKYVTEGMRKPAFLSGEQKKAIVDLLFKTNRKVTVKQLKEDYFKKIECFDSVEISGVEDRFNASLGTYHDLLKIIKDKDFLDNEENEDILEDIVLTLTLFEDREMIEERLKTYAHLFDDKVMKQLKRRRYTGWGRLSRKLINGIRDKQSGKTILDFLKSDGFANRNFMQLIHDDSLTFKEDIQKAQVSGQGDSLHEHIANLAGSPAIKKGILQTVKVVDELVKVMGRHKPENIVIEMARENQTTQKGQKNSRERMKRIEEGIKELGSQILKEHPVENTQLQNEKLYLYYLQNGRDMYVDQELDINRLSDYDVDHIVPQSFLKDDSIDNKVLTRSDKARGKSDNVPSEEVVKKMKNYWRQLLNAKLITQRKFDNLTKAERGGLSELDKAGFIKRQLVETRQITKHVAQILDSRMNTKYDENDKLIREVKVITLKSKLVSDFRKDFQFYKVREINNYHHAHDAYLNAVVGTALIKKYPKLESEFVYGDYKVYDVRKMIAKSEQEIGKATAKYFFYSNIMNFFKTEITLANGEIRKRPLIETNGETGEIVWDKGRDFATVRKVLSMPQVNIVKKTEVQTGGFSKESILPKRNSDKLIARKKDWDPKKYGGFDSPTVAYSVLVVAKVEKGKSKKLKSVKELLGITIMERSSFEKNPIDFLEAKGYKEVKKDLIIKLPKYSLFELENGRKRMLASAGELQKGNELALPSKYVNFLYLASHYEKLKGSPEDNEQKQLFVEQHKHYLDEIIEQISEFSKRVILADANLDKVLSAYNKHRDKPIREQAENIIHLFTLTNLGAPAAFKYFDTTIDRKRYTSTKEVLDATLIHQSITGLYETRIDLSQLGGDGGGGGPAPGGSGGTLNIEDEYRLHETSKEPDVSLGSTWLSDFPQAWAETGGMGLAVRQAPLIIPLKATSTPVSIKQYPMSQEARLGIKPHIQRLLDQGILVPCQSPWNTPLLPVKKPGTNDYRPVQDLREVNKRVEDIHPTVPNPYNLLSGLPPSHQWYTVLDLKDAFFCLRLHPTSQPLFAFEWRDPEMGISGQLTWTRLPQGFKNSPTLFNEALHRDLAGFRIQHPDLILLQYVDDLLLAATSELDCQQGTRALLQTLGDLGYRASAKKAQICQKQVKYLGYLLKEGQRWLTEARKETVMGQPIPKTPRQLREFLGTAGFCRLWIPGFAEMAAPLYPLTKPGTLFNWGPDQQKAFQEIKQALLTAPALGLPDLTKPFELFVDEKQGYAKGVLTQKLGPWRRPVAYLSKKLDPVAAGWPPCLRMVAAIAVLTKDAGKLTMGQPLVILAPHAVEALVKQPPDRWLSNARMTHYQALLLDTDRVQFGPVVALNPATLLPLPEEGLQHDCLDILAEAHGTRSDLMDQPLPDADHTWYTDGSSFLQEGQRKAGAAVTTETEVIWARALPAGTSAQRAELIALTQALKMAEGKKLNVYTDSRYAFATAHIHGEIYRRRGWLTSEGKEIKNKDEILALLKALFLPKRLSIIHCPGHQKGNSAEARGNRMADQAAREVATRETPETSTLLAGKRTADGSEFEKRTADGSEFESPKKKAKVE

SEQ ID NO: 2291 - protein, 2097 aa, synthetic construct
MPAAKRVKLDGGDKKYSIGLDIGTNSVGWAVITDEYKVPSKKFKVLGNTDRHSIKKNLIGALLFDSGETAEATRLKRTARRRYTRRKNRICYLQEIFSNEMAKVDDSFFHRLEESFLVEEDKKHERHPIFGNIVDEVAYHEKYPTIYHLRKKLVDSTDKADLRLIYLALAHMIKFRGHFLIEGDLNPDNSDVDKLFIQLVQTYNQLFEENPINASGVDAKAILSARLSKSRRLENLIAQLPGEKKNGLFGNLIALSLGLTPNFKSNFDLAEDAKLQLSKDTYDDDLDNLLAQIGDQYADLFLAAKNLSDAILLSDILRVNTEITKAPLSASMIKRYDEHHQDLTLLKALVRQQLPEKYKEIFFDQSKNGYAGYIDGGASQEEFYKFIKPILEKMDGTEELLVKLNREDLLRKQRTFDNGSIPHQIHLGELHAILRRQEDFYPFLKDNREKIEKILTFRIPYYVGPLARGNSRFAWMTRKSEETITPWNFEEVVDKGASAQSFIERMTNFDKNLPNEKVLPKHSLLYEYFTVYNELTKVKYVTEGMRKPAFLSGEQKKAIVDLLFKTNRKVTVKQLKEDYFKKIECFDSVEISGVEDRFNASLGTYHDLLKIIKDKDFLDNEENEDILEDIVLTLTLFEDREMIEERLKTYAHLFDDKVMKQLKRRRYTGWGRLSRKLINGIRDKQSGKTILDFLKSDGFANRNFMQLIHDDSLTFKEDIQKAQVSGQGDSLHEHIANLAGSPAIKKGILQTVKVVDELVKVMGRHKPENIVIEMARENQTTQKGQKNSRERMKRIEEGIKELGSQILKEHPVENTQLQNEKLYLYYLQNGRDMYVDQELDINRLSDYDVDHIVPQSFLKDDSIDNKVLTRSDKARGKSDNVPSEEVVKKMKNYWRQLLNAKLITQRKFDNLTKAERGGLSELDKAGFIKRQLVETRQITKHVAQILDSRMNTKYDENDKLIREVKVITLKSKLVSDFRKDFQFYKVREINNYHHAHDAYLNAVVGTALIKKYPKLESEFVYGDYKVYDVRKMIAKSEQEIGKATAKYFFYSNIMNFFKTEITLANGEIRKRPLIETNGETGEIVWDKGRDFATVRKVLSMPQVNIVKKTEVQTGGFSKESILPKRNSDKLIARKKDWDPKKYGGFDSPTVAYSVLVVAKVEKGKSKKLKSVKELLGITIMERSSFEKNPIDFLEAKGYKEVKKDLIIKLPKYSLFELENGRKRMLASAGELQKGNELALPSKYVNFLYLASHYEKLKGSPEDNEQKQLFVEQHKHYLDEIIEQISEFSKRVILADANLDKVLSAYNKHRDKPIREQAENIIHLFTLTNLGAPAAFKYFDTTIDRKRYTSTKEVLDATLIHQSITGLYETRIDLSQLGGDGGGSSGSSGSSGSSGGTLNIEDEYRLHETSKEPDVSLGSTWLSDFPQAWAETGGMGLAVRQAPLIIPLKATSTPVSIKQYPMSQEARLGIKPHIQRLLDQGILVPCQSPWNTPLLPVKKPGTNDYRPVQDLREVNKRVEDIHPTVPNPYNLLSGLPPSHQWYTVLDLKDAFFCLRLHPTSQPLFAFEWRDPEMGISGQLTWTRLPQGFKNSPTLFNEALHRDLAGFRIQHPDLILLQYVDDLLLAATSELDCQQGTRALLQTLGDLGYRASAKKAQICQKQVKYLGYLLKEGQRWLTEARKETVMGQPIPKTPRQLREFLGTAGFCRLWIPGFAEMAAPLYPLTKPGTLFNWGPDQQKAFQEIKQALLTAPALGLPDLTKPFELFVDEKQGYAKGVLTQKLGPWRRPVAYLSKKLDPVAAGWPPCLRMVAAIAVLTKDAGKLTMGQPLVILAPHAVEALVKQPPDRWLSNARMTHYQALLLDTDRVQFGPVVALNPATLLPLPEEGLQHDCLDILAEAHGTRSDLMDQPLPDADHTWYTDGSSFLQEGQRKAGAAVTTETEVIWARALPAGTSAQRAELIALTQALKMAEGKKLNVYTDSRYAFATAHIHGEIYRRRGWLTSEGKEIKNKDEILALLKALFLPKRLSIIHCPGHQKGNSAEARGNRMADQAAREVATRETPETSTLLAGKRTADGSEFEKRTADGSEFESPKKKAKVE

SEQ ID NO: 2292 - protein, 2096 aa, synthetic construct
MPAAKRVKLDGGDKKYSIGLDIGTNSVGWAVITDEYKVPSKKFKVLGNTDRHSIKKNLIGALLFDSGETAEATRLKRTARRRYTRRKNRICYLQEIFSNEMAKVDDSFFHRLEESFLVEEDKKHERHPIFGNIVDEVAYHEKYPTIYHLRKKLVDSTDKADLRLIYLALAHMIKFRGHFLIEGDLNPDNSDVDKLFIQLVQTYNQLFEENPINASGVDAKAILSARLSKSRRLENLIAQLPGEKKNGLFGNLIALSLGLTPNFKSNFDLAEDAKLQLSKDTYDDDLDNLLAQIGDQYADLFLAAKNLSDAILLSDILRVNTEITKAPLSASMIKRYDEHHQDLTLLKALVRQQLPEKYKEIFFDQSKNGYAGYIDGGASQEEFYKFIKPILEKMDGTEELLVKLNREDLLRKQRTFDNGSIPHQIHLGELHAILRRQEDFYPFLKDNREKIEKILTFRIPYYVGPLARGNSRFAWMTRKSEETITPWNFEEVVDKGASAQSFIERMTNFDKNLPNEKVLPKHSLLYEYFTVYNELTKVKYVTEGMRKPAFLSGEQKKAIVDLLFKTNRKVTVKQLKEDYFKKIECFDSVEISGVEDRFNASLGTYHDLLKIIKDKDFLDNEENEDILEDIVLTLTLFEDREMIEERLKTYAHLFDDKVMKQLKRRRYTGWGRLSRKLINGIRDKQSGKTILDFLKSDGFANRNFMQLIHDDSLTFKEDIQKAQVSGQGDSLHEHIANLAGSPAIKKGILQTVKVVDELVKVMGRHKPENIVIEMARENQTTQKGQKNSRERMKRIEEGIKELGSQILKEHPVENTQLQNEKLYLYYLQNGRDMYVDQELDINRLSDYDVDHIVPQSFLKDDSIDNKVLTRSDKARGKSDNVPSEEVVKKMKNYWRQLLNAKLITQRKFDNLTKAERGGLSELDKAGFIKRQLVETRQITKHVAQILDSRMNTKYDENDKLIREVKVITLKSKLVSDFRKDFQFYKVREINNYHHAHDAYLNAVVGTALIKKYPKLESEFVYGDYKVYDVRKMIAKSEQEIGKATAKYFFYSNIMNFFKTEITLANGEIRKRPLIETNGETGEIVWDKGRDFATVRKVLSMPQVNIVKKTEVQTGGFSKESILPKRNSDKLIARKKDWDPKKYGGFDSPTVAYSVLVVAKVEKGKSKKLKSVKELLGITIMERSSFEKNPIDFLEAKGYKEVKKDLIIKLPKYSLFELENGRKRMLASAGELQKGNELALPSKYVNFLYLASHYEKLKGSPEDNEQKQLFVEQHKHYLDEIIEQISEFSKRVILADANLDKVLSAYNKHRDKPIREQAENIIHLFTLTNLGAPAAFKYFDTTIDRKRYTSTKEVLDATLIHQSITGLYETRIDLSQLGGDGGGSSGGGEAAAKGGTLNIEDEYRLHETSKEPDVSLGSTWLSDFPQAWAETGGMGLAVRQAPLIIPLKATSTPVSIKQYPMSQEARLGIKPHIQRLLDQGILVPCQSPWNTPLLPVKKPGTNDYRPVQDLREVNKRVEDIHPTVPNPYNLLSGLPPSHQWYTVLDLKDAFFCLRLHPTSQPLFAFEWRDPEMGISGQLTWTRLPQGFKNSPTLFNEALHRDLAGFRIQHPDLILLQYVDDLLLAATSELDCQQGTRALLQTLGDLGYRASAKKAQICQKQVKYLGYLLKEGQRWLTEARKETVMGQPIPKTPRQLREFLGTAGFCRLWIPGFAEMAAPLYPLTKPGTLFNWGPDQQKAFQEIKQALLTAPALGLPDLTKPFELFVDEKQGYAKGVLTQKLGPWRRPVAYLSKKLDPVAAGWPPCLRMVAAIAVLTKDAGKLTMGQPLVILAPHAVEALVKQPPDRWLSNARMTHYQALLLDTDRVQFGPVVALNPATLLPLPEEGLQHDCLDILAEAHGTRSDLMDQPLPDADHTWYTDGSSFLQEGQRKAGAAVTTETEVIWARALPAGTSAQRAELIALTQALKMAEGKKLNVYTDSRYAFATAHIHGEIYRRRGWLTSEGKEIKNKDEILALLKALFLPKRLSIIHCPGHQKGNSAEARGNRMADQAAREVATRETPETSTLLAGKRTADGSEFEKRTADGSEFESPKKKAKVE

SEQ ID NO: 2293 - protein, 2094 aa, synthetic construct
MPAAKRVKLDGGDKKYSIGLDIGTNSVGWAVITDEYKVPSKKFKVLGNTDRHSIKKNLIGALLFDSGETAEATRLKRTARRRYTRRKNRICYLQEIFSNEMAKVDDSFFHRLEESFLVEEDKKHERHPIFGNIVDEVAYHEKYPTIYHLRKKLVDSTDKADLRLIYLALAHMIKFRGHFLIEGDLNPDNSDVDKLFIQLVQTYNQLFEENPINASGVDAKAILSARLSKSRRLENLIAQLPGEKKNGLFGNLIALSLGLTPNFKSNFDLAEDAKLQLSKDTYDDDLDNLLAQIGDQYADLFLAAKNLSDAILLSDILRVNTEITKAPLSASMIKRYDEHHQDLTLLKALVRQQLPEKYKEIFFDQSKNGYAGYIDGGASQEEFYKFIKPILEKMDGTEELLVKLNREDLLRKQRTFDNGSIPHQIHLGELHAILRRQEDFYPFLKDNREKIEKILTFRIPYYVGPLARGNSRFAWMTRKSEETITPWNFEEVVDKGASAQSFIERMTNFDKNLPNEKVLPKHSLLYEYFTVYNELTKVKYVTEGMRKPAFLSGEQKKAIVDLLFKTNRKVTVKQLKEDYFKKIECFDSVEISGVEDRFNASLGTYHDLLKIIKDKDFLDNEENEDILEDIVLTLTLFEDREMIEERLKTYAHLFDDKVMKQLKRRRYTGWGRLSRKLINGIRDKQSGKTILDFLKSDGFANRNFMQLIHDDSLTFKEDIQKAQVSGQGDSLHEHIANLAGSPAIKKGILQTVKVVDELVKVMGRHKPENIVIEMARENQTTQKGQKNSRERMKRIEEGIKELGSQILKEHPVENTQLQNEKLYLYYLQNGRDMYVDQELDINRLSDYDVDHIVPQSFLKDDSIDNKVLTRSDKARGKSDNVPSEEVVKKMKNYWRQLLNAKLITQRKFDNLTKAERGGLSELDKAGFIKRQLVETRQITKHVAQILDSRMNTKYDENDKLIREVKVITLKSKLVSDFRKDFQFYKVREINNYHHAHDAYLNAVVGTALIKKYPKLESEFVYGDYKVYDVRKMIAKSEQEIGKATAKYFFYSNIMNFFKTEITLANGEIRKRPLIETNGETGEIVWDKGRDFATVRKVLSMPQVNIVKKTEVQTGGFSKESILPKRNSDKLIARKKDWDPKKYGGFDSPTVAYSVLVVAKVEKGKSKKLKSVKELLGITIMERSSFEKNPIDFLEAKGYKEVKKDLIIKLPKYSLFELENGRKRMLASAGELQKGNELALPSKYVNFLYLASHYEKLKGSPEDNEQKQLFVEQHKHYLDEIIEQISEFSKRVILADANLDKVLSAYNKHRDKPIREQAENIIHLFTLTNLGAPAAFKYFDTTIDRKRYTSTKEVLDATLIHQSITGLYETRIDLSQLGGDGGGGSGSSGGGGGTLNIEDEYRLHETSKEPDVSLGSTWLSDFPQAWAETGGMGLAVRQAPLIIPLKATSTPVSIKQYPMSQEARLGIKPHIQRLLDQGILVPCQSPWNTPLLPVKKPGTNDYRPVQDLREVNKRVEDIHPTVPNPYNLLSGLPPSHQWYTVLDLKDAFFCLRLHPTSQPLFAFEWRDPEMGISGQLTWTRLPQGFKNSPTLFNEALHRDLAGFRIQHPDLILLQYVDDLLLAATSELDCQQGTRALLQTLGDLGYRASAKKAQICQKQVKYLGYLLKEGQRWLTEARKETVMGQPIPKTPRQLREFLGTAGFCRLWIPGFAEMAAPLYPLTKPGTLFNWGPDQQKAFQEIKQALLTAPALGLPDLTKPFELFVDEKQGYAKGVLTQKLGPWRRPVAYLSKKLDPVAAGWPPCLRMVAAIAVLTKDAGKLTMGQPLVILAPHAVEALVKQPPDRWLSNARMTHYQALLLDTDRVQFGPVVALNPATLLPLPEEGLQHDCLDILAEAHGTRSDLMDQPLPDADHTWYTDGSSFLQEGQRKAGAAVTTETEVIWARALPAGTSAQRAELIALTQALKMAEGKKLNVYTDSRYAFATAHIHGEIYRRRGWLTSEGKEIKNKDEILALLKALFLPKRLSIIHCPGHQKGNSAEARGNRMADQAAREVATRETPETSTLLAGKRTADGSEFEKRTADGSEFESPKKKAKVE

SEQ ID NO: 2294 - protein, 2092 aa, synthetic construct
MPAAKRVKLDGGDKKYSIGLDIGTNSVGWAVITDEYKVPSKKFKVLGNTDRHSIKKNLIGALLFDSGETAEATRLKRTARRRYTRRKNRICYLQEIFSNEMAKVDDSFFHRLEESFLVEEDKKHERHPIFGNIVDEVAYHEKYPTIYHLRKKLVDSTDKADLRLIYLALAHMIKFRGHFLIEGDLNPDNSDVDKLFIQLVQTYNQLFEENPINASGVDAKAILSARLSKSRRLENLIAQLPGEKKNGLFGNLIALSLGLTPNFKSNFDLAEDAKLQLSKDTYDDDLDNLLAQIGDQYADLFLAAKNLSDAILLSDILRVNTEITKAPLSASMIKRYDEHHQDLTLLKALVRQQLPEKYKEIFFDQSKNGYAGYIDGGASQEEFYKFIKPILEKMDGTEELLVKLNREDLLRKQRTFDNGSIPHQIHLGELHAILRRQEDFYPFLKDNREKIEKILTFRIPYYVGPLARGNSRFAWMTRKSEETITPWNFEEVVDKGASAQSFIERMTNFDKNLPNEKVLPKHSLLYEYFTVYNELTKVKYVTEGMRKPAFLSGEQKKAIVDLLFKTNRKVTVKQLKEDYFKKIECFDSVEISGVEDRFNASLGTYHDLLKIIKDKDFLDNEENEDILEDIVLTLTLFEDREMIEERLKTYAHLFDDKVMKQLKRRRYTGWGRLSRKLINGIRDKQSGKTILDFLKSDGFANRNFMQLIHDDSLTFKEDIQKAQVSGQGDSLHEHIANLAGSPAIKKGILQTVKVVDELVKVMGRHKPENIVIEMARENQTTQKGQKNSRERMKRIEEGIKELGSQILKEHPVENTQLQNEKLYLYYLQNGRDMYVDQELDINRLSDYDVDHIVPQSFLKDDSIDNKVLTRSDKARGKSDNVPSEEVVKKMKNYWRQLLNAKLITQRKFDNLTKAERGGLSELDKAGFIKRQLVETRQITKHVAQILDSRMNTKYDENDKLIREVKVITLKSKLVSDFRKDFQFYKVREINNYHHAHDAYLNAVVGTALIKKYPKLESEFVYGDYKVYDVRKMIAKSEQEIGKATAKYFFYSNIMNFFKTEITLANGEIRKRPLIETNGETGEIVWDKGRDFATVRKVLSMPQVNIVKKTEVQTGGFSKESILPKRNSDKLIARKKDWDPKKYGGFDSPTVAYSVLVVAKVEKGKSKKLKSVKELLGITIMERSSFEKNPIDFLEAKGYKEVKKDLIIKLPKYSLFELENGRKRMLASAGELQKGNELALPSKYVNFLYLASHYEKLKGSPEDNEQKQLFVEQHKHYLDEIIEQISEFSKRVILADANLDKVLSAYNKHRDKPIREQAENIIHLFTLTNLGAPAAFKYFDTTIDRKRYTSTKEVLDATLIHQSITGLYETRIDLSQLGGDGGPAPAPAPGGTLNIEDEYRLHETSKEPDVSLGSTWLSDFPQAWAETGGMGLAVRQAPLIIPLKATSTPVSIKQYPMSQEARLGIKPHIQRLLDQGILVPCQSPWNTPLLPVKKPGTNDYRPVQDLREVNKRVEDIHPTVPNPYNLLSGLPPSHQWYTVLDLKDAFFCLRLHPTSQPLFAFEWRDPEMGISGQLTWTRLPQGFKNSPTLFNEALHRDLAGFRIQHPDLILLQYVDDLLLAATSELDCQQGTRALLQTLGDLGYRASAKKAQICQKQVKYLGYLLKEGQRWLTEARKETVMGQPIPKTPRQLREFLGTAGFCRLWIPGFAEMAAPLYPLTKPGTLFNWGPDQQKAFQEIKQALLTAPALGLPDLTKPFELFVDEKQGYAKGVLTQKLGPWRRPVAYLSKKLDPVAAGWPPCLRMVAAIAVLTKDAGKLTMGQPLVILAPHAVEALVKQPPDRWLSNARMTHYQALLLDTDRVQFGPVVALNPATLLPLPEEGLQHDCLDILAEAHGTRSDLMDQPLPDADHTWYTDGSSFLQEGQRKAGAAVTTETEVIWARALPAGTSAQRAELIALTQALKMAEGKKLNVYTDSRYAFATAHIHGEIYRRRGWLTSEGKEIKNKDEILALLKALFLPKRLSIIHCPGHQKGNSAEARGNRMADQAAREVATRETPETSTLLAGKRTADGSEFEKRTADGSEFESPKKKAKVE

SEQ ID NO: 2295 - protein, 2094 aa, synthetic construct
MPAAKRVKLDGGDKKYSIGLDIGTNSVGWAVITDEYKVPSKKFKVLGNTDRHSIKKNLIGALLFDSGETAEATRLKRTARRRYTRRKNRICYLQEIFSNEMAKVDDSFFHRLEESFLVEEDKKHERHPIFGNIVDEVAYHEKYPTIYHLRKKLVDSTDKADLRLIYLALAHMIKFRGHFLIEGDLNPDNSDVDKLFIQLVQTYNQLFEENPINASGVDAKAILSARLSKSRRLENLIAQLPGEKKNGLFGNLIALSLGLTPNFKSNFDLAEDAKLQLSKDTYDDDLDNLLAQIGDQYADLFLAAKNLSDAILLSDILRVNTEITKAPLSASMIKRYDEHHQDLTLLKALVRQQLPEKYKEIFFDQSKNGYAGYIDGGASQEEFYKFIKPILEKMDGTEELLVKLNREDLLRKQRTFDNGSIPHQIHLGELHAILRRQEDFYPFLKDNREKIEKILTFRIPYYVGPLARGNSRFAWMTRKSEETITPWNFEEVVDKGASAQSFIERMTNFDKNLPNEKVLPKHSLLYEYFTVYNELTKVKYVTEGMRKPAFLSGEQKKAIVDLLFKTNRKVTVKQLKEDYFKKIECFDSVEISGVEDRFNASLGTYHDLLKIIKDKDFLDNEENEDILEDIVLTLTLFEDREMIEERLKTYAHLFDDKVMKQLKRRRYTGWGRLSRKLINGIRDKQSGKTILDFLKSDGFANRNFMQLIHDDSLTFKEDIQKAQVSGQGDSLHEHIANLAGSPAIKKGILQTVKVVDELVKVMGRHKPENIVIEMARENQTTQKGQKNSRERMKRIEEGIKELGSQILKEHPVENTQLQNEKLYLYYLQNGRDMYVDQELDINRLSDYDVDHIVPQSFLKDDSIDNKVLTRSDKARGKSDNVPSEEVVKKMKNYWRQLLNAKLITQRKFDNLTKAERGGLSELDKAGFIKRQLVETRQITKHVAQILDSRMNTKYDENDKLIREVKVITLKSKLVSDFRKDFQFYKVREINNYHHAHDAYLNAVVGTALIKKYPKLESEFVYGDYKVYDVRKMIAKSEQEIGKATAKYFFYSNIMNFFKTEITLANGEIRKRPLIETNGETGEIVWDKGRDFATVRKVLSMPQVNIVKKTEVQTGGFSKESILPKRNSDKLIARKKDWDPKKYGGFDSPTVAYSVLVVAKVEKGKSKKLKSVKELLGITIMERSSFEKNPIDFLEAKGYKEVKKDLIIKLPKYSLFELENGRKRMLASAGELQKGNELALPSKYVNFLYLASHYEKLKGSPEDNEQKQLFVEQHKHYLDEIIEQISEFSKRVILADANLDKVLSAYNKHRDKPIREQAENIIHLFTLTNLGAPAAFKYFDTTIDRKRYTSTKEVLDATLIHQSITGLYETRIDLSQLGGDGGPAPAPAPAPGGTLNIEDEYRLHETSKEPDVSLGSTWLSDFPQAWAETGGMGLAVRQAPLIIPLKATSTPVSIKQYPMSQEARLGIKPHIQRLLDQGILVPCQSPWNTPLLPVKKPGTNDYRPVQDLREVNKRVEDIHPTVPNPYNLLSGLPPSHQWYTVLDLKDAFFCLRLHPTSQPLFAFEWRDPEMGISGQLTWTRLPQGFKNSPTLFNEALHRDLAGFRIQHPDLILLQYVDDLLLAATSELDCQQGTRALLQTLGDLGYRASAKKAQICQKQVKYLGYLLKEGQRWLTEARKETVMGQPIPKTPRQLREFLGTAGFCRLWIPGFAEMAAPLYPLTKPGTLFNWGPDQQKAFQEIKQALLTAPALGLPDLTKPFELFVDEKQGYAKGVLTQKLGPWRRPVAYLSKKLDPVAAGWPPCLRMVAAIAVLTKDAGKLTMGQPLVILAPHAVEALVKQPPDRWLSNARMTHYQALLLDTDRVQFGPVVALNPATLLPLPEEGLQHDCLDILAEAHGTRSDLMDQPLPDADHTWYTDGSSFLQEGQRKAGAAVTTETEVIWARALPAGTSAQRAELIALTQALKMAEGKKLNVYTDSRYAFATAHIHGEIYRRRGWLTSEGKEIKNKDEILALLKALFLPKRLSIIHCPGHQKGNSAEARGNRMADQAAREVATRETPETSTLLAGKRTADGSEFEKRTADGSEFESPKKKAKVE

SEQ ID NO: 2296 - protein, 2096 aa, synthetic construct
MPAAKRVKLDGGDKKYSIGLDIGTNSVGWAVITDEYKVPSKKFKVLGNTDRHSIKKNLIGALLFDSGETAEATRLKRTARRRYTRRKNRICYLQEIFSNEMAKVDDSFFHRLEESFLVEEDKKHERHPIFGNIVDEVAYHEKYPTIYHLRKKLVDSTDKADLRLIYLALAHMIKFRGHFLIEGDLNPDNSDVDKLFIQLVQTYNQLFEENPINASGVDAKAILSARLSKSRRLENLIAQLPGEKKNGLFGNLIALSLGLTPNFKSNFDLAEDAKLQLSKDTYDDDLDNLLAQIGDQYADLFLAAKNLSDAILLSDILRVNTEITKAPLSASMIKRYDEHHQDLTLLKALVRQQLPEKYKEIFFDQSKNGYAGYIDGGASQEEFYKFIKPILEKMDGTEELLVKLNREDLLRKQRTFDNGSIPHQIHLGELHAILRRQEDFYPFLKDNREKIEKILTFRIPYYVGPLARGNSRFAWMTRKSEETITPWNFEEVVDKGASAQSFIERMTNFDKNLPNEKVLPKHSLLYEYFTVYNELTKVKYVTEGMRKPAFLSGEQKKAIVDLLFKTNRKVTVKQLKEDYFKKIECFDSVEISGVEDRFNASLGTYHDLLKIIKDKDFLDNEENEDILEDIVLTLTLFEDREMIEERLKTYAHLFDDKVMKQLKRRRYTGWGRLSRKLINGIRDKQSGKTILDFLKSDGFANRNFMQLIHDDSLTFKEDIQKAQVSGQGDSLHEHIANLAGSPAIKKGILQTVKVVDELVKVMGRHKPENIVIEMARENQTTQKGQKNSRERMKRIEEGIKELGSQILKEHPVENTQLQNEKLYLYYLQNGRDMYVDQELDINRLSDYDVDHIVPQSFLKDDSIDNKVLTRSDKARGKSDNVPSEEVVKKMKNYWRQLLNAKLITQRKFDNLTKAERGGLSELDKAGFIKRQLVETRQITKHVAQILDSRMNTKYDENDKLIREVKVITLKSKLVSDFRKDFQFYKVREINNYHHAHDAYLNAVVGTALIKKYPKLESEFVYGDYKVYDVRKMIAKSEQEIGKATAKYFFYSNIMNFFKTEITLANGEIRKRPLIETNGETGEIVWDKGRDFATVRKVLSMPQVNIVKKTEVQTGGFSKESILPKRNSDKLIARKKDWDPKKYGGFDSPTVAYSVLVVAKVEKGKSKKLKSVKELLGITIMERSSFEKNPIDFLEAKGYKEVKKDLIIKLPKYSLFELENGRKRMLASAGELQKGNELALPSKYVNFLYLASHYEKLKGSPEDNEQKQLFVEQHKHYLDEIIEQISEFSKRVILADANLDKVLSAYNKHRDKPIREQAENIIHLFTLTNLGAPAAFKYFDTTIDRKRYTSTKEVLDATLIHQSITGLYETRIDLSQLGGDGGGGSEAAAKGSSGGTLNIEDEYRLHETSKEPDVSLGSTWLSDFPQAWAETGGMGLAVRQAPLIIPLKATSTPVSIKQYPMSQEARLGIKPHIQRLLDQGILVPCQSPWNTPLLPVKKPGTNDYRPVQDLREVNKRVEDIHPTVPNPYNLLSGLPPSHQWYTVLDLKDAFFCLRLHPTSQPLFAFEWRDPEMGISGQLTWTRLPQGFKNSPTLFNEALHRDLAGFRIQHPDLILLQYVDDLLLAATSELDCQQGTRALLQTLGDLGYRASAKKAQICQKQVKYLGYLLKEGQRWLTEARKETVMGQPIPKTPRQLREFLGTAGFCRLWIPGFAEMAAPLYPLTKPGTLFNWGPDQQKAFQEIKQALLTAPALGLPDLTKPFELFVDEKQGYAKGVLTQKLGPWRRPVAYLSKKLDPVAAGWPPCLRMVAAIAVLTKDAGKLTMGQPLVILAPHAVEALVKQPPDRWLSNARMTHYQALLLDTDRVQFGPVVALNPATLLPLPEEGLQHDCLDILAEAHGTRSDLMDQPLPDADHTWYTDGSSFLQEGQRKAGAAVTTETEVIWARALPAGTSAQRAELIALTQALKMAEGKKLNVYTDSRYAFATAHIHGEIYRRRGWLTSEGKEIKNKDEILALLKALFLPKRLSIIHCPGHQKGNSAEARGNRMADQAAREVATRETPETSTLLAGKRTADGSEFEKRTADGSEFESPKKKAKVE

SEQ ID NO: 2297 - protein, 2093 aa, synthetic construct
MPAAKRVKLDGGDKKYSIGLDIGTNSVGWAVITDEYKVPSKKFKVLGNTDRHSIKKNLIGALLFDSGETAEATRLKRTARRRYTRRKNRICYLQEIFSNEMAKVDDSFFHRLEESFLVEEDKKHERHPIFGNIVDEVAYHEKYPTIYHLRKKLVDSTDKADLRLIYLALAHMIKFRGHFLIEGDLNPDNSDVDKLFIQLVQTYNQLFEENPINASGVDAKAILSARLSKSRRLENLIAQLPGEKKNGLFGNLIALSLGLTPNFKSNFDLAEDAKLQLSKDTYDDDLDNLLAQIGDQYADLFLAAKNLSDAILLSDILRVNTEITKAPLSASMIKRYDEHHQDLTLLKALVRQQLPEKYKEIFFDQSKNGYAGYIDGGASQEEFYKFIKPILEKMDGTEELLVKLNREDLLRKQRTFDNGSIPHQIHLGELHAILRRQEDFYPFLKDNREKIEKILTFRIPYYVGPLARGNSRFAWMTRKSEETITPWNFEEVVDKGASAQSFIERMTNFDKNLPNEKVLPKHSLLYEYFTVYNELTKVKYVTEGMRKPAFLSGEQKKAIVDLLFKTNRKVTVKQLKEDYFKKIECFDSVEISGVEDRFNASLGTYHDLLKIIKDKDFLDNEENEDILEDIVLTLTLFEDREMIEERLKTYAHLFDDKVMKQLKRRRYTGWGRLSRKLINGIRDKQSGKTILDFLKSDGFANRNFMQLIHDDSLTFKEDIQKAQVSGQGDSLHEHIANLAGSPAIKKGILQTVKVVDELVKVMGRHKPENIVIEMARENQTTQKGQKNSRERMKRIEEGIKELGSQILKEHPVENTQLQNEKLYLYYLQNGRDMYVDQELDINRLSDYDVDHIVPQSFLKDDSIDNKVLTRSDKARGKSDNVPSEEVVKKMKNYWRQLLNAKLITQRKFDNLTKAERGGLSELDKAGFIKRQLVETRQITKHVAQILDSRMNTKYDENDKLIREVKVITLKSKLVSDFRKDFQFYKVREINNYHHAHDAYLNAVVGTALIKKYPKLESEFVYGDYKVYDVRKMIAKSEQEIGKATAKYFFYSNIMNFFKTEITLANGEIRKRPLIETNGETGEIVWDKGRDFATVRKVLSMPQVNIVKKTEVQTGGFSKESILPKRNSDKLIARKKDWDPKKYGGFDSPTVAYSVLVVAKVEKGKSKKLKSVKELLGITIMERSSFEKNPIDFLEAKGYKEVKKDLIIKLPKYSLFELENGRKRMLASAGELQKGNELALPSKYVNFLYLASHYEKLKGSPEDNEQKQLFVEQHKHYLDEIIEQISEFSKRVILADANLDKVLSAYNKHRDKPIREQAENIIHLFTLTNLGAPAAFKYFDTTIDRKRYTSTKEVLDATLIHQSITGLYETRIDLSQLGGDGGEAAAKGSSGGTLNIEDEYRLHETSKEPDVSLGSTWLSDFPQAWAETGGMGLAVRQAPLIIPLKATSTPVSIKQYPMSQEARLGIKPHIQRLLDQGILVPCQSPWNTPLLPVKKPGTNDYRPVQDLREVNKRVEDIHPTVPNPYNLLSGLPPSHQWYTVLDLKDAFFCLRLHPTSQPLFAFEWRDPEMGISGQLTWTRLPQGFKNSPTLFNEALHRDLAGFRIQHPDLILLQYVDDLLLAATSELDCQQGTRALLQTLGDLGYRASAKKAQICQKQVKYLGYLLKEGQRWLTEARKETVMGQPIPKTPRQLREFLGTAGFCRLWIPGFAEMAAPLYPLTKPGTLFNWGPDQQKAFQEIKQALLTAPALGLPDLTKPFELFVDEKQGYAKGVLTQKLGPWRRPVAYLSKKLDPVAAGWPPCLRMVAAIAVLTKDAGKLTMGQPLVILAPHAVEALVKQPPDRWLSNARMTHYQALLLDTDRVQFGPVVALNPATLLPLPEEGLQHDCLDILAEAHGTRSDLMDQPLPDADHTWYTDGSSFLQEGQRKAGAAVTTETEVIWARALPAGTSAQRAELIALTQALKMAEGKKLNVYTDSRYAFATAHIHGEIYRRRGWLTSEGKEIKNKDEILALLKALFLPKRLSIIHCPGHQKGNSAEARGNRMADQAAREVATRETPETSTLLAGKRTADGSEFEKRTADGSEFESPKKKAKVE

SEQ ID NO: 2298 - protein, 2091 aa, synthetic construct
MPAAKRVKLDGGDKKYSIGLDIGTNSVGWAVITDEYKVPSKKFKVLGNTDRHSIKKNLIGALLFDSGETAEATRLKRTARRRYTRRKNRICYLQEIFSNEMAKVDDSFFHRLEESFLVEEDKKHERHPIFGNIVDEVAYHEKYPTIYHLRKKLVDSTDKADLRLIYLALAHMIKFRGHFLIEGDLNPDNSDVDKLFIQLVQTYNQLFEENPINASGVDAKAILSARLSKSRRLENLIAQLPGEKKNGLFGNLIALSLGLTPNFKSNFDLAEDAKLQLSKDTYDDDLDNLLAQIGDQYADLFLAAKNLSDAILLSDILRVNTEITKAPLSASMIKRYDEHHQDLTLLKALVRQQLPEKYKEIFFDQSKNGYAGYIDGGASQEEFYKFIKPILEKMDGTEELLVKLNREDLLRKQRTFDNGSIPHQIHLGELHAILRRQEDFYPFLKDNREKIEKILTFRIPYYVGPLARGNSRFAWMTRKSEETITPWNFEEVVDKGASAQSFIERMTNFDKNLPNEKVLPKHSLLYEYFTVYNELTKVKYVTEGMRKPAFLSGEQKKAIVDLLFKTNRKVTVKQLKEDYFKKIECFDSVEISGVEDRFNASLGTYHDLLKIIKDKDFLDNEENEDILEDIVLTLTLFEDREMIEERLKTYAHLFDDKVMKQLKRRRYTGWGRLSRKLINGIRDKQSGKTILDFLKSDGFANRNFMQLIHDDSLTFKEDIQKAQVSGQGDSLHEHIANLAGSPAIKKGILQTVKVVDELVKVMGRHKPENIVIEMARENQTTQKGQKNSRERMKRIEEGIKELGSQILKEHPVENTQLQNEKLYLYYLQNGRDMYVDQELDINRLSDYDVDHIVPQSFLKDDSIDNKVLTRSDKARGKSDNVPSEEVVKKMKNYWRQLLNAKLITQRKFDNLTKAERGGLSELDKAGFIKRQLVETRQITKHVAQILDSRMNTKYDENDKLIREVKVITLKSKLVSDFRKDFQFYKVREINNYHHAHDAYLNAVVGTALIKKYPKLESEFVYGDYKVYDVRKMIAKSEQEIGKATAKYFFYSNIMNFFKTEITLANGEIRKRPLIETNGETGEIVWDKGRDFATVRKVLSMPQVNIVKKTEVQTGGFSKESILPKRNSDKLIARKKDWDPKKYGGFDSPTVAYSVLVVAKVEKGKSKKLKSVKELLGITIMERSSFEKNPIDFLEAKGYKEVKKDLIIKLPKYSLFELENGRKRMLASAGELQKGNELALPSKYVNFLYLASHYEKLKGSPEDNEQKQLFVEQHKHYLDEIIEQISEFSKRVILADANLDKVLSAYNKHRDKPIREQAENIIHLFTLTNLGAPAAFKYFDTTIDRKRYTSTKEVLDATLIHQSITGLYETRIDLSQLGGDGGPAPGGGGGTLNIEDEYRLHETSKEPDVSLGSTWLSDFPQAWAETGGMGLAVRQAPLIIPLKATSTPVSIKQYPMSQEARLGIKPHIQRLLDQGILVPCQSPWNTPLLPVKKPGTNDYRPVQDLREVNKRVEDIHPTVPNPYNLLSGLPPSHQWYTVLDLKDAFFCLRLHPTSQPLFAFEWRDPEMGISGQLTWTRLPQGFKNSPTLFNEALHRDLAGFRIQHPDLILLQYVDDLLLAATSELDCQQGTRALLQTLGDLGYRASAKKAQICQKQVKYLGYLLKEGQRWLTEARKETVMGQPIPKTPRQLREFLGTAGFCRLWIPGFAEMAAPLYPLTKPGTLFNWGPDQQKAFQEIKQALLTAPALGLPDLTKPFELFVDEKQGYAKGVLTQKLGPWRRPVAYLSKKLDPVAAGWPPCLRMVAAIAVLTKDAGKLTMGQPLVILAPHAVEALVKQPPDRWLSNARMTHYQALLLDTDRVQFGPVVALNPATLLPLPEEGLQHDCLDILAEAHGTRSDLMDQPLPDADHTWYTDGSSFLQEGQRKAGAAVTTETEVIWARALPAGTSAQRAELIALTQALKMAEGKKLNVYTDSRYAFATAHIHGEIYRRRGWLTSEGKEIKNKDEILALLKALFLPKRLSIIHCPGHQKGNSAEARGNRMADQAAREVATRETPETSTLLAGKRTADGSEFEKRTADGSEFESPKKKAKVE

SEQ ID NO: 2299 - protein, 2088 aa, synthetic construct
MPAAKRVKLDGGDKKYSIGLDIGTNSVGWAVITDEYKVPSKKFKVLGNTDRHSIKKNLIGALLFDSGETAEATRLKRTARRRYTRRKNRICYLQEIFSNEMAKVDDSFFHRLEESFLVEEDKKHERHPIFGNIVDEVAYHEKYPTIYHLRKKLVDSTDKADLRLIYLALAHMIKFRGHFLIEGDLNPDNSDVDKLFIQLVQTYNQLFEENPINASGVDAKAILSARLSKSRRLENLIAQLPGEKKNGLFGNLIALSLGLTPNFKSNFDLAEDAKLQLSKDTYDDDLDNLLAQIGDQYADLFLAAKNLSDAILLSDILRVNTEITKAPLSASMIKRYDEHHQDLTLLKALVRQQLPEKYKEIFFDQSKNGYAGYIDGGASQEEFYKFIKPILEKMDGTEELLVKLNREDLLRKQRTFDNGSIPHQIHLGELHAILRRQEDFYPFLKDNREKIEKILTFRIPYYVGPLARGNSRFAWMTRKSEETITPWNFEEVVDKGASAQSFIERMTNFDKNLPNEKVLPKHSLLYEYFTVYNELTKVKYVTEGMRKPAFLSGEQKKAIVDLLFKTNRKVTVKQLKEDYFKKIECFDSVEISGVEDRFNASLGTYHDLLKIIKDKDFLDNEENEDILEDIVLTLTLFEDREMIEERLKTYAHLFDDKVMKQLKRRRYTGWGRLSRKLINGIRDKQSGKTILDFLKSDGFANRNFMQLIHDDSLTFKEDIQKAQVSGQGDSLHEHIANLAGSPAIKKGILQTVKVVDELVKVMGRHKPENIVIEMARENQTTQKGQKNSRERMKRIEEGIKELGSQILKEHPVENTQLQNEKLYLYYLQNGRDMYVDQELDINRLSDYDVDHIVPQSFLKDDSIDNKVLTRSDKARGKSDNVPSEEVVKKMKNYWRQLLNAKLITQRKFDNLTKAERGGLSELDKAGFIKRQLVETRQITKHVAQILDSRMNTKYDENDKLIREVKVITLKSKLVSDFRKDFQFYKVREINNYHHAHDAYLNAVVGTALIKKYPKLESEFVYGDYKVYDVRKMIAKSEQEIGKATAKYFFYSNIMNFFKTEITLANGEIRKRPLIETNGETGEIVWDKGRDFATVRKVLSMPQVNIVKKTEVQTGGFSKESILPKRNSDKLIARKKDWDPKKYGGFDSPTVAYSVLVVAKVEKGKSKKLKSVKELLGITIMERSSFEKNPIDFLEAKGYKEVKKDLIIKLPKYSLFELENGRKRMLASAGELQKGNELALPSKYVNFLYLASHYEKLKGSPEDNEQKQLFVEQHKHYLDEIIEQISEFSKRVILADANLDKVLSAYNKHRDKPIREQAENIIHLFTLTNLGAPAAFKYFDTTIDRKRYTSTKEVLDATLIHQSITGLYETRIDLSQLGGDGGPAPGGTLNIEDEYRLHETSKEPDVSLGSTWLSDFPQAWAETGGMGLAVRQAPLIIPLKATSTPVSIKQYPMSQEARLGIKPHIQRLLDQGILVPCQSPWNTPLLPVKKPGTNDYRPVQDLREVNKRVEDIHPTVPNPYNLLSGLPPSHQWYTVLDLKDAFFCLRLHPTSQPLFAFEWRDPEMGISGQLTWTRLPQGFKNSPTLFNEALHRDLAGFRIQHPDLILLQYVDDLLLAATSELDCQQGTRALLQTLGDLGYRASAKKAQICQKQVKYLGYLLKEGQRWLTEARKETVMGQPIPKTPRQLREFLGKAGFCRLFIPGFAEMAAPLYPLTKPGTLFNWGPDQQKAFQEIKQALLTAPALGLPDLTKPFELFVDEKQGYAKGVLTQKLGPWRRPVAYLSKKLDPVAAGWPPCLRMVAAIAVLTKDAGKLTMGQPLVILAPHAVEALVKQPPDRWLSNARMTHYQALLLDTDRVQFGPVVALNPATLLPLPEEGLQHDCLDILAEAHGTRSDLMDQPLPDADHTWYTDGSSFLQEGQRKAGAAVTTETEVIWARALPAGTSAQRAELIALTQALKMAEGKKLNVYTDSRYAFATAHIHGEIYRRRGWLTSEGKEIKNKDEILALLKALFLPKRLSIIHCPGHQKGNSAEARGNRMADQAAREVATRETPETSTLLAGKRTADGSEFEKRTADGSEFESPKKKAKVE

SEQ ID NO: 2300 - protein, 2103 aa, synthetic construct
MPAAKRVKLDGGDKKYSIGLDIGTNSVGWAVITDEYKVPSKKFKVLGNTDRHSIKKNLIGALLFDSGETAEATRLKRTARRRYTRRKNRICYLQEIFSNEMAKVDDSFFHRLEESFLVEEDKKHERHPIFGNIVDEVAYHEKYPTIYHLRKKLVDSTDKADLRLIYLALAHMIKFRGHFLIEGDLNPDNSDVDKLFIQLVQTYNQLFEENPINASGVDAKAILSARLSKSRRLENLIAQLPGEKKNGLFGNLIALSLGLTPNFKSNFDLAEDAKLQLSKDTYDDDLDNLLAQIGDQYADLFLAAKNLSDAILLSDILRVNTEITKAPLSASMIKRYDEHHQDLTLLKALVRQQLPEKYKEIFFDQSKNGYAGYIDGGASQEEFYKFIKPILEKMDGTEELLVKLNREDLLRKQRTFDNGSIPHQIHLGELHAILRRQEDFYPFLKDNREKIEKILTFRIPYYVGPLARGNSRFAWMTRKSEETITPWNFEEVVDKGASAQSFIERMTNFDKNLPNEKVLPKHSLLYEYFTVYNELTKVKYVTEGMRKPAFLSGEQKKAIVDLLFKTNRKVTVKQLKEDYFKKIECFDSVEISGVEDRFNASLGTYHDLLKIIKDKDFLDNEENEDILEDIVLTLTLFEDREMIEERLKTYAHLFDDKVMKQLKRRRYTGWGRLSRKLINGIRDKQSGKTILDFLKSDGFANRNFMQLIHDDSLTFKEDIQKAQVSGQGDSLHEHIANLAGSPAIKKGILQTVKVVDELVKVMGRHKPENIVIEMARENQTTQKGQKNSRERMKRIEEGIKELGSQILKEHPVENTQLQNEKLYLYYLQNGRDMYVDQELDINRLSDYDVDHIVPQSFLKDDSIDNKVLTRSDKARGKSDNVPSEEVVKKMKNYWRQLLNAKLITQRKFDNLTKAERGGLSELDKAGFIKRQLVETRQITKHVAQILDSRMNTKYDENDKLIREVKVITLKSKLVSDFRKDFQFYKVREINNYHHAHDAYLNAVVGTALIKKYPKLESEFVYGDYKVYDVRKMIAKSEQEIGKATAKYFFYSNIMNFFKTEITLANGEIRKRPLIETNGETGEIVWDKGRDFATVRKVLSMPQVNIVKKTEVQTGGFSKESILPKRNSDKLIARKKDWDPKKYGGFDSPTVAYSVLVVAKVEKGKSKKLKSVKELLGITIMERSSFEKNPIDFLEAKGYKEVKKDLIIKLPKYSLFELENGRKRMLASAGELQKGNELALPSKYVNFLYLASHYEKLKGSPEDNEQKQLFVEQHKHYLDEIIEQISEFSKRVILADANLDKVLSAYNKHRDKPIREQAENIIHLFTLTNLGAPAAFKYFDTTIDRKRYTSTKEVLDATLIHQSITGLYETRIDLSQLGGDGGGGSGGSGGSGGSGGSGGSGGTLNIEDEYRLHETSKEPDVSLGSTWLSDFPQAWAETGGMGLAVRQAPLIIPLKATSTPVSIKQYPMSQEARLGIKPHIQRLLDQGILVPCQSPWNTPLLPVKKPGTNDYRPVQDLREVNKRVEDIHPTVPNPYNLLSGLPPSHQWYTVLDLKDAFFCLRLHPTSQPLFAFEWRDPEMGISGQLTWTRLPQGFKNSPTLFNEALHRDLAGFRIQHPDLILLQYVDDLLLAATSELDCQQGTRALLQTLGDLGYRASAKKAQICQKQVKYLGYLLKEGQRWLTEARKETVMGQPIPKTPRQLREFLGKAGFCRLFIPGFAEMAAPLYPLTKPGTLFNWGPDQQKAFQEIKQALLTAPALGLPDLTKPFELFVDEKQGYAKGVLTQKLGPWRRPVAYLSKKLDPVAAGWPPCLRMVAAIAVLTKDAGKLTMGQPLVILAPHAVEALVKQPPDRWLSNARMTHYQALLLDTDRVQFGPVVALNPATLLPLPEEGLQHDCLDILAEAHGTRSDLMDQPLPDADHTWYTDGSSFLQEGQRKAGAAVTTETEVIWARALPAGTSAQRAELIALTQALKMAEGKKLNVYTDSRYAFATAHIHGEIYRRRGWLTSEGKEIKNKDEILALLKALFLPKRLSIIHCPGHQKGNSAEARGNRMADQAAREVATRETPETSTLLAGKRTADGSEFEKRTADGSEFESPKKKAKVE

SEQ ID NO: 2301 - protein, 2096 aa, synthetic construct
MPAAKRVKLDGGDKKYSIGLDIGTNSVGWAVITDEYKVPSKKFKVLGNTDRHSIKKNLIGALLFDSGETAEATRLKRTARRRYTRRKNRICYLQEIFSNEMAKVDDSFFHRLEESFLVEEDKKHERHPIFGNIVDEVAYHEKYPTIYHLRKKLVDSTDKADLRLIYLALAHMIKFRGHFLIEGDLNPDNSDVDKLFIQLVQTYNQLFEENPINASGVDAKAILSARLSKSRRLENLIAQLPGEKKNGLFGNLIALSLGLTPNFKSNFDLAEDAKLQLSKDTYDDDLDNLLAQIGDQYADLFLAAKNLSDAILLSDILRVNTEITKAPLSASMIKRYDEHHQDLTLLKALVRQQLPEKYKEIFFDQSKNGYAGYIDGGASQEEFYKFIKPILEKMDGTEELLVKLNREDLLRKQRTFDNGSIPHQIHLGELHAILRRQEDFYPFLKDNREKIEKILTFRIPYYVGPLARGNSRFAWMTRKSEETITPWNFEEVVDKGASAQSFIERMTNFDKNLPNEKVLPKHSLLYEYFTVYNELTKVKYVTEGMRKPAFLSGEQKKAIVDLLFKTNRKVTVKQLKEDYFKKIECFDSVEISGVEDRFNASLGTYHDLLKIIKDKDFLDNEENEDILEDIVLTLTLFEDREMIEERLKTYAHLFDDKVMKQLKRRRYTGWGRLSRKLINGIRDKQSGKTILDFLKSDGFANRNFMQLIHDDSLTFKEDIQKAQVSGQGDSLHEHIANLAGSPAIKKGILQTVKVVDELVKVMGRHKPENIVIEMARENQTTQKGQKNSRERMKRIEEGIKELGSQILKEHPVENTQLQNEKLYLYYLQNGRDMYVDQELDINRLSDYDVDHIVPQSFLKDDSIDNKVLTRSDKARGKSDNVPSEEVVKKMKNYWRQLLNAKLITQRKFDNLTKAERGGLSELDKAGFIKRQLVETRQITKHVAQILDSRMNTKYDENDKLIREVKVITLKSKLVSDFRKDFQFYKVREINNYHHAHDAYLNAVVGTALIKKYPKLESEFVYGDYKVYDVRKMIAKSEQEIGKATAKYFFYSNIMNFFKTEITLANGEIRKRPLIETNGETGEIVWDKGRDFATVRKVLSMPQVNIVKKTEVQTGGFSKESILPKRNSDKLIARKKDWDPKKYGGFDSPTVAYSVLVVAKVEKGKSKKLKSVKELLGITIMERSSFEKNPIDFLEAKGYKEVKKDLIIKLPKYSLFELENGRKRMLASAGELQKGNELALPSKYVNFLYLASHYEKLKGSPEDNEQKQLFVEQHKHYLDEIIEQISEFSKRVILADANLDKVLSAYNKHRDKPIREQAENIIHLFTLTNLGAPAAFKYFDTTIDRKRYTSTKEVLDATLIHQSITGLYETRIDLSQLGGDGGPAPAPAPAPAPGGTLNIEDEYRLHETSKEPDVSLGSTWLSDFPQAWAETGGMGLAVRQAPLIIPLKATSTPVSIKQYPMSQEARLGIKPHIQRLLDQGILVPCQSPWNTPLLPVKKPGTNDYRPVQDLREVNKRVEDIHPTVPNPYNLLSGLPPSHQWYTVLDLKDAFFCLRLHPTSQPLFAFEWRDPEMGISGQLTWTRLPQGFKNSPTLFNEALHRDLAGFRIQHPDLILLQYVDDLLLAATSELDCQQGTRALLQTLGDLGYRASAKKAQICQKQVKYLGYLLKEGQRWLTEARKETVMGQPIPKTPRQLREFLGKAGFCRLFIPGFAEMAAPLYPLTKPGTLFNWGPDQQKAFQEIKQALLTAPALGLPDLTKPFELFVDEKQGYAKGVLTQKLGPWRRPVAYLSKKLDPVAAGWPPCLRMVAAIAVLTKDAGKLTMGQPLVILAPHAVEALVKQPPDRWLSNARMTHYQALLLDTDRVQFGPVVALNPATLLPLPEEGLQHDCLDILAEAHGTRSDLMDQPLPDADHTWYTDGSSFLQEGQRKAGAAVTTETEVIWARALPAGTSAQRAELIALTQALKMAEGKKLNVYTDSRYAFATAHIHGEIYRRRGWLTSEGKEIKNKDEILALLKALFLPKRLSIIHCPGHQKGNSAEARGNRMADQAAREVATRETPETSTLLAGKRTADGSEFEKRTADGSEFESPKKKAKVE

SEQ ID NO: 2302 - protein, 2091 aa, synthetic construct
MPAAKRVKLDGGDKKYSIGLDIGTNSVGWAVITDEYKVPSKKFKVLGNTDRHSIKKNLIGALLFDSGETAEATRLKRTARRRYTRRKNRICYLQEIFSNEMAKVDDSFFHRLEESFLVEEDKKHERHPIFGNIVDEVAYHEKYPTIYHLRKKLVDSTDKADLRLIYLALAHMIKFRGHFLIEGDLNPDNSDVDKLFIQLVQTYNQLFEENPINASGVDAKAILSARLSKSRRLENLIAQLPGEKKNGLFGNLIALSLGLTPNFKSNFDLAEDAKLQLSKDTYDDDLDNLLAQIGDQYADLFLAAKNLSDAILLSDILRVNTEITKAPLSASMIKRYDEHHQDLTLLKALVRQQLPEKYKEIFFDQSKNGYAGYIDGGASQEEFYKFIKPILEKMDGTEELLVKLNREDLLRKQRTFDNGSIPHQIHLGELHAILRRQEDFYPFLKDNREKIEKILTFRIPYYVGPLARGNSRFAWMTRKSEETITPWNFEEVVDKGASAQSFIERMTNFDKNLPNEKVLPKHSLLYEYFTVYNELTKVKYVTEGMRKPAFLSGEQKKAIVDLLFKTNRKVTVKQLKEDYFKKIECFDSVEISGVEDRFNASLGTYHDLLKIIKDKDFLDNEENEDILEDIVLTLTLFEDREMIEERLKTYAHLFDDKVMKQLKRRRYTGWGRLSRKLINGIRDKQSGKTILDFLKSDGFANRNFMQLIHDDSLTFKEDIQKAQVSGQGDSLHEHIANLAGSPAIKKGILQTVKVVDELVKVMGRHKPENIVIEMARENQTTQKGQKNSRERMKRIEEGIKELGSQILKEHPVENTQLQNEKLYLYYLQNGRDMYVDQELDINRLSDYDVDHIVPQSFLKDDSIDNKVLTRSDKARGKSDNVPSEEVVKKMKNYWRQLLNAKLITQRKFDNLTKAERGGLSELDKAGFIKRQLVETRQITKHVAQILDSRMNTKYDENDKLIREVKVITLKSKLVSDFRKDFQFYKVREINNYHHAHDAYLNAVVGTALIKKYPKLESEFVYGDYKVYDVRKMIAKSEQEIGKATAKYFFYSNIMNFFKTEITLANGEIRKRPLIETNGETGEIVWDKGRDFATVRKVLSMPQVNIVKKTEVQTGGFSKESILPKRNSDKLIARKKDWDPKKYGGFDSPTVAYSVLVVAKVEKGKSKKLKSVKELLGITIMERSSFEKNPIDFLEAKGYKEVKKDLIIKLPKYSLFELENGRKRMLASAGELQKGNELALPSKYVNFLYLASHYEKLKGSPEDNEQKQLFVEQHKHYLDEIIEQISEFSKRVILADANLDKVLSAYNKHRDKPIREQAENIIHLFTLTNLGAPAAFKYFDTTIDRKRYTSTKEVLDATLIHQSITGLYETRIDLSQLGGDGGGGGPAPGGTLNIEDEYRLHETSKEPDVSLGSTWLSDFPQAWAETGGMGLAVRQAPLIIPLKATSTPVSIKQYPMSQEARLGIKPHIQRLLDQGILVPCQSPWNTPLLPVKKPGTNDYRPVQDLREVNKRVEDIHPTVPNPYNLLSGLPPSHQWYTVLDLKDAFFCLRLHPTSQPLFAFEWRDPEMGISGQLTWTRLPQGFKNSPTLFNEALHRDLAGFRIQHPDLILLQYVDDLLLAATSELDCQQGTRALLQTLGDLGYRASAKKAQICQKQVKYLGYLLKEGQRWLTEARKETVMGQPIPKTPRQLREFLGKAGFCRLFIPGFAEMAAPLYPLTKPGTLFNWGPDQQKAFQEIKQALLTAPALGLPDLTKPFELFVDEKQGYAKGVLTQKLGPWRRPVAYLSKKLDPVAAGWPPCLRMVAAIAVLTKDAGKLTMGQPLVILAPHAVEALVKQPPDRWLSNARMTHYQALLLDTDRVQFGPVVALNPATLLPLPEEGLQHDCLDILAEAHGTRSDLMDQPLPDADHTWYTDGSSFLQEGQRKAGAAVTTETEVIWARALPAGTSAQRAELIALTQALKMAEGKKLNVYTDSRYAFATAHIHGEIYRRRGWLTSEGKEIKNKDEILALLKALFLPKRLSIIHCPGHQKGNSAEARGNRMADQAAREVATRETPETSTLLAGKRTADGSEFEKRTADGSEFESPKKKAKVE

SEQ ID NO: 2303 - protein, 2115 aa, synthetic construct
MPAAKRVKLDGGDKKYSIGLDIGTNSVGWAVITDEYKVPSKKFKVLGNTDRHSIKKNLIGALLFDSGETAEATRLKRTARRRYTRRKNRICYLQEIFSNEMAKVDDSFFHRLEESFLVEEDKKHERHPIFGNIVDEVAYHEKYPTIYHLRKKLVDSTDKADLRLIYLALAHMIKFRGHFLIEGDLNPDNSDVDKLFIQLVQTYNQLFEENPINASGVDAKAILSARLSKSRRLENLIAQLPGEKKNGLFGNLIALSLGLTPNFKSNFDLAEDAKLQLSKDTYDDDLDNLLAQIGDQYADLFLAAKNLSDAILLSDILRVNTEITKAPLSASMIKRYDEHHQDLTLLKALVRQQLPEKYKEIFFDQSKNGYAGYIDGGASQEEFYKFIKPILEKMDGTEELLVKLNREDLLRKQRTFDNGSIPHQIHLGELHAILRRQEDFYPFLKDNREKIEKILTFRIPYYVGPLARGNSRFAWMTRKSEETITPWNFEEVVDKGASAQSFIERMTNFDKNLPNEKVLPKHSLLYEYFTVYNELTKVKYVTEGMRKPAFLSGEQKKAIVDLLFKTNRKVTVKQLKEDYFKKIECFDSVEISGVEDRFNASLGTYHDLLKIIKDKDFLDNEENEDILEDIVLTLTLFEDREMIEERLKTYAHLFDDKVMKQLKRRRYTGWGRLSRKLINGIRDKQSGKTILDFLKSDGFANRNFMQLIHDDSLTFKEDIQKAQVSGQGDSLHEHIANLAGSPAIKKGILQTVKVVDELVKVMGRHKPENIVIEMARENQTTQKGQKNSRERMKRIEEGIKELGSQILKEHPVENTQLQNEKLYLYYLQNGRDMYVDQELDINRLSDYDVDHIVPQSFLKDDSIDNKVLTRSDKARGKSDNVPSEEVVKKMKNYWRQLLNAKLITQRKFDNLTKAERGGLSELDKAGFIKRQLVETRQITKHVAQILDSRMNTKYDENDKLIREVKVITLKSKLVSDFRKDFQFYKVREINNYHHAHDAYLNAVVGTALIKKYPKLESEFVYGDYKVYDVRKMIAKSEQEIGKATAKYFFYSNIMNFFKTEITLANGEIRKRPLIETNGETGEIVWDKGRDFATVRKVLSMPQVNIVKKTEVQTGGFSKESILPKRNSDKLIARKKDWDPKKYGGFDSPTVAYSVLVVAKVEKGKSKKLKSVKELLGITIMERSSFEKNPIDFLEAKGYKEVKKDLIIKLPKYSLFELENGRKRMLASAGELQKGNELALPSKYVNFLYLASHYEKLKGSPEDNEQKQLFVEQHKHYLDEIIEQISEFSKRVILADANLDKVLSAYNKHRDKPIREQAENIIHLFTLTNLGAPAAFKYFDTTIDRKRYTSTKEVLDATLIHQSITGLYETRIDLSQLGGDGGGGGGSGGGGSGGGGSGGGGSGGGGSGGGGSGGTLNIEDEYRLHETSKEPDVSLGSTWLSDFPQAWAETGGMGLAVRQAPLIIPLKATSTPVSIKQYPMSQEARLGIKPHIQRLLDQGILVPCQSPWNTPLLPVKKPGTNDYRPVQDLREVNKRVEDIHPTVPNPYNLLSGLPPSHQWYTVLDLKDAFFCLRLHPTSQPLFAFEWRDPEMGISGQLTWTRLPQGFKNSPTLFNEALHRDLAGFRIQHPDLILLQYVDDLLLAATSELDCQQGTRALLQTLGDLGYRASAKKAQICQKQVKYLGYLLKEGQRWLTEARKETVMGQPIPKTPRQLREFLGKAGFCRLFIPGFAEMAAPLYPLTKPGTLFNWGPDQQKAFQEIKQALLTAPALGLPDLTKPFELFVDEKQGYAKGVLTQKLGPWRRPVAYLSKKLDPVAAGWPPCLRMVAAIAVLTKDAGKLTMGQPLVILAPHAVEALVKQPPDRWLSNARMTHYQALLLDTDRVQFGPVVALNPATLLPLPEEGLQHDCLDILAEAHGTRSDLMDQPLPDADHTWYTDGSSFLQEGQRKAGAAVTTETEVIWARALPAGTSAQRAELIALTQALKMAEGKKLNVYTDSRYAFATAHIHGEIYRRRGWLTSEGKEIKNKDEILALLKALFLPKRLSIIHCPGHQKGNSAEARGNRMADQAAREVATRETPETSTLLAGKRTADGSEFEKRTADGSEFESPKKKAKVE

SEQ ID NO: 2304 - protein, 2103 aa, synthetic construct
MPAAKRVKLDGGDKKYSIGLDIGTNSVGWAVITDEYKVPSKKFKVLGNTDRHSIKKNLIGALLFDSGETAEATRLKRTARRRYTRRKNRICYLQEIFSNEMAKVDDSFFHRLEESFLVEEDKKHERHPIFGNIVDEVAYHEKYPTIYHLRKKLVDSTDKADLRLIYLALAHMIKFRGHFLIEGDLNPDNSDVDKLFIQLVQTYNQLFEENPINASGVDAKAILSARLSKSRRLENLIAQLPGEKKNGLFGNLIALSLGLTPNFKSNFDLAEDAKLQLSKDTYDDDLDNLLAQIGDQYADLFLAAKNLSDAILLSDILRVNTEITKAPLSASMIKRYDEHHQDLTLLKALVRQQLPEKYKEIFFDQSKNGYAGYIDGGASQEEFYKFIKPILEKMDGTEELLVKLNREDLLRKQRTFDNGSIPHQIHLGELHAILRRQEDFYPFLKDNREKIEKILTFRIPYYVGPLARGNSRFAWMTRKSEETITPWNFEEVVDKGASAQSFIERMTNFDKNLPNEKVLPKHSLLYEYFTVYNELTKVKYVTEGMRKPAFLSGEQKKAIVDLLFKTNRKVTVKQLKEDYFKKIECFDSVEISGVEDRFNASLGTYHDLLKIIKDKDFLDNEENEDILEDIVLTLTLFEDREMIEERLKTYAHLFDDKVMKQLKRRRYTGWGRLSRKLINGIRDKQSGKTILDFLKSDGFANRNFMQLIHDDSLTFKEDIQKAQVSGQGDSLHEHIANLAGSPAIKKGILQTVKVVDELVKVMGRHKPENIVIEMARENQTTQKGQKNSRERMKRIEEGIKELGSQILKEHPVENTQLQNEKLYLYYLQNGRDMYVDQELDINRLSDYDVDHIVPQSFLKDDSIDNKVLTRSDKARGKSDNVPSEEVVKKMKNYWRQLLNAKLITQRKFDNLTKAERGGLSELDKAGFIKRQLVETRQITKHVAQILDSRMNTKYDENDKLIREVKVITLKSKLVSDFRKDFQFYKVREINNYHHAHDAYLNAVVGTALIKKYPKLESEFVYGDYKVYDVRKMIAKSEQEIGKATAKYFFYSNIMNFFKTEITLANGEIRKRPLIETNGETGEIVWDKGRDFATVRKVLSMPQVNIVKKTEVQTGGFSKESILPKRNSDKLIARKKDWDPKKYGGFDSPTVAYSVLVVAKVEKGKSKKLKSVKELLGITIMERSSFEKNPIDFLEAKGYKEVKKDLIIKLPKYSLFELENGRKRMLASAGELQKGNELALPSKYVNFLYLASHYEKLKGSPEDNEQKQLFVEQHKHYLDEIIEQISEFSKRVILADANLDKVLSAYNKHRDKPIREQAENIIHLFTLTNLGAPAAFKYFDTTIDRKRYTSTKEVLDATLIHQSITGLYETRIDLSQLGGDGGGSSGSSGSSGSSGSSGSSGGTLNIEDEYRLHETSKEPDVSLGSTWLSDFPQAWAETGGMGLAVRQAPLIIPLKATSTPVSIKQYPMSQEARLGIKPHIQRLLDQGILVPCQSPWNTPLLPVKKPGTNDYRPVQDLREVNKRVEDIHPTVPNPYNLLSGLPPSHQWYTVLDLKDAFFCLRLHPTSQPLFAFEWRDPEMGISGQLTWTRLPQGFKNSPTLFNEALHRDLAGFRIQHPDLILLQYVDDLLLAATSELDCQQGTRALLQTLGDLGYRASAKKAQICQKQVKYLGYLLKEGQRWLTEARKETVMGQPIPKTPRQLREFLGKAGFCRLFIPGFAEMAAPLYPLTKPGTLFNWGPDQQKAFQEIKQALLTAPALGLPDLTKPFELFVDEKQGYAKGVLTQKLGPWRRPVAYLSKKLDPVAAGWPPCLRMVAAIAVLTKDAGKLTMGQPLVILAPHAVEALVKQPPDRWLSNARMTHYQALLLDTDRVQFGPVVALNPATLLPLPEEGLQHDCLDILAEAHGTRSDLMDQPLPDADHTWYTDGSSFLQEGQRKAGAAVTTETEVIWARALPAGTSAQRAELIALTQALKMAEGKKLNVYTDSRYAFATAHIHGEIYRRRGWLTSEGKEIKNKDEILALLKALFLPKRLSIIHCPGHQKGNSAEARGNRMADQAAREVATRETPETSTLLAGKRTADGSEFEKRTADGSEFESPKKKAKVE

SEQ ID NO: 2305 - protein, 2100 aa, synthetic construct
MPAAKRVKLDGGDKKYSIGLDIGTNSVGWAVITDEYKVPSKKFKVLGNTDRHSIKKNLIGALLFDSGETAEATRLKRTARRRYTRRKNRICYLQEIFSNEMAKVDDSFFHRLEESFLVEEDKKHERHPIFGNIVDEVAYHEKYPTIYHLRKKLVDSTDKADLRLIYLALAHMIKFRGHFLIEGDLNPDNSDVDKLFIQLVQTYNQLFEENPINASGVDAKAILSARLSKSRRLENLIAQLPGEKKNGLFGNLIALSLGLTPNFKSNFDLAEDAKLQLSKDTYDDDLDNLLAQIGDQYADLFLAAKNLSDAILLSDILRVNTEITKAPLSASMIKRYDEHHQDLTLLKALVRQQLPEKYKEIFFDQSKNGYAGYIDGGASQEEFYKFIKPILEKMDGTEELLVKLNREDLLRKQRTFDNGSIPHQIHLGELHAILRRQEDFYPFLKDNREKIEKILTFRIPYYVGPLARGNSRFAWMTRKSEETITPWNFEEVVDKGASAQSFIERMTNFDKNLPNEKVLPKHSLLYEYFTVYNELTKVKYVTEGMRKPAFLSGEQKKAIVDLLFKTNRKVTVKQLKEDYFKKIECFDSVEISGVEDRFNASLGTYHDLLKIIKDKDFLDNEENEDILEDIVLTLTLFEDREMIEERLKTYAHLFDDKVMKQLKRRRYTGWGRLSRKLINGIRDKQSGKTILDFLKSDGFANRNFMQLIHDDSLTFKEDIQKAQVSGQGDSLHEHIANLAGSPAIKKGILQTVKVVDELVKVMGRHKPENIVIEMARENQTTQKGQKNSRERMKRIEEGIKELGSQILKEHPVENTQLQNEKLYLYYLQNGRDMYVDQELDINRLSDYDVDHIVPQSFLKDDSIDNKVLTRSDKARGKSDNVPSEEVVKKMKNYWRQLLNAKLITQRKFDNLTKAERGGLSELDKAGFIKRQLVETRQITKHVAQILDSRMNTKYDENDKLIREVKVITLKSKLVSDFRKDFQFYKVREINNYHHAHDAYLNAVVGTALIKKYPKLESEFVYGDYKVYDVRKMIAKSEQEIGKATAKYFFYSNIMNFFKTEITLANGEIRKRPLIETNGETGEIVWDKGRDFATVRKVLSMPQVNIVKKTEVQTGGFSKESILPKRNSDKLIARKKDWDPKKYGGFDSPTVAYSVLVVAKVEKGKSKKLKSVKELLGITIMERSSFEKNPIDFLEAKGYKEVKKDLIIKLPKYSLFELENGRKRMLASAGELQKGNELALPSKYVNFLYLASHYEKLKGSPEDNEQKQLFVEQHKHYLDEIIEQISEFSKRVILADANLDKVLSAYNKHRDKPIREQAENIIHLFTLTNLGAPAAFKYFDTTIDRKRYTSTKEVLDATLIHQSITGLYETRIDLSQLGGDGGEAAAKGGGGSEAAAKGGTLNIEDEYRLHETSKEPDVSLGSTWLSDFPQAWAETGGMGLAVRQAPLIIPLKATSTPVSIKQYPMSQEARLGIKPHIQRLLDQGILVPCQSPWNTPLLPVKKPGTNDYRPVQDLREVNKRVEDIHPTVPNPYNLLSGLPPSHQWYTVLDLKDAFFCLRLHPTSQPLFAFEWRDPEMGISGQLTWTRLPQGFKNSPTLFNEALHRDLAGFRIQHPDLILLQYVDDLLLAATSELDCQQGTRALLQTLGDLGYRASAKKAQICQKQVKYLGYLLKEGQRWLTEARKETVMGQPIPKTPRQLREFLGKAGFCRLFIPGFAEMAAPLYPLTKPGTLFNWGPDQQKAFQEIKQALLTAPALGLPDLTKPFELFVDEKQGYAKGVLTQKLGPWRRPVAYLSKKLDPVAAGWPPCLRMVAAIAVLTKDAGKLTMGQPLVILAPHAVEALVKQPPDRWLSNARMTHYQALLLDTDRVQFGPVVALNPATLLPLPEEGLQHDCLDILAEAHGTRSDLMDQPLPDADHTWYTDGSSFLQEGQRKAGAAVTTETEVIWARALPAGTSAQRAELIALTQALKMAEGKKLNVYTDSRYAFATAHIHGEIYRRRGWLTSEGKEIKNKDEILALLKALFLPKRLSIIHCPGHQKGNSAEARGNRMADQAAREVATRETPETSTLLAGKRTADGSEFEKRTADGSEFESPKKKAKVE

SEQ ID NO: 2306 - protein, 2096 aa, synthetic construct
MPAAKRVKLDGGDKKYSIGLDIGTNSVGWAVITDEYKVPSKKFKVLGNTDRHSIKKNLIGALLFDSGETAEATRLKRTARRRYTRRKNRICYLQEIFSNEMAKVDDSFFHRLEESFLVEEDKKHERHPIFGNIVDEVAYHEKYPTIYHLRKKLVDSTDKADLRLIYLALAHMIKFRGHFLIEGDLNPDNSDVDKLFIQLVQTYNQLFEENPINASGVDAKAILSARLSKSRRLENLIAQLPGEKKNGLFGNLIALSLGLTPNFKSNFDLAEDAKLQLSKDTYDDDLDNLLAQIGDQYADLFLAAKNLSDAILLSDILRVNTEITKAPLSASMIKRYDEHHQDLTLLKALVRQQLPEKYKEIFFDQSKNGYAGYIDGGASQEEFYKFIKPILEKMDGTEELLVKLNREDLLRKQRTFDNGSIPHQIHLGELHAILRRQEDFYPFLKDNREKIEKILTFRIPYYVGPLARGNSRFAWMTRKSEETITPWNFEEVVDKGASAQSFIERMTNFDKNLPNEKVLPKHSLLYEYFTVYNELTKVKYVTEGMRKPAFLSGEQKKAIVDLLFKTNRKVTVKQLKEDYFKKIECFDSVEISGVEDRFNASLGTYHDLLKIIKDKDFLDNEENEDILEDIVLTLTLFEDREMIEERLKTYAHLFDDKVMKQLKRRRYTGWGRLSRKLINGIRDKQSGKTILDFLKSDGFANRNFMQLIHDDSLTFKEDIQKAQVSGQGDSLHEHIANLAGSPAIKKGILQTVKVVDELVKVMGRHKPENIVIEMARENQTTQKGQKNSRERMKRIEEGIKELGSQILKEHPVENTQLQNEKLYLYYLQNGRDMYVDQELDINRLSDYDVDHIVPQSFLKDDSIDNKVLTRSDKARGKSDNVPSEEVVKKMKNYWRQLLNAKLITQRKFDNLTKAERGGLSELDKAGFIKRQLVETRQITKHVAQILDSRMNTKYDENDKLIREVKVITLKSKLVSDFRKDFQFYKVREINNYHHAHDAYLNAVVGTALIKKYPKLESEFVYGDYKVYDVRKMIAKSEQEIGKATAKYFFYSNIMNFFKTEITLANGEIRKRPLIETNGETGEIVWDKGRDFATVRKVLSMPQVNIVKKTEVQTGGFSKESILPKRNSDKLIARKKDWDPKKYGGFDSPTVAYSVLVVAKVEKGKSKKLKSVKELLGITIMERSSFEKNPIDFLEAKGYKEVKKDLIIKLPKYSLFELENGRKRMLASAGELQKGNELALPSKYVNFLYLASHYEKLKGSPEDNEQKQLFVEQHKHYLDEIIEQISEFSKRVILADANLDKVLSAYNKHRDKPIREQAENIIHLFTLTNLGAPAAFKYFDTTIDRKRYTSTKEVLDATLIHQSITGLYETRIDLSQLGGDGGGGGEAAAKGGSGGTLNIEDEYRLHETSKEPDVSLGSTWLSDFPQAWAETGGMGLAVRQAPLIIPLKATSTPVSIKQYPMSQEARLGIKPHIQRLLDQGILVPCQSPWNTPLLPVKKPGTNDYRPVQDLREVNKRVEDIHPTVPNPYNLLSGLPPSHQWYTVLDLKDAFFCLRLHPTSQPLFAFEWRDPEMGISGQLTWTRLPQGFKNSPTLFNEALHRDLAGFRIQHPDLILLQYVDDLLLAATSELDCQQGTRALLQTLGDLGYRASAKKAQICQKQVKYLGYLLKEGQRWLTEARKETVMGQPIPKTPRQLREFLGKAGFCRLFIPGFAEMAAPLYPLTKPGTLFNWGPDQQKAFQEIKQALLTAPALGLPDLTKPFELFVDEKQGYAKGVLTQKLGPWRRPVAYLSKKLDPVAAGWPPCLRMVAAIAVLTKDAGKLTMGQPLVILAPHAVEALVKQPPDRWLSNARMTHYQALLLDTDRVQFGPVVALNPATLLPLPEEGLQHDCLDILAEAHGTRSDLMDQPLPDADHTWYTDGSSFLQEGQRKAGAAVTTETEVIWARALPAGTSAQRAELIALTQALKMAEGKKLNVYTDSRYAFATAHIHGEIYRRRGWLTSEGKEIKNKDEILALLKALFLPKRLSIIHCPGHQKGNSAEARGNRMADQAAREVATRETPETSTLLAGKRTADGSEFEKRTADGSEFESPKKKAKVE

SEQ ID NO: 2307 - protein, 2092 aa, synthetic construct
MPAAKRVKLDGGDKKYSIGLDIGTNSVGWAVITDEYKVPSKKFKVLGNTDRHSIKKNLIGALLFDSGETAEATRLKRTARRRYTRRKNRICYLQEIFSNEMAKVDDSFFHRLEESFLVEEDKKHERHPIFGNIVDEVAYHEKYPTIYHLRKKLVDSTDKADLRLIYLALAHMIKFRGHFLIEGDLNPDNSDVDKLFIQLVQTYNQLFEENPINASGVDAKAILSARLSKSRRLENLIAQLPGEKKNGLFGNLIALSLGLTPNFKSNFDLAEDAKLQLSKDTYDDDLDNLLAQIGDQYADLFLAAKNLSDAILLSDILRVNTEITKAPLSASMIKRYDEHHQDLTLLKALVRQQLPEKYKEIFFDQSKNGYAGYIDGGASQEEFYKFIKPILEKMDGTEELLVKLNREDLLRKQRTFDNGSIPHQIHLGELHAILRRQEDFYPFLKDNREKIEKILTFRIPYYVGPLARGNSRFAWMTRKSEETITPWNFEEVVDKGASAQSFIERMTNFDKNLPNEKVLPKHSLLYEYFTVYNELTKVKYVTEGMRKPAFLSGEQKKAIVDLLFKTNRKVTVKQLKEDYFKKIECFDSVEISGVEDRFNASLGTYHDLLKIIKDKDFLDNEENEDILEDIVLTLTLFEDREMIEERLKTYAHLFDDKVMKQLKRRRYTGWGRLSRKLINGIRDKQSGKTILDFLKSDGFANRNFMQLIHDDSLTFKEDIQKAQVSGQGDSLHEHIANLAGSPAIKKGILQTVKVVDELVKVMGRHKPENIVIEMARENQTTQKGQKNSRERMKRIEEGIKELGSQILKEHPVENTQLQNEKLYLYYLQNGRDMYVDQELDINRLSDYDVDHIVPQSFLKDDSIDNKVLTRSDKARGKSDNVPSEEVVKKMKNYWRQLLNAKLITQRKFDNLTKAERGGLSELDKAGFIKRQLVETRQITKHVAQILDSRMNTKYDENDKLIREVKVITLKSKLVSDFRKDFQFYKVREINNYHHAHDAYLNAVVGTALIKKYPKLESEFVYGDYKVYDVRKMIAKSEQEIGKATAKYFFYSNIMNFFKTEITLANGEIRKRPLIETNGETGEIVWDKGRDFATVRKVLSMPQVNIVKKTEVQTGGFSKESILPKRNSDKLIARKKDWDPKKYGGFDSPTVAYSVLVVAKVEKGKSKKLKSVKELLGITIMERSSFEKNPIDFLEAKGYKEVKKDLIIKLPKYSLFELENGRKRMLASAGELQKGNELALPSKYVNFLYLASHYEKLKGSPEDNEQKQLFVEQHKHYLDEIIEQISEFSKRVILADANLDKVLSAYNKHRDKPIREQAENIIHLFTLTNLGAPAAFKYFDTTIDRKRYTSTKEVLDATLIHQSITGLYETRIDLSQLGGDGGGGGGGGGGGTLNIEDEYRLHETSKEPDVSLGSTWLSDFPQAWAETGGMGLAVRQAPLIIPLKATSTPVSIKQYPMSQEARLGIKPHIQRLLDQGILVPCQSPWNTPLLPVKKPGTNDYRPVQDLREVNKRVEDIHPTVPNPYNLLSGLPPSHQWYTVLDLKDAFFCLRLHPTSQPLFAFEWRDPEMGISGQLTWTRLPQGFKNSPTLFNEALHRDLAGFRIQHPDLILLQYVDDLLLAATSELDCQQGTRALLQTLGDLGYRASAKKAQICQKQVKYLGYLLKEGQRWLTEARKETVMGQPIPKTPRQLREFLGKAGFCRLFIPGFAEMAAPLYPLTKPGTLFNWGPDQQKAFQEIKQALLTAPALGLPDLTKPFELFVDEKQGYAKGVLTQKLGPWRRPVAYLSKKLDPVAAGWPPCLRMVAAIAVLTKDAGKLTMGQPLVILAPHAVEALVKQPPDRWLSNARMTHYQALLLDTDRVQFGPVVALNPATLLPLPEEGLQHDCLDILAEAHGTRSDLMDQPLPDADHTWYTDGSSFLQEGQRKAGAAVTTETEVIWARALPAGTSAQRAELIALTQALKMAEGKKLNVYTDSRYAFATAHIHGEIYRRRGWLTSEGKEIKNKDEILALLKALFLPKRLSIIHCPGHQKGNSAEARGNRMADQAAREVATRETPETSTLLAGKRTADGSEFEKRTADGSEFESPKKKAKVE

SEQ ID NO: 2308 - protein, 2094 aa, synthetic construct
MPAAKRVKLDGGDKKYSIGLDIGTNSVGWAVITDEYKVPSKKFKVLGNTDRHSIKKNLIGALLFDSGETAEATRLKRTARRRYTRRKNRICYLQEIFSNEMAKVDDSFFHRLEESFLVEEDKKHERHPIFGNIVDEVAYHEKYPTIYHLRKKLVDSTDKADLRLIYLALAHMIKFRGHFLIEGDLNPDNSDVDKLFIQLVQTYNQLFEENPINASGVDAKAILSARLSKSRRLENLIAQLPGEKKNGLFGNLIALSLGLTPNFKSNFDLAEDAKLQLSKDTYDDDLDNLLAQIGDQYADLFLAAKNLSDAILLSDILRVNTEITKAPLSASMIKRYDEHHQDLTLLKALVRQQLPEKYKEIFFDQSKNGYAGYIDGGASQEEFYKFIKPILEKMDGTEELLVKLNREDLLRKQRTFDNGSIPHQIHLGELHAILRRQEDFYPFLKDNREKIEKILTFRIPYYVGPLARGNSRFAWMTRKSEETITPWNFEEVVDKGASAQSFIERMTNFDKNLPNEKVLPKHSLLYEYFTVYNELTKVKYVTEGMRKPAFLSGEQKKAIVDLLFKTNRKVTVKQLKEDYFKKIECFDSVEISGVEDRFNASLGTYHDLLKIIKDKDFLDNEENEDILEDIVLTLTLFEDREMIEERLKTYAHLFDDKVMKQLKRRRYTGWGRLSRKLINGIRDKQSGKTILDFLKSDGFANRNFMQLIHDDSLTFKEDIQKAQVSGQGDSLHEHIANLAGSPAIKKGILQTVKVVDELVKVMGRHKPENIVIEMARENQTTQKGQKNSRERMKRIEEGIKELGSQILKEHPVENTQLQNEKLYLYYLQNGRDMYVDQELDINRLSDYDVDHIVPQSFLKDDSIDNKVLTRSDKARGKSDNVPSEEVVKKMKNYWRQLLNAKLITQRKFDNLTKAERGGLSELDKAGFIKRQLVETRQITKHVAQILDSRMNTKYDENDKLIREVKVITLKSKLVSDFRKDFQFYKVREINNYHHAHDAYLNAVVGTALIKKYPKLESEFVYGDYKVYDVRKMIAKSEQEIGKATAKYFFYSNIMNFFKTEITLANGEIRKRPLIETNGETGEIVWDKGRDFATVRKVLSMPQVNIVKKTEVQTGGFSKESILPKRNSDKLIARKKDWDPKKYGGFDSPTVAYSVLVVAKVEKGKSKKLKSVKELLGITIMERSSFEKNPIDFLEAKGYKEVKKDLIIKLPKYSLFELENGRKRMLASAGELQKGNELALPSKYVNFLYLASHYEKLKGSPEDNEQKQLFVEQHKHYLDEIIEQISEFSKRVILADANLDKVLSAYNKHRDKPIREQAENIIHLFTLTNLGAPAAFKYFDTTIDRKRYTSTKEVLDATLIHQSITGLYETRIDLSQLGGDGGPAPGGGGSSGGTLNIEDEYRLHETSKEPDVSLGSTWLSDFPQAWAETGGMGLAVRQAPLIIPLKATSTPVSIKQYPMSQEARLGIKPHIQRLLDQGILVPCQSPWNTPLLPVKKPGTNDYRPVQDLREVNKRVEDIHPTVPNPYNLLSGLPPSHQWYTVLDLKDAFFCLRLHPTSQPLFAFEWRDPEMGISGQLTWTRLPQGFKNSPTLFNEALHRDLAGFRIQHPDLILLQYVDDLLLAATSELDCQQGTRALLQTLGDLGYRASAKKAQICQKQVKYLGYLLKEGQRWLTEARKETVMGQPIPKTPRQLREFLGKAGFCRLFIPGFAEMAAPLYPLTKPGTLFNWGPDQQKAFQEIKQALLTAPALGLPDLTKPFELFVDEKQGYAKGVLTQKLGPWRRPVAYLSKKLDPVAAGWPPCLRMVAAIAVLTKDAGKLTMGQPLVILAPHAVEALVKQPPDRWLSNARMTHYQALLLDTDRVQFGPVVALNPATLLPLPEEGLQHDCLDILAEAHGTRSDLMDQPLPDADHTWYTDGSSFLQEGQRKAGAAVTTETEVIWARALPAGTSAQRAELIALTQALKMAEGKKLNVYTDSRYAFATAHIHGEIYRRRGWLTSEGKEIKNKDEILALLKALFLPKRLSIIHCPGHQKGNSAEARGNRMADQAAREVATRETPETSTLLAGKRTADGSEFEKRTADGSEFESPKKKAKVE

SEQ ID NO: 2309 - protein, 2098 aa, synthetic construct
MPAAKRVKLDGGDKKYSIGLDIGTNSVGWAVITDEYKVPSKKFKVLGNTDRHSIKKNLIGALLFDSGETAEATRLKRTARRRYTRRKNRICYLQEIFSNEMAKVDDSFFHRLEESFLVEEDKKHERHPIFGNIVDEVAYHEKYPTIYHLRKKLVDSTDKADLRLIYLALAHMIKFRGHFLIEGDLNPDNSDVDKLFIQLVQTYNQLFEENPINASGVDAKAILSARLSKSRRLENLIAQLPGEKKNGLFGNLIALSLGLTPNFKSNFDLAEDAKLQLSKDTYDDDLDNLLAQIGDQYADLFLAAKNLSDAILLSDILRVNTEITKAPLSASMIKRYDEHHQDLTLLKALVRQQLPEKYKEIFFDQSKNGYAGYIDGGASQEEFYKFIKPILEKMDGTEELLVKLNREDLLRKQRTFDNGSIPHQIHLGELHAILRRQEDFYPFLKDNREKIEKILTFRIPYYVGPLARGNSRFAWMTRKSEETITPWNFEEVVDKGASAQSFIERMTNFDKNLPNEKVLPKHSLLYEYFTVYNELTKVKYVTEGMRKPAFLSGEQKKAIVDLLFKTNRKVTVKQLKEDYFKKIECFDSVEISGVEDRFNASLGTYHDLLKIIKDKDFLDNEENEDILEDIVLTLTLFEDREMIEERLKTYAHLFDDKVMKQLKRRRYTGWGRLSRKLINGIRDKQSGKTILDFLKSDGFANRNFMQLIHDDSLTFKEDIQKAQVSGQGDSLHEHIANLAGSPAIKKGILQTVKVVDELVKVMGRHKPENIVIEMARENQTTQKGQKNSRERMKRIEEGIKELGSQILKEHPVENTQLQNEKLYLYYLQNGRDMYVDQELDINRLSDYDVDHIVPQSFLKDDSIDNKVLTRSDKARGKSDNVPSEEVVKKMKNYWRQLLNAKLITQRKFDNLTKAERGGLSELDKAGFIKRQLVETRQITKHVAQILDSRMNTKYDENDKLIREVKVITLKSKLVSDFRKDFQFYKVREINNYHHAHDAYLNAVVGTALIKKYPKLESEFVYGDYKVYDVRKMIAKSEQEIGKATAKYFFYSNIMNFFKTEITLANGEIRKRPLIETNGETGEIVWDKGRDFATVRKVLSMPQVNIVKKTEVQTGGFSKESILPKRNSDKLIARKKDWDPKKYGGFDSPTVAYSVLVVAKVEKGKSKKLKSVKELLGITIMERSSFEKNPIDFLEAKGYKEVKKDLIIKLPKYSLFELENGRKRMLASAGELQKGNELALPSKYVNFLYLASHYEKLKGSPEDNEQKQLFVEQHKHYLDEIIEQISEFSKRVILADANLDKVLSAYNKHRDKPIREQAENIIHLFTLTNLGAPAAFKYFDTTIDRKRYTSTKEVLDATLIHQSITGLYETRIDLSQLGGDGGPAPAPAPAPAPAPGGTLNIEDEYRLHETSKEPDVSLGSTWLSDFPQAWAETGGMGLAVRQAPLIIPLKATSTPVSIKQYPMSQEARLGIKPHIQRLLDQGILVPCQSPWNTPLLPVKKPGTNDYRPVQDLREVNKRVEDIHPTVPNPYNLLSGLPPSHQWYTVLDLKDAFFCLRLHPTSQPLFAFEWRDPEMGISGQLTWTRLPQGFKNSPTLFNEALHRDLAGFRIQHPDLILLQYVDDLLLAATSELDCQQGTRALLQTLGDLGYRASAKKAQICQKQVKYLGYLLKEGQRWLTEARKETVMGQPIPKTPRQLREFLGKAGFCRLFIPGFAEMAAPLYPLTKPGTLFNWGPDQQKAFQEIKQALLTAPALGLPDLTKPFELFVDEKQGYAKGVLTQKLGPWRRPVAYLSKKLDPVAAGWPPCLRMVAAIAVLTKDAGKLTMGQPLVILAPHAVEALVKQPPDRWLSNARMTHYQALLLDTDRVQFGPVVALNPATLLPLPEEGLQHDCLDILAEAHGTRSDLMDQPLPDADHTWYTDGSSFLQEGQRKAGAAVTTETEVIWARALPAGTSAQRAELIALTQALKMAEGKKLNVYTDSRYAFATAHIHGEIYRRRGWLTSEGKEIKNKDEILALLKALFLPKRLSIIHCPGHQKGNSAEARGNRMADQAAREVATRETPETSTLLAGKRTADGSEFEKRTADGSEFESPKKKAKVE

SEQ ID NO: 2310 - protein, 2100 aa, synthetic construct
MPAAKRVKLDGGDKKYSIGLDIGTNSVGWAVITDEYKVPSKKFKVLGNTDRHSIKKNLIGALLFDSGETAEATRLKRTARRRYTRRKNRICYLQEIFSNEMAKVDDSFFHRLEESFLVEEDKKHERHPIFGNIVDEVAYHEKYPTIYHLRKKLVDSTDKADLRLIYLALAHMIKFRGHFLIEGDLNPDNSDVDKLFIQLVQTYNQLFEENPINASGVDAKAILSARLSKSRRLENLIAQLPGEKKNGLFGNLIALSLGLTPNFKSNFDLAEDAKLQLSKDTYDDDLDNLLAQIGDQYADLFLAAKNLSDAILLSDILRVNTEITKAPLSASMIKRYDEHHQDLTLLKALVRQQLPEKYKEIFFDQSKNGYAGYIDGGASQEEFYKFIKPILEKMDGTEELLVKLNREDLLRKQRTFDNGSIPHQIHLGELHAILRRQEDFYPFLKDNREKIEKILTFRIPYYVGPLARGNSRFAWMTRKSEETITPWNFEEVVDKGASAQSFIERMTNFDKNLPNEKVLPKHSLLYEYFTVYNELTKVKYVTEGMRKPAFLSGEQKKAIVDLLFKTNRKVTVKQLKEDYFKKIECFDSVEISGVEDRFNASLGTYHDLLKIIKDKDFLDNEENEDILEDIVLTLTLFEDREMIEERLKTYAHLFDDKVMKQLKRRRYTGWGRLSRKLINGIRDKQSGKTILDFLKSDGFANRNFMQLIHDDSLTFKEDIQKAQVSGQGDSLHEHIANLAGSPAIKKGILQTVKVVDELVKVMGRHKPENIVIEMARENQTTQKGQKNSRERMKRIEEGIKELGSQILKEHPVENTQLQNEKLYLYYLQNGRDMYVDQELDINRLSDYDVDHIVPQSFLKDDSIDNKVLTRSDKARGKSDNVPSEEVVKKMKNYWRQLLNAKLITQRKFDNLTKAERGGLSELDKAGFIKRQLVETRQITKHVAQILDSRMNTKYDENDKLIREVKVITLKSKLVSDFRKDFQFYKVREINNYHHAHDAYLNAVVGTALIKKYPKLESEFVYGDYKVYDVRKMIAKSEQEIGKATAKYFFYSNIMNFFKTEITLANGEIRKRPLIETNGETGEIVWDKGRDFATVRKVLSMPQVNIVKKTEVQTGGFSKESILPKRNSDKLIARKKDWDPKKYGGFDSPTVAYSVLVVAKVEKGKSKKLKSVKELLGITIMERSSFEKNPIDFLEAKGYKEVKKDLIIKLPKYSLFELENGRKRMLASAGELQKGNELALPSKYVNFLYLASHYEKLKGSPEDNEQKQLFVEQHKHYLDEIIEQISEFSKRVILADANLDKVLSAYNKHRDKPIREQAENIIHLFTLTNLGAPAAFKYFDTTIDRKRYTSTKEVLDATLIHQSITGLYETRIDLSQLGGDGGGGSGGSGGSGGSGGSGGTLNIEDEYRLHETSKEPDVSLGSTWLSDFPQAWAETGGMGLAVRQAPLIIPLKATSTPVSIKQYPMSQEARLGIKPHIQRLLDQGILVPCQSPWNTPLLPVKKPGTNDYRPVQDLREVNKRVEDIHPTVPNPYNLLSGLPPSHQWYTVLDLKDAFFCLRLHPTSQPLFAFEWRDPEMGISGQLTWTRLPQGFKNSPTLFNEALHRDLAGFRIQHPDLILLQYVDDLLLAATSELDCQQGTRALLQTLGDLGYRASAKKAQICQKQVKYLGYLLKEGQRWLTEARKETVMGQPIPKTPRQLREFLGKAGFCRLFIPGFAEMAAPLYPLTKPGTLFNWGPDQQKAFQEIKQALLTAPALGLPDLTKPFELFVDEKQGYAKGVLTQKLGPWRRPVAYLSKKLDPVAAGWPPCLRMVAAIAVLTKDAGKLTMGQPLVILAPHAVEALVKQPPDRWLSNARMTHYQALLLDTDRVQFGPVVALNPATLLPLPEEGLQHDCLDILAEAHGTRSDLMDQPLPDADHTWYTDGSSFLQEGQRKAGAAVTTETEVIWARALPAGTSAQRAELIALTQALKMAEGKKLNVYTDSRYAFATAHIHGEIYRRRGWLTSEGKEIKNKDEILALLKALFLPKRLSIIHCPGHQKGNSAEARGNRMADQAAREVATRETPETSTLLAGKRTADGSEFEKRTADGSEFESPKKKAKVE

SEQ ID NO: 2311 - protein, 2105 aa, synthetic construct
MPAAKRVKLDGGDKKYSIGLDIGTNSVGWAVITDEYKVPSKKFKVLGNTDRHSIKKNLIGALLFDSGETAEATRLKRTARRRYTRRKNRICYLQEIFSNEMAKVDDSFFHRLEESFLVEEDKKHERHPIFGNIVDEVAYHEKYPTIYHLRKKLVDSTDKADLRLIYLALAHMIKFRGHFLIEGDLNPDNSDVDKLFIQLVQTYNQLFEENPINASGVDAKAILSARLSKSRRLENLIAQLPGEKKNGLFGNLIALSLGLTPNFKSNFDLAEDAKLQLSKDTYDDDLDNLLAQIGDQYADLFLAAKNLSDAILLSDILRVNTEITKAPLSASMIKRYDEHHQDLTLLKALVRQQLPEKYKEIFFDQSKNGYAGYIDGGASQEEFYKFIKPILEKMDGTEELLVKLNREDLLRKQRTFDNGSIPHQIHLGELHAILRRQEDFYPFLKDNREKIEKILTFRIPYYVGPLARGNSRFAWMTRKSEETITPWNFEEVVDKGASAQSFIERMTNFDKNLPNEKVLPKHSLLYEYFTVYNELTKVKYVTEGMRKPAFLSGEQKKAIVDLLFKTNRKVTVKQLKEDYFKKIECFDSVEISGVEDRFNASLGTYHDLLKIIKDKDFLDNEENEDILEDIVLTLTLFEDREMIEERLKTYAHLFDDKVMKQLKRRRYTGWGRLSRKLINGIRDKQSGKTILDFLKSDGFANRNFMQLIHDDSLTFKEDIQKAQVSGQGDSLHEHIANLAGSPAIKKGILQTVKVVDELVKVMGRHKPENIVIEMARENQTTQKGQKNSRERMKRIEEGIKELGSQILKEHPVENTQLQNEKLYLYYLQNGRDMYVDQELDINRLSDYDVDHIVPQSFLKDDSIDNKVLTRSDKARGKSDNVPSEEVVKKMKNYWRQLLNAKLITQRKFDNLTKAERGGLSELDKAGFIKRQLVETRQITKHVAQILDSRMNTKYDENDKLIREVKVITLKSKLVSDFRKDFQFYKVREINNYHHAHDAYLNAVVGTALIKKYPKLESEFVYGDYKVYDVRKMIAKSEQEIGKATAKYFFYSNIMNFFKTEITLANGEIRKRPLIETNGETGEIVWDKGRDFATVRKVLSMPQVNIVKKTEVQTGGFSKESILPKRNSDKLIARKKDWDPKKYGGFDSPTVAYSVLVVAKVEKGKSKKLKSVKELLGITIMERSSFEKNPIDFLEAKGYKEVKKDLIIKLPKYSLFELENGRKRMLASAGELQKGNELALPSKYVNFLYLASHYEKLKGSPEDNEQKQLFVEQHKHYLDEIIEQISEFSKRVILADANLDKVLSAYNKHRDKPIREQAENIIHLFTLTNLGAPAAFKYFDTTIDRKRYTSTKEVLDATLIHQSITGLYETRIDLSQLGGDGGGGGGSGGGGSGGGGSGGGGSGGTLNIEDEYRLHETSKEPDVSLGSTWLSDFPQAWAETGGMGLAVRQAPLIIPLKATSTPVSIKQYPMSQEARLGIKPHIQRLLDQGILVPCQSPWNTPLLPVKKPGTNDYRPVQDLREVNKRVEDIHPTVPNPYNLLSGLPPSHQWYTVLDLKDAFFCLRLHPTSQPLFAFEWRDPEMGISGQLTWTRLPQGFKNSPTLFNEALHRDLAGFRIQHPDLILLQYVDDLLLAATSELDCQQGTRALLQTLGDLGYRASAKKAQICQKQVKYLGYLLKEGQRWLTEARKETVMGQPIPKTPRQLREFLGKAGFCRLFIPGFAEMAAPLYPLTKPGTLFNWGPDQQKAFQEIKQALLTAPALGLPDLTKPFELFVDEKQGYAKGVLTQKLGPWRRPVAYLSKKLDPVAAGWPPCLRMVAAIAVLTKDAGKLTMGQPLVILAPHAVEALVKQPPDRWLSNARMTHYQALLLDTDRVQFGPVVALNPATLLPLPEEGLQHDCLDILAEAHGTRSDLMDQPLPDADHTWYTDGSSFLQEGQRKAGAAVTTETEVIWARALPAGTSAQRAELIALTQALKMAEGKKLNVYTDSRYAFATAHIHGEIYRRRGWLTSEGKEIKNKDEILALLKALFLPKRLSIIHCPGHQKGNSAEARGNRMADQAAREVATRETPETSTLLAGKRTADGSEFEKRTADGSEFESPKKKAKVE

SEQ ID NO: 2312 - protein, 2094 aa, synthetic construct
MPAAKRVKLDGGDKKYSIGLDIGTNSVGWAVITDEYKVPSKKFKVLGNTDRHSIKKNLIGALLFDSGETAEATRLKRTARRRYTRRKNRICYLQEIFSNEMAKVDDSFFHRLEESFLVEEDKKHERHPIFGNIVDEVAYHEKYPTIYHLRKKLVDSTDKADLRLIYLALAHMIKFRGHFLIEGDLNPDNSDVDKLFIQLVQTYNQLFEENPINASGVDAKAILSARLSKSRRLENLIAQLPGEKKNGLFGNLIALSLGLTPNFKSNFDLAEDAKLQLSKDTYDDDLDNLLAQIGDQYADLFLAAKNLSDAILLSDILRVNTEITKAPLSASMIKRYDEHHQDLTLLKALVRQQLPEKYKEIFFDQSKNGYAGYIDGGASQEEFYKFIKPILEKMDGTEELLVKLNREDLLRKQRTFDNGSIPHQIHLGELHAILRRQEDFYPFLKDNREKIEKILTFRIPYYVGPLARGNSRFAWMTRKSEETITPWNFEEVVDKGASAQSFIERMTNFDKNLPNEKVLPKHSLLYEYFTVYNELTKVKYVTEGMRKPAFLSGEQKKAIVDLLFKTNRKVTVKQLKEDYFKKIECFDSVEISGVEDRFNASLGTYHDLLKIIKDKDFLDNEENEDILEDIVLTLTLFEDREMIEERLKTYAHLFDDKVMKQLKRRRYTGWGRLSRKLINGIRDKQSGKTILDFLKSDGFANRNFMQLIHDDSLTFKEDIQKAQVSGQGDSLHEHIANLAGSPAIKKGILQTVKVVDELVKVMGRHKPENIVIEMARENQTTQKGQKNSRERMKRIEEGIKELGSQILKEHPVENTQLQNEKLYLYYLQNGRDMYVDQELDINRLSDYDVDHIVPQSFLKDDSIDNKVLTRSDKARGKSDNVPSEEVVKKMKNYWRQLLNAKLITQRKFDNLTKAERGGLSELDKAGFIKRQLVETRQITKHVAQILDSRMNTKYDENDKLIREVKVITLKSKLVSDFRKDFQFYKVREINNYHHAHDAYLNAVVGTALIKKYPKLESEFVYGDYKVYDVRKMIAKSEQEIGKATAKYFFYSNIMNFFKTEITLANGEIRKRPLIETNGETGEIVWDKGRDFATVRKVLSMPQVNIVKKTEVQTGGFSKESILPKRNSDKLIARKKDWDPKKYGGFDSPTVAYSVLVVAKVEKGKSKKLKSVKELLGITIMERSSFEKNPIDFLEAKGYKEVKKDLIIKLPKYSLFELENGRKRMLASAGELQKGNELALPSKYVNFLYLASHYEKLKGSPEDNEQKQLFVEQHKHYLDEIIEQISEFSKRVILADANLDKVLSAYNKHRDKPIREQAENIIHLFTLTNLGAPAAFKYFDTTIDRKRYTSTKEVLDATLIHQSITGLYETRIDLSQLGGDGGGGGGGSGSSGGTLNIEDEYRLHETSKEPDVSLGSTWLSDFPQAWAETGGMGLAVRQAPLIIPLKATSTPVSIKQYPMSQEARLGIKPHIQRLLDQGILVPCQSPWNTPLLPVKKPGTNDYRPVQDLREVNKRVEDIHPTVPNPYNLLSGLPPSHQWYTVLDLKDAFFCLRLHPTSQPLFAFEWRDPEMGISGQLTWTRLPQGFKNSPTLFNEALHRDLAGFRIQHPDLILLQYVDDLLLAATSELDCQQGTRALLQTLGDLGYRASAKKAQICQKQVKYLGYLLKEGQRWLTEARKETVMGQPIPKTPRQLREFLGKAGFCRLFIPGFAEMAAPLYPLTKPGTLFNWGPDQQKAFQEIKQALLTAPALGLPDLTKPFELFVDEKQGYAKGVLTQKLGPWRRPVAYLSKKLDPVAAGWPPCLRMVAAIAVLTKDAGKLTMGQPLVILAPHAVEALVKQPPDRWLSNARMTHYQALLLDTDRVQFGPVVALNPATLLPLPEEGLQHDCLDILAEAHGTRSDLMDQPLPDADHTWYTDGSSFLQEGQRKAGAAVTTETEVIWARALPAGTSAQRAELIALTQALKMAEGKKLNVYTDSRYAFATAHIHGEIYRRRGWLTSEGKEIKNKDEILALLKALFLPKRLSIIHCPGHQKGNSAEARGNRMADQAAREVATRETPETSTLLAGKRTADGSEFEKRTADGSEFESPKKKAKVE

SEQ ID NO: 2313 - protein, 2097 aa, synthetic construct
MPAAKRVKLDGGDKKYSIGLDIGTNSVGWAVITDEYKVPSKKFKVLGNTDRHSIKKNLIGALLFDSGETAEATRLKRTARRRYTRRKNRICYLQEIFSNEMAKVDDSFFHRLEESFLVEEDKKHERHPIFGNIVDEVAYHEKYPTIYHLRKKLVDSTDKADLRLIYLALAHMIKFRGHFLIEGDLNPDNSDVDKLFIQLVQTYNQLFEENPINASGVDAKAILSARLSKSRRLENLIAQLPGEKKNGLFGNLIALSLGLTPNFKSNFDLAEDAKLQLSKDTYDDDLDNLLAQIGDQYADLFLAAKNLSDAILLSDILRVNTEITKAPLSASMIKRYDEHHQDLTLLKALVRQQLPEKYKEIFFDQSKNGYAGYIDGGASQEEFYKFIKPILEKMDGTEELLVKLNREDLLRKQRTFDNGSIPHQIHLGELHAILRRQEDFYPFLKDNREKIEKILTFRIPYYVGPLARGNSRFAWMTRKSEETITPWNFEEVVDKGASAQSFIERMTNFDKNLPNEKVLPKHSLLYEYFTVYNELTKVKYVTEGMRKPAFLSGEQKKAIVDLLFKTNRKVTVKQLKEDYFKKIECFDSVEISGVEDRFNASLGTYHDLLKIIKDKDFLDNEENEDILEDIVLTLTLFEDREMIEERLKTYAHLFDDKVMKQLKRRRYTGWGRLSRKLINGIRDKQSGKTILDFLKSDGFANRNFMQLIHDDSLTFKEDIQKAQVSGQGDSLHEHIANLAGSPAIKKGILQTVKVVDELVKVMGRHKPENIVIEMARENQTTQKGQKNSRERMKRIEEGIKELGSQILKEHPVENTQLQNEKLYLYYLQNGRDMYVDQELDINRLSDYDVDHIVPQSFLKDDSIDNKVLTRSDKARGKSDNVPSEEVVKKMKNYWRQLLNAKLITQRKFDNLTKAERGGLSELDKAGFIKRQLVETRQITKHVAQILDSRMNTKYDENDKLIREVKVITLKSKLVSDFRKDFQFYKVREINNYHHAHDAYLNAVVGTALIKKYPKLESEFVYGDYKVYDVRKMIAKSEQEIGKATAKYFFYSNIMNFFKTEITLANGEIRKRPLIETNGETGEIVWDKGRDFATVRKVLSMPQVNIVKKTEVQTGGFSKESILPKRNSDKLIARKKDWDPKKYGGFDSPTVAYSVLVVAKVEKGKSKKLKSVKELLGITIMERSSFEKNPIDFLEAKGYKEVKKDLIIKLPKYSLFELENGRKRMLASAGELQKGNELALPSKYVNFLYLASHYEKLKGSPEDNEQKQLFVEQHKHYLDEIIEQISEFSKRVILADANLDKVLSAYNKHRDKPIREQAENIIHLFTLTNLGAPAAFKYFDTTIDRKRYTSTKEVLDATLIHQSITGLYETRIDLSQLGGDGGGSAGSAAGSGEFGGTLNIEDEYRLHETSKEPDVSLGSTWLSDFPQAWAETGGMGLAVRQAPLIIPLKATSTPVSIKQYPMSQEARLGIKPHIQRLLDQGILVPCQSPWNTPLLPVKKPGTNDYRPVQDLREVNKRVEDIHPTVPNPYNLLSGLPPSHQWYTVLDLKDAFFCLRLHPTSQPLFAFEWRDPEMGISGQLTWTRLPQGFKNSPTLFNEALHRDLAGFRIQHPDLILLQYVDDLLLAATSELDCQQGTRALLQTLGDLGYRASAKKAQICQKQVKYLGYLLKEGQRWLTEARKETVMGQPIPKTPRQLREFLGKAGFCRLFIPGFAEMAAPLYPLTKPGTLFNWGPDQQKAFQEIKQALLTAPALGLPDLTKPFELFVDEKQGYAKGVLTQKLGPWRRPVAYLSKKLDPVAAGWPPCLRMVAAIAVLTKDAGKLTMGQPLVILAPHAVEALVKQPPDRWLSNARMTHYQALLLDTDRVQFGPVVALNPATLLPLPEEGLQHDCLDILAEAHGTRSDLMDQPLPDADHTWYTDGSSFLQEGQRKAGAAVTTETEVIWARALPAGTSAQRAELIALTQALKMAEGKKLNVYTDSRYAFATAHIHGEIYRRRGWLTSEGKEIKNKDEILALLKALFLPKRLSIIHCPGHQKGNSAEARGNRMADQAAREVATRETPETSTLLAGKRTADGSEFEKRTADGSEFESPKKKAKVE

SEQ ID NO: 2314 - protein, 2096 aa, synthetic construct
MPAAKRVKLDGGDKKYSIGLDIGTNSVGWAVITDEYKVPSKKFKVLGNTDRHSIKKNLIGALLFDSGETAEATRLKRTARRRYTRRKNRICYLQEIFSNEMAKVDDSFFHRLEESFLVEEDKKHERHPIFGNIVDEVAYHEKYPTIYHLRKKLVDSTDKADLRLIYLALAHMIKFRGHFLIEGDLNPDNSDVDKLFIQLVQTYNQLFEENPINASGVDAKAILSARLSKSRRLENLIAQLPGEKKNGLFGNLIALSLGLTPNFKSNFDLAEDAKLQLSKDTYDDDLDNLLAQIGDQYADLFLAAKNLSDAILLSDILRVNTEITKAPLSASMIKRYDEHHQDLTLLKALVRQQLPEKYKEIFFDQSKNGYAGYIDGGASQEEFYKFIKPILEKMDGTEELLVKLNREDLLRKQRTFDNGSIPHQIHLGELHAILRRQEDFYPFLKDNREKIEKILTFRIPYYVGPLARGNSRFAWMTRKSEETITPWNFEEVVDKGASAQSFIERMTNFDKNLPNEKVLPKHSLLYEYFTVYNELTKVKYVTEGMRKPAFLSGEQKKAIVDLLFKTNRKVTVKQLKEDYFKKIECFDSVEISGVEDRFNASLGTYHDLLKIIKDKDFLDNEENEDILEDIVLTLTLFEDREMIEERLKTYAHLFDDKVMKQLKRRRYTGWGRLSRKLINGIRDKQSGKTILDFLKSDGFANRNFMQLIHDDSLTFKEDIQKAQVSGQGDSLHEHIANLAGSPAIKKGILQTVKVVDELVKVMGRHKPENIVIEMARENQTTQKGQKNSRERMKRIEEGIKELGSQILKEHPVENTQLQNEKLYLYYLQNGRDMYVDQELDINRLSDYDVDHIVPQSFLKDDSIDNKVLTRSDKARGKSDNVPSEEVVKKMKNYWRQLLNAKLITQRKFDNLTKAERGGLSELDKAGFIKRQLVETRQITKHVAQILDSRMNTKYDENDKLIREVKVITLKSKLVSDFRKDFQFYKVREINNYHHAHDAYLNAVVGTALIKKYPKLESEFVYGDYKVYDVRKMIAKSEQEIGKATAKYFFYSNIMNFFKTEITLANGEIRKRPLIETNGETGEIVWDKGRDFATVRKVLSMPQVNIVKKTEVQTGGFSKESILPKRNSDKLIARKKDWDPKKYGGFDSPTVAYSVLVVAKVEKGKSKKLKSVKELLGITIMERSSFEKNPIDFLEAKGYKEVKKDLIIKLPKYSLFELENGRKRMLASAGELQKGNELALPSKYVNFLYLASHYEKLKGSPEDNEQKQLFVEQHKHYLDEIIEQISEFSKRVILADANLDKVLSAYNKHRDKPIREQAENIIHLFTLTNLGAPAAFKYFDTTIDRKRYTSTKEVLDATLIHQSITGLYETRIDLSQLGGDGGPAPEAAAKGGSGGTLNIEDEYRLHETSKEPDVSLGSTWLSDFPQAWAETGGMGLAVRQAPLIIPLKATSTPVSIKQYPMSQEARLGIKPHIQRLLDQGILVPCQSPWNTPLLPVKKPGTNDYRPVQDLREVNKRVEDIHPTVPNPYNLLSGLPPSHQWYTVLDLKDAFFCLRLHPTSQPLFAFEWRDPEMGISGQLTWTRLPQGFKNSPTLFNEALHRDLAGFRIQHPDLILLQYVDDLLLAATSELDCQQGTRALLQTLGDLGYRASAKKAQICQKQVKYLGYLLKEGQRWLTEARKETVMGQPIPKTPRQLREFLGKAGFCRLFIPGFAEMAAPLYPLTKPGTLFNWGPDQQKAFQEIKQALLTAPALGLPDLTKPFELFVDEKQGYAKGVLTQKLGPWRRPVAYLSKKLDPVAAGWPPCLRMVAAIAVLTKDAGKLTMGQPLVILAPHAVEALVKQPPDRWLSNARMTHYQALLLDTDRVQFGPVVALNPATLLPLPEEGLQHDCLDILAEAHGTRSDLMDQPLPDADHTWYTDGSSFLQEGQRKAGAAVTTETEVIWARALPAGTSAQRAELIALTQALKMAEGKKLNVYTDSRYAFATAHIHGEIYRRRGWLTSEGKEIKNKDEILALLKALFLPKRLSIIHCPGHQKGNSAEARGNRMADQAAREVATRETPETSTLLAGKRTADGSEFEKRTADGSEFESPKKKAKVE

SEQ ID NO: 2315 - protein, 2096 aa, synthetic construct
MPAAKRVKLDGGDKKYSIGLDIGTNSVGWAVITDEYKVPSKKFKVLGNTDRHSIKKNLIGALLFDSGETAEATRLKRTARRRYTRRKNRICYLQEIFSNEMAKVDDSFFHRLEESFLVEEDKKHERHPIFGNIVDEVAYHEKYPTIYHLRKKLVDSTDKADLRLIYLALAHMIKFRGHFLIEGDLNPDNSDVDKLFIQLVQTYNQLFEENPINASGVDAKAILSARLSKSRRLENLIAQLPGEKKNGLFGNLIALSLGLTPNFKSNFDLAEDAKLQLSKDTYDDDLDNLLAQIGDQYADLFLAAKNLSDAILLSDILRVNTEITKAPLSASMIKRYDEHHQDLTLLKALVRQQLPEKYKEIFFDQSKNGYAGYIDGGASQEEFYKFIKPILEKMDGTEELLVKLNREDLLRKQRTFDNGSIPHQIHLGELHAILRRQEDFYPFLKDNREKIEKILTFRIPYYVGPLARGNSRFAWMTRKSEETITPWNFEEVVDKGASAQSFIERMTNFDKNLPNEKVLPKHSLLYEYFTVYNELTKVKYVTEGMRKPAFLSGEQKKAIVDLLFKTNRKVTVKQLKEDYFKKIECFDSVEISGVEDRFNASLGTYHDLLKIIKDKDFLDNEENEDILEDIVLTLTLFEDREMIEERLKTYAHLFDDKVMKQLKRRRYTGWGRLSRKLINGIRDKQSGKTILDFLKSDGFANRNFMQLIHDDSLTFKEDIQKAQVSGQGDSLHEHIANLAGSPAIKKGILQTVKVVDELVKVMGRHKPENIVIEMARENQTTQKGQKNSRERMKRIEEGIKELGSQILKEHPVENTQLQNEKLYLYYLQNGRDMYVDQELDINRLSDYDVDHIVPQSFLKDDSIDNKVLTRSDKARGKSDNVPSEEVVKKMKNYWRQLLNAKLITQRKFDNLTKAERGGLSELDKAGFIKRQLVETRQITKHVAQILDSRMNTKYDENDKLIREVKVITLKSKLVSDFRKDFQFYKVREINNYHHAHDAYLNAVVGTALIKKYPKLESEFVYGDYKVYDVRKMIAKSEQEIGKATAKYFFYSNIMNFFKTEITLANGEIRKRPLIETNGETGEIVWDKGRDFATVRKVLSMPQVNIVKKTEVQTGGFSKESILPKRNSDKLIARKKDWDPKKYGGFDSPTVAYSVLVVAKVEKGKSKKLKSVKELLGITIMERSSFEKNPIDFLEAKGYKEVKKDLIIKLPKYSLFELENGRKRMLASAGELQKGNELALPSKYVNFLYLASHYEKLKGSPEDNEQKQLFVEQHKHYLDEIIEQISEFSKRVILADANLDKVLSAYNKHRDKPIREQAENIIHLFTLTNLGAPAAFKYFDTTIDRKRYTSTKEVLDATLIHQSITGLYETRIDLSQLGGDGGEAAAKPAPGGSGGTLNIEDEYRLHETSKEPDVSLGSTWLSDFPQAWAETGGMGLAVRQAPLIIPLKATSTPVSIKQYPMSQEARLGIKPHIQRLLDQGILVPCQSPWNTPLLPVKKPGTNDYRPVQDLREVNKRVEDIHPTVPNPYNLLSGLPPSHQWYTVLDLKDAFFCLRLHPTSQPLFAFEWRDPEMGISGQLTWTRLPQGFKNSPTLFNEALHRDLAGFRIQHPDLILLQYVDDLLLAATSELDCQQGTRALLQTLGDLGYRASAKKAQICQKQVKYLGYLLKEGQRWLTEARKETVMGQPIPKTPRQLREFLGKAGFCRLFIPGFAEMAAPLYPLTKPGTLFNWGPDQQKAFQEIKQALLTAPALGLPDLTKPFELFVDEKQGYAKGVLTQKLGPWRRPVAYLSKKLDPVAAGWPPCLRMVAAIAVLTKDAGKLTMGQPLVILAPHAVEALVKQPPDRWLSNARMTHYQALLLDTDRVQFGPVVALNPATLLPLPEEGLQHDCLDILAEAHGTRSDLMDQPLPDADHTWYTDGSSFLQEGQRKAGAAVTTETEVIWARALPAGTSAQRAELIALTQALKMAEGKKLNVYTDSRYAFATAHIHGEIYRRRGWLTSEGKEIKNKDEILALLKALFLPKRLSIIHCPGHQKGNSAEARGNRMADQAAREVATRETPETSTLLAGKRTADGSEFEKRTADGSEFESPKKKAKVE

SEQ ID NO: 2316 - protein, 2096 aa, synthetic construct
MPAAKRVKLDGGDKKYSIGLDIGTNSVGWAVITDEYKVPSKKFKVLGNTDRHSIKKNLIGALLFDSGETAEATRLKRTARRRYTRRKNRICYLQEIFSNEMAKVDDSFFHRLEESFLVEEDKKHERHPIFGNIVDEVAYHEKYPTIYHLRKKLVDSTDKADLRLIYLALAHMIKFRGHFLIEGDLNPDNSDVDKLFIQLVQTYNQLFEENPINASGVDAKAILSARLSKSRRLENLIAQLPGEKKNGLFGNLIALSLGLTPNFKSNFDLAEDAKLQLSKDTYDDDLDNLLAQIGDQYADLFLAAKNLSDAILLSDILRVNTEITKAPLSASMIKRYDEHHQDLTLLKALVRQQLPEKYKEIFFDQSKNGYAGYIDGGASQEEFYKFIKPILEKMDGTEELLVKLNREDLLRKQRTFDNGSIPHQIHLGELHAILRRQEDFYPFLKDNREKIEKILTFRIPYYVGPLARGNSRFAWMTRKSEETITPWNFEEVVDKGASAQSFIERMTNFDKNLPNEKVLPKHSLLYEYFTVYNELTKVKYVTEGMRKPAFLSGEQKKAIVDLLFKTNRKVTVKQLKEDYFKKIECFDSVEISGVEDRFNASLGTYHDLLKIIKDKDFLDNEENEDILEDIVLTLTLFEDREMIEERLKTYAHLFDDKVMKQLKRRRYTGWGRLSRKLINGIRDKQSGKTILDFLKSDGFANRNFMQLIHDDSLTFKEDIQKAQVSGQGDSLHEHIANLAGSPAIKKGILQTVKVVDELVKVMGRHKPENIVIEMARENQTTQKGQKNSRERMKRIEEGIKELGSQILKEHPVENTQLQNEKLYLYYLQNGRDMYVDQELDINRLSDYDVDHIVPQSFLKDDSIDNKVLTRSDKARGKSDNVPSEEVVKKMKNYWRQLLNAKLITQRKFDNLTKAERGGLSELDKAGFIKRQLVETRQITKHVAQILDSRMNTKYDENDKLIREVKVITLKSKLVSDFRKDFQFYKVREINNYHHAHDAYLNAVVGTALIKKYPKLESEFVYGDYKVYDVRKMIAKSEQEIGKATAKYFFYSNIMNFFKTEITLANGEIRKRPLIETNGETGEIVWDKGRDFATVRKVLSMPQVNIVKKTEVQTGGFSKESILPKRNSDKLIARKKDWDPKKYGGFDSPTVAYSVLVVAKVEKGKSKKLKSVKELLGITIMERSSFEKNPIDFLEAKGYKEVKKDLIIKLPKYSLFELENGRKRMLASAGELQKGNELALPSKYVNFLYLASHYEKLKGSPEDNEQKQLFVEQHKHYLDEIIEQISEFSKRVILADANLDKVLSAYNKHRDKPIREQAENIIHLFTLTNLGAPAAFKYFDTTIDRKRYTSTKEVLDATLIHQSITGLYETRIDLSQLGGDGGGGGEAAAKGSSGGTLNIEDEYRLHETSKEPDVSLGSTWLSDFPQAWAETGGMGLAVRQAPLIIPLKATSTPVSIKQYPMSQEARLGIKPHIQRLLDQGILVPCQSPWNTPLLPVKKPGTNDYRPVQDLREVNKRVEDIHPTVPNPYNLLSGLPPSHQWYTVLDLKDAFFCLRLHPTSQPLFAFEWRDPEMGISGQLTWTRLPQGFKNSPTLFNEALHRDLAGFRIQHPDLILLQYVDDLLLAATSELDCQQGTRALLQTLGDLGYRASAKKAQICQKQVKYLGYLLKEGQRWLTEARKETVMGQPIPKTPRQLREFLGKAGFCRLFIPGFAEMAAPLYPLTKPGTLFNWGPDQQKAFQEIKQALLTAPALGLPDLTKPFELFVDEKQGYAKGVLTQKLGPWRRPVAYLSKKLDPVAAGWPPCLRMVAAIAVLTKDAGKLTMGQPLVILAPHAVEALVKQPPDRWLSNARMTHYQALLLDTDRVQFGPVVALNPATLLPLPEEGLQHDCLDILAEAHGTRSDLMDQPLPDADHTWYTDGSSFLQEGQRKAGAAVTTETEVIWARALPAGTSAQRAELIALTQALKMAEGKKLNVYTDSRYAFATAHIHGEIYRRRGWLTSEGKEIKNKDEILALLKALFLPKRLSIIHCPGHQKGNSAEARGNRMADQAAREVATRETPETSTLLAGKRTADGSEFEKRTADGSEFESPKKKAKVE

SEQ ID NO: 2317 - protein, 2094 aa, synthetic construct
MPAAKRVKLDGGDKKYSIGLDIGTNSVGWAVITDEYKVPSKKFKVLGNTDRHSIKKNLIGALLFDSGETAEATRLKRTARRRYTRRKNRICYLQEIFSNEMAKVDDSFFHRLEESFLVEEDKKHERHPIFGNIVDEVAYHEKYPTIYHLRKKLVDSTDKADLRLIYLALAHMIKFRGHFLIEGDLNPDNSDVDKLFIQLVQTYNQLFEENPINASGVDAKAILSARLSKSRRLENLIAQLPGEKKNGLFGNLIALSLGLTPNFKSNFDLAEDAKLQLSKDTYDDDLDNLLAQIGDQYADLFLAAKNLSDAILLSDILRVNTEITKAPLSASMIKRYDEHHQDLTLLKALVRQQLPEKYKEIFFDQSKNGYAGYIDGGASQEEFYKFIKPILEKMDGTEELLVKLNREDLLRKQRTFDNGSIPHQIHLGELHAILRRQEDFYPFLKDNREKIEKILTFRIPYYVGPLARGNSRFAWMTRKSEETITPWNFEEVVDKGASAQSFIERMTNFDKNLPNEKVLPKHSLLYEYFTVYNELTKVKYVTEGMRKPAFLSGEQKKAIVDLLFKTNRKVTVKQLKEDYFKKIECFDSVEISGVEDRFNASLGTYHDLLKIIKDKDFLDNEENEDILEDIVLTLTLFEDREMIEERLKTYAHLFDDKVMKQLKRRRYTGWGRLSRKLINGIRDKQSGKTILDFLKSDGFANRNFMQLIHDDSLTFKEDIQKAQVSGQGDSLHEHIANLAGSPAIKKGILQTVKVVDELVKVMGRHKPENIVIEMARENQTTQKGQKNSRERMKRIEEGIKELGSQILKEHPVENTQLQNEKLYLYYLQNGRDMYVDQELDINRLSDYDVDHIVPQSFLKDDSIDNKVLTRSDKARGKSDNVPSEEVVKKMKNYWRQLLNAKLITQRKFDNLTKAERGGLSELDKAGFIKRQLVETRQITKHVAQILDSRMNTKYDENDKLIREVKVITLKSKLVSDFRKDFQFYKVREINNYHHAHDAYLNAVVGTALIKKYPKLESEFVYGDYKVYDVRKMIAKSEQEIGKATAKYFFYSNIMNFFKTEITLANGEIRKRPLIETNGETGEIVWDKGRDFATVRKVLSMPQVNIVKKTEVQTGGFSKESILPKRNSDKLIARKKDWDPKKYGGFDSPTVAYSVLVVAKVEKGKSKKLKSVKELLGITIMERSSFEKNPIDFLEAKGYKEVKKDLIIKLPKYSLFELENGRKRMLASAGELQKGNELALPSKYVNFLYLASHYEKLKGSPEDNEQKQLFVEQHKHYLDEIIEQISEFSKRVILADANLDKVLSAYNKHRDKPIREQAENIIHLFTLTNLGAPAAFKYFDTTIDRKRYTSTKEVLDATLIHQSITGLYETRIDLSQLGGDGGGGSGGGPAPGGTLNIEDEYRLHETSKEPDVSLGSTWLSDFPQAWAETGGMGLAVRQAPLIIPLKATSTPVSIKQYPMSQEARLGIKPHIQRLLDQGILVPCQSPWNTPLLPVKKPGTNDYRPVQDLREVNKRVEDIHPTVPNPYNLLSGLPPSHQWYTVLDLKDAFFCLRLHPTSQPLFAFEWRDPEMGISGQLTWTRLPQGFKNSPTLFNEALHRDLAGFRIQHPDLILLQYVDDLLLAATSELDCQQGTRALLQTLGDLGYRASAKKAQICQKQVKYLGYLLKEGQRWLTEARKETVMGQPIPKTPRQLREFLGKAGFCRLFIPGFAEMAAPLYPLTKPGTLFNWGPDQQKAFQEIKQALLTAPALGLPDLTKPFELFVDEKQGYAKGVLTQKLGPWRRPVAYLSKKLDPVAAGWPPCLRMVAAIAVLTKDAGKLTMGQPLVILAPHAVEALVKQPPDRWLSNARMTHYQALLLDTDRVQFGPVVALNPATLLPLPEEGLQHDCLDILAEAHGTRSDLMDQPLPDADHTWYTDGSSFLQEGQRKAGAAVTTETEVIWARALPAGTSAQRAELIALTQALKMAEGKKLNVYTDSRYAFATAHIHGEIYRRRGWLTSEGKEIKNKDEILALLKALFLPKRLSIIHCPGHQKGNSAEARGNRMADQAAREVATRETPETSTLLAGKRTADGSEFEKRTADGSEFESPKKKAKVE

SEQ ID NO: 2318 - protein, 2094 aa, synthetic construct
MPAAKRVKLDGGDKKYSIGLDIGTNSVGWAVITDEYKVPSKKFKVLGNTDRHSIKKNLIGALLFDSGETAEATRLKRTARRRYTRRKNRICYLQEIFSNEMAKVDDSFFHRLEESFLVEEDKKHERHPIFGNIVDEVAYHEKYPTIYHLRKKLVDSTDKADLRLIYLALAHMIKFRGHFLIEGDLNPDNSDVDKLFIQLVQTYNQLFEENPINASGVDAKAILSARLSKSRRLENLIAQLPGEKKNGLFGNLIALSLGLTPNFKSNFDLAEDAKLQLSKDTYDDDLDNLLAQIGDQYADLFLAAKNLSDAILLSDILRVNTEITKAPLSASMIKRYDEHHQDLTLLKALVRQQLPEKYKEIFFDQSKNGYAGYIDGGASQEEFYKFIKPILEKMDGTEELLVKLNREDLLRKQRTFDNGSIPHQIHLGELHAILRRQEDFYPFLKDNREKIEKILTFRIPYYVGPLARGNSRFAWMTRKSEETITPWNFEEVVDKGASAQSFIERMTNFDKNLPNEKVLPKHSLLYEYFTVYNELTKVKYVTEGMRKPAFLSGEQKKAIVDLLFKTNRKVTVKQLKEDYFKKIECFDSVEISGVEDRFNASLGTYHDLLKIIKDKDFLDNEENEDILEDIVLTLTLFEDREMIEERLKTYAHLFDDKVMKQLKRRRYTGWGRLSRKLINGIRDKQSGKTILDFLKSDGFANRNFMQLIHDDSLTFKEDIQKAQVSGQGDSLHEHIANLAGSPAIKKGILQTVKVVDELVKVMGRHKPENIVIEMARENQTTQKGQKNSRERMKRIEEGIKELGSQILKEHPVENTQLQNEKLYLYYLQNGRDMYVDQELDINRLSDYDVDHIVPQSFLKDDSIDNKVLTRSDKARGKSDNVPSEEVVKKMKNYWRQLLNAKLITQRKFDNLTKAERGGLSELDKAGFIKRQLVETRQITKHVAQILDSRMNTKYDENDKLIREVKVITLKSKLVSDFRKDFQFYKVREINNYHHAHDAYLNAVVGTALIKKYPKLESEFVYGDYKVYDVRKMIAKSEQEIGKATAKYFFYSNIMNFFKTEITLANGEIRKRPLIETNGETGEIVWDKGRDFATVRKVLSMPQVNIVKKTEVQTGGFSKESILPKRNSDKLIARKKDWDPKKYGGFDSPTVAYSVLVVAKVEKGKSKKLKSVKELLGITIMERSSFEKNPIDFLEAKGYKEVKKDLIIKLPKYSLFELENGRKRMLASAGELQKGNELALPSKYVNFLYLASHYEKLKGSPEDNEQKQLFVEQHKHYLDEIIEQISEFSKRVILADANLDKVLSAYNKHRDKPIREQAENIIHLFTLTNLGAPAAFKYFDTTIDRKRYTSTKEVLDATLIHQSITGLYETRIDLSQLGGDGGPAPAPAPAPGGTLNIEDEYRLHETSKEPDVSLGSTWLSDFPQAWAETGGMGLAVRQAPLIIPLKATSTPVSIKQYPMSQEARLGIKPHIQRLLDQGILVPCQSPWNTPLLPVKKPGTNDYRPVQDLREVNKRVEDIHPTVPNPYNLLSGLPPSHQWYTVLDLKDAFFCLRLHPTSQPLFAFEWRDPEMGISGQLTWTRLPQGFKNSPTLFNEALHRDLAGFRIQHPDLILLQYVDDLLLAATSELDCQQGTRALLQTLGDLGYRASAKKAQICQKQVKYLGYLLKEGQRWLTEARKETVMGQPIPKTPRQLREFLGKAGFCRLFIPGFAEMAAPLYPLTKPGTLFNWGPDQQKAFQEIKQALLTAPALGLPDLTKPFELFVDEKQGYAKGVLTQKLGPWRRPVAYLSKKLDPVAAGWPPCLRMVAAIAVLTKDAGKLTMGQPLVILAPHAVEALVKQPPDRWLSNARMTHYQALLLDTDRVQFGPVVALNPATLLPLPEEGLQHDCLDILAEAHGTRSDLMDQPLPDADHTWYTDGSSFLQEGQRKAGAAVTTETEVIWARALPAGTSAQRAELIALTQALKMAEGKKLNVYTDSRYAFATAHIHGEIYRRRGWLTSEGKEIKNKDEILALLKALFLPKRLSIIHCPGHQKGNSAEARGNRMADQAAREVATRETPETSTLLAGKRTADGSEFEKRTADGSEFESPKKKAKVE

SEQ ID NO: 2319 - protein, 2097 aa, synthetic construct
MPAAKRVKLDGGDKKYSIGLDIGTNSVGWAVITDEYKVPSKKFKVLGNTDRHSIKKNLIGALLFDSGETAEATRLKRTARRRYTRRKNRICYLQEIFSNEMAKVDDSFFHRLEESFLVEEDKKHERHPIFGNIVDEVAYHEKYPTIYHLRKKLVDSTDKADLRLIYLALAHMIKFRGHFLIEGDLNPDNSDVDKLFIQLVQTYNQLFEENPINASGVDAKAILSARLSKSRRLENLIAQLPGEKKNGLFGNLIALSLGLTPNFKSNFDLAEDAKLQLSKDTYDDDLDNLLAQIGDQYADLFLAAKNLSDAILLSDILRVNTEITKAPLSASMIKRYDEHHQDLTLLKALVRQQLPEKYKEIFFDQSKNGYAGYIDGGASQEEFYKFIKPILEKMDGTEELLVKLNREDLLRKQRTFDNGSIPHQIHLGELHAILRRQEDFYPFLKDNREKIEKILTFRIPYYVGPLARGNSRFAWMTRKSEETITPWNFEEVVDKGASAQSFIERMTNFDKNLPNEKVLPKHSLLYEYFTVYNELTKVKYVTEGMRKPAFLSGEQKKAIVDLLFKTNRKVTVKQLKEDYFKKIECFDSVEISGVEDRFNASLGTYHDLLKIIKDKDFLDNEENEDILEDIVLTLTLFEDREMIEERLKTYAHLFDDKVMKQLKRRRYTGWGRLSRKLINGIRDKQSGKTILDFLKSDGFANRNFMQLIHDDSLTFKEDIQKAQVSGQGDSLHEHIANLAGSPAIKKGILQTVKVVDELVKVMGRHKPENIVIEMARENQTTQKGQKNSRERMKRIEEGIKELGSQILKEHPVENTQLQNEKLYLYYLQNGRDMYVDQELDINRLSDYDVDHIVPQSFLKDDSIDNKVLTRSDKARGKSDNVPSEEVVKKMKNYWRQLLNAKLITQRKFDNLTKAERGGLSELDKAGFIKRQLVETRQITKHVAQILDSRMNTKYDENDKLIREVKVITLKSKLVSDFRKDFQFYKVREINNYHHAHDAYLNAVVGTALIKKYPKLESEFVYGDYKVYDVRKMIAKSEQEIGKATAKYFFYSNIMNFFKTEITLANGEIRKRPLIETNGETGEIVWDKGRDFATVRKVLSMPQVNIVKKTEVQTGGFSKESILPKRNSDKLIARKKDWDPKKYGGFDSPTVAYSVLVVAKVEKGKSKKLKSVKELLGITIMERSSFEKNPIDFLEAKGYKEVKKDLIIKLPKYSLFELENGRKRMLASAGELQKGNELALPSKYVNFLYLASHYEKLKGSPEDNEQKQLFVEQHKHYLDEIIEQISEFSKRVILADANLDKVLSAYNKHRDKPIREQAENIIHLFTLTNLGAPAAFKYFDTTIDRKRYTSTKEVLDATLIHQSITGLYETRIDLSQLGGDGGGGSGGSGGSGGSGGTLNIEDEYRLHETSKEPDVSLGSTWLSDFPQAWAETGGMGLAVRQAPLIIPLKATSTPVSIKQYPMSQEARLGIKPHIQRLLDQGILVPCQSPWNTPLLPVKKPGTNDYRPVQDLREVNKRVEDIHPTVPNPYNLLSGLPPSHQWYTVLDLKDAFFCLRLHPTSQPLFAFEWRDPEMGISGQLTWTRLPQGFKNSPTLFNEALHRDLAGFRIQHPDLILLQYVDDLLLAATSELDCQQGTRALLQTLGDLGYRASAKKAQICQKQVKYLGYLLKEGQRWLTEARKETVMGQPIPKTPRQLREFLGKAGFCRLFIPGFAEMAAPLYPLTKPGTLFNWGPDQQKAFQEIKQALLTAPALGLPDLTKPFELFVDEKQGYAKGVLTQKLGPWRRPVAYLSKKLDPVAAGWPPCLRMVAAIAVLTKDAGKLTMGQPLVILAPHAVEALVKQPPDRWLSNARMTHYQALLLDTDRVQFGPVVALNPATLLPLPEEGLQHDCLDILAEAHGTRSDLMDQPLPDADHTWYTDGSSFLQEGQRKAGAAVTTETEVIWARALPAGTSAQRAELIALTQALKMAEGKKLNVYTDSRYAFATAHIHGEIYRRRGWLTSEGKEIKNKDEILALLKALFLPKRLSIIHCPGHQKGNSAEARGNRMADQAAREVATRETPETSTLLAGKRTADGSEFEKRTADGSEFESPKKKAKVE

SEQ ID NO: 2320 - protein, 2094 aa, synthetic construct
MPAAKRVKLDGGDKKYSIGLDIGTNSVGWAVITDEYKVPSKKFKVLGNTDRHSIKKNLIGALLFDSGETAEATRLKRTARRRYTRRKNRICYLQEIFSNEMAKVDDSFFHRLEESFLVEEDKKHERHPIFGNIVDEVAYHEKYPTIYHLRKKLVDSTDKADLRLIYLALAHMIKFRGHFLIEGDLNPDNSDVDKLFIQLVQTYNQLFEENPINASGVDAKAILSARLSKSRRLENLIAQLPGEKKNGLFGNLIALSLGLTPNFKSNFDLAEDAKLQLSKDTYDDDLDNLLAQIGDQYADLFLAAKNLSDAILLSDILRVNTEITKAPLSASMIKRYDEHHQDLTLLKALVRQQLPEKYKEIFFDQSKNGYAGYIDGGASQEEFYKFIKPILEKMDGTEELLVKLNREDLLRKQRTFDNGSIPHQIHLGELHAILRRQEDFYPFLKDNREKIEKILTFRIPYYVGPLARGNSRFAWMTRKSEETITPWNFEEVVDKGASAQSFIERMTNFDKNLPNEKVLPKHSLLYEYFTVYNELTKVKYVTEGMRKPAFLSGEQKKAIVDLLFKTNRKVTVKQLKEDYFKKIECFDSVEISGVEDRFNASLGTYHDLLKIIKDKDFLDNEENEDILEDIVLTLTLFEDREMIEERLKTYAHLFDDKVMKQLKRRRYTGWGRLSRKLINGIRDKQSGKTILDFLKSDGFANRNFMQLIHDDSLTFKEDIQKAQVSGQGDSLHEHIANLAGSPAIKKGILQTVKVVDELVKVMGRHKPENIVIEMARENQTTQKGQKNSRERMKRIEEGIKELGSQILKEHPVENTQLQNEKLYLYYLQNGRDMYVDQELDINRLSDYDVDHIVPQSFLKDDSIDNKVLTRSDKARGKSDNVPSEEVVKKMKNYWRQLLNAKLITQRKFDNLTKAERGGLSELDKAGFIKRQLVETRQITKHVAQILDSRMNTKYDENDKLIREVKVITLKSKLVSDFRKDFQFYKVREINNYHHAHDAYLNAVVGTALIKKYPKLESEFVYGDYKVYDVRKMIAKSEQEIGKATAKYFFYSNIMNFFKTEITLANGEIRKRPLIETNGETGEIVWDKGRDFATVRKVLSMPQVNIVKKTEVQTGGFSKESILPKRNSDKLIARKKDWDPKKYGGFDSPTVAYSVLVVAKVEKGKSKKLKSVKELLGITIMERSSFEKNPIDFLEAKGYKEVKKDLIIKLPKYSLFELENGRKRMLASAGELQKGNELALPSKYVNFLYLASHYEKLKGSPEDNEQKQLFVEQHKHYLDEIIEQISEFSKRVILADANLDKVLSAYNKHRDKPIREQAENIIHLFTLTNLGAPAAFKYFDTTIDRKRYTSTKEVLDATLIHQSITGLYETRIDLSQLGGDGGGGGPAPGGSGGTLNIEDEYRLHETSKEPDVSLGSTWLSDFPQAWAETGGMGLAVRQAPLIIPLKATSTPVSIKQYPMSQEARLGIKPHIQRLLDQGILVPCQSPWNTPLLPVKKPGTNDYRPVQDLREVNKRVEDIHPTVPNPYNLLSGLPPSHQWYTVLDLKDAFFCLRLHPTSQPLFAFEWRDPEMGISGQLTWTRLPQGFKNSPTLFNEALHRDLAGFRIQHPDLILLQYVDDLLLAATSELDCQQGTRALLQTLGDLGYRASAKKAQICQKQVKYLGYLLKEGQRWLTEARKETVMGQPIPKTPRQLREFLGKAGFCRLFIPGFAEMAAPLYPLTKPGTLFNWGPDQQKAFQEIKQALLTAPALGLPDLTKPFELFVDEKQGYAKGVLTQKLGPWRRPVAYLSKKLDPVAAGWPPCLRMVAAIAVLTKDAGKLTMGQPLVILAPHAVEALVKQPPDRWLSNARMTHYQALLLDTDRVQFGPVVALNPATLLPLPEEGLQHDCLDILAEAHGTRSDLMDQPLPDADHTWYTDGSSFLQEGQRKAGAAVTTETEVIWARALPAGTSAQRAELIALTQALKMAEGKKLNVYTDSRYAFATAHIHGEIYRRRGWLTSEGKEIKNKDEILALLKALFLPKRLSIIHCPGHQKGNSAEARGNRMADQAAREVATRETPETSTLLAGKRTADGSEFEKRTADGSEFESPKKKAKVE

SEQ ID NO: 2321 - protein, 2094 aa, synthetic construct
MPAAKRVKLDGGDKKYSIGLDIGTNSVGWAVITDEYKVPSKKFKVLGNTDRHSIKKNLIGALLFDSGETAEATRLKRTARRRYTRRKNRICYLQEIFSNEMAKVDDSFFHRLEESFLVEEDKKHERHPIFGNIVDEVAYHEKYPTIYHLRKKLVDSTDKADLRLIYLALAHMIKFRGHFLIEGDLNPDNSDVDKLFIQLVQTYNQLFEENPINASGVDAKAILSARLSKSRRLENLIAQLPGEKKNGLFGNLIALSLGLTPNFKSNFDLAEDAKLQLSKDTYDDDLDNLLAQIGDQYADLFLAAKNLSDAILLSDILRVNTEITKAPLSASMIKRYDEHHQDLTLLKALVRQQLPEKYKEIFFDQSKNGYAGYIDGGASQEEFYKFIKPILEKMDGTEELLVKLNREDLLRKQRTFDNGSIPHQIHLGELHAILRRQEDFYPFLKDNREKIEKILTFRIPYYVGPLARGNSRFAWMTRKSEETITPWNFEEVVDKGASAQSFIERMTNFDKNLPNEKVLPKHSLLYEYFTVYNELTKVKYVTEGMRKPAFLSGEQKKAIVDLLFKTNRKVTVKQLKEDYFKKIECFDSVEISGVEDRFNASLGTYHDLLKIIKDKDFLDNEENEDILEDIVLTLTLFEDREMIEERLKTYAHLFDDKVMKQLKRRRYTGWGRLSRKLINGIRDKQSGKTILDFLKSDGFANRNFMQLIHDDSLTFKEDIQKAQVSGQGDSLHEHIANLAGSPAIKKGILQTVKVVDELVKVMGRHKPENIVIEMARENQTTQKGQKNSRERMKRIEEGIKELGSQILKEHPVENTQLQNEKLYLYYLQNGRDMYVDQELDINRLSDYDVDHIVPQSFLKDDSIDNKVLTRSDKARGKSDNVPSEEVVKKMKNYWRQLLNAKLITQRKFDNLTKAERGGLSELDKAGFIKRQLVETRQITKHVAQILDSRMNTKYDENDKLIREVKVITLKSKLVSDFRKDFQFYKVREINNYHHAHDAYLNAVVGTALIKKYPKLESEFVYGDYKVYDVRKMIAKSEQEIGKATAKYFFYSNIMNFFKTEITLANGEIRKRPLIETNGETGEIVWDKGRDFATVRKVLSMPQVNIVKKTEVQTGGFSKESILPKRNSDKLIARKKDWDPKKYGGFDSPTVAYSVLVVAKVEKGKSKKLKSVKELLGITIMERSSFEKNPIDFLEAKGYKEVKKDLIIKLPKYSLFELENGRKRMLASAGELQKGNELALPSKYVNFLYLASHYEKLKGSPEDNEQKQLFVEQHKHYLDEIIEQISEFSKRVILADANLDKVLSAYNKHRDKPIREQAENIIHLFTLTNLGAPAAFKYFDTTIDRKRYTSTKEVLDATLIHQSITGLYETRIDLSQLGGDGGPAPGGSGSSGGTLNIEDEYRLHETSKEPDVSLGSTWLSDFPQAWAETGGMGLAVRQAPLIIPLKATSTPVSIKQYPMSQEARLGIKPHIQRLLDQGILVPCQSPWNTPLLPVKKPGTNDYRPVQDLREVNKRVEDIHPTVPNPYNLLSGLPPSHQWYTVLDLKDAFFCLRLHPTSQPLFAFEWRDPEMGISGQLTWTRLPQGFKNSPTLFNEALHRDLAGFRIQHPDLILLQYVDDLLLAATSELDCQQGTRALLQTLGDLGYRASAKKAQICQKQVKYLGYLLKEGQRWLTEARKETVMGQPIPKTPRQLREFLGKAGFCRLFIPGFAEMAAPLYPLTKPGTLFNWGPDQQKAFQEIKQALLTAPALGLPDLTKPFELFVDEKQGYAKGVLTQKLGPWRRPVAYLSKKLDPVAAGWPPCLRMVAAIAVLTKDAGKLTMGQPLVILAPHAVEALVKQPPDRWLSNARMTHYQALLLDTDRVQFGPVVALNPATLLPLPEEGLQHDCLDILAEAHGTRSDLMDQPLPDADHTWYTDGSSFLQEGQRKAGAAVTTETEVIWARALPAGTSAQRAELIALTQALKMAEGKKLNVYTDSRYAFATAHIHGEIYRRRGWLTSEGKEIKNKDEILALLKALFLPKRLSIIHCPGHQKGNSAEARGNRMADQAAREVATRETPETSTLLAGKRTADGSEFEKRTADGSEFESPKKKAKVE

SEQ ID NO: 2322 - protein, 2115 aa, synthetic construct
MPAAKRVKLDGGDKKYSIGLDIGTNSVGWAVITDEYKVPSKKFKVLGNTDRHSIKKNLIGALLFDSGETAEATRLKRTARRRYTRRKNRICYLQEIFSNEMAKVDDSFFHRLEESFLVEEDKKHERHPIFGNIVDEVAYHEKYPTIYHLRKKLVDSTDKADLRLIYLALAHMIKFRGHFLIEGDLNPDNSDVDKLFIQLVQTYNQLFEENPINASGVDAKAILSARLSKSRRLENLIAQLPGEKKNGLFGNLIALSLGLTPNFKSNFDLAEDAKLQLSKDTYDDDLDNLLAQIGDQYADLFLAAKNLSDAILLSDILRVNTEITKAPLSASMIKRYDEHHQDLTLLKALVRQQLPEKYKEIFFDQSKNGYAGYIDGGASQEEFYKFIKPILEKMDGTEELLVKLNREDLLRKQRTFDNGSIPHQIHLGELHAILRRQEDFYPFLKDNREKIEKILTFRIPYYVGPLARGNSRFAWMTRKSEETITPWNFEEVVDKGASAQSFIERMTNFDKNLPNEKVLPKHSLLYEYFTVYNELTKVKYVTEGMRKPAFLSGEQKKAIVDLLFKTNRKVTVKQLKEDYFKKIECFDSVEISGVEDRFNASLGTYHDLLKIIKDKDFLDNEENEDILEDIVLTLTLFEDREMIEERLKTYAHLFDDKVMKQLKRRRYTGWGRLSRKLINGIRDKQSGKTILDFLKSDGFANRNFMQLIHDDSLTFKEDIQKAQVSGQGDSLHEHIANLAGSPAIKKGILQTVKVVDELVKVMGRHKPENIVIEMARENQTTQKGQKNSRERMKRIEEGIKELGSQILKEHPVENTQLQNEKLYLYYLQNGRDMYVDQELDINRLSDYDVDHIVPQSFLKDDSIDNKVLTRSDKARGKSDNVPSEEVVKKMKNYWRQLLNAKLITQRKFDNLTKAERGGLSELDKAGFIKRQLVETRQITKHVAQILDSRMNTKYDENDKLIREVKVITLKSKLVSDFRKDFQFYKVREINNYHHAHDAYLNAVVGTALIKKYPKLESEFVYGDYKVYDVRKMIAKSEQEIGKATAKYFFYSNIMNFFKTEITLANGEIRKRPLIETNGETGEIVWDKGRDFATVRKVLSMPQVNIVKKTEVQTGGFSKESILPKRNSDKLIARKKDWDPKKYGGFDSPTVAYSVLVVAKVEKGKSKKLKSVKELLGITIMERSSFEKNPIDFLEAKGYKEVKKDLIIKLPKYSLFELENGRKRMLASAGELQKGNELALPSKYVNFLYLASHYEKLKGSPEDNEQKQLFVEQHKHYLDEIIEQISEFSKRVILADANLDKVLSAYNKHRDKPIREQAENIIHLFTLTNLGAPAAFKYFDTTIDRKRYTSTKEVLDATLIHQSITGLYETRIDLSQLGGDGGEAAAKEAAAKEAAAKEAAAKEAAAKEAAAKGGTLNIEDEYRLHETSKEPDVSLGSTWLSDFPQAWAETGGMGLAVRQAPLIIPLKATSTPVSIKQYPMSQEARLGIKPHIQRLLDQGILVPCQSPWNTPLLPVKKPGTNDYRPVQDLREVNKRVEDIHPTVPNPYNLLSGLPPSHQWYTVLDLKDAFFCLRLHPTSQPLFAFEWRDPEMGISGQLTWTRLPQGFKNSPTLFNEALHRDLAGFRIQHPDLILLQYVDDLLLAATSELDCQQGTRALLQTLGDLGYRASAKKAQICQKQVKYLGYLLKEGQRWLTEARKETVMGQPIPKTPRQLREFLGKAGFCRLFIPGFAEMAAPLYPLTKPGTLFNWGPDQQKAFQEIKQALLTAPALGLPDLTKPFELFVDEKQGYAKGVLTQKLGPWRRPVAYLSKKLDPVAAGWPPCLRMVAAIAVLTKDAGKLTMGQPLVILAPHAVEALVKQPPDRWLSNARMTHYQALLLDTDRVQFGPVVALNPATLLPLPEEGLQHDCLDILAEAHGTRSDLMDQPLPDADHTWYTDGSSFLQEGQRKAGAAVTTETEVIWARALPAGTSAQRAELIALTQALKMAEGKKLNVYTDSRYAFATAHIHGEIYRRRGWLTSEGKEIKNKDEILALLKALFLPKRLSIIHCPGHQKGNSAEARGNRMADQAAREVATRETPETSTLLAGKRTADGSEFEKRTADGSEFESPKKKAKVE

SEQ ID NO: 2323 - protein, 2088 aa, synthetic construct
MPAAKRVKLDGGDKKYSIGLDIGTNSVGWAVITDEYKVPSKKFKVLGNTDRHSIKKNLIGALLFDSGETAEATRLKRTARRRYTRRKNRICYLQEIFSNEMAKVDDSFFHRLEESFLVEEDKKHERHPIFGNIVDEVAYHEKYPTIYHLRKKLVDSTDKADLRLIYLALAHMIKFRGHFLIEGDLNPDNSDVDKLFIQLVQTYNQLFEENPINASGVDAKAILSARLSKSRRLENLIAQLPGEKKNGLFGNLIALSLGLTPNFKSNFDLAEDAKLQLSKDTYDDDLDNLLAQIGDQYADLFLAAKNLSDAILLSDILRVNTEITKAPLSASMIKRYDEHHQDLTLLKALVRQQLPEKYKEIFFDQSKNGYAGYIDGGASQEEFYKFIKPILEKMDGTEELLVKLNREDLLRKQRTFDNGSIPHQIHLGELHAILRRQEDFYPFLKDNREKIEKILTFRIPYYVGPLARGNSRFAWMTRKSEETITPWNFEEVVDKGASAQSFIERMTNFDKNLPNEKVLPKHSLLYEYFTVYNELTKVKYVTEGMRKPAFLSGEQKKAIVDLLFKTNRKVTVKQLKEDYFKKIECFDSVEISGVEDRFNASLGTYHDLLKIIKDKDFLDNEENEDILEDIVLTLTLFEDREMIEERLKTYAHLFDDKVMKQLKRRRYTGWGRLSRKLINGIRDKQSGKTILDFLKSDGFANRNFMQLIHDDSLTFKEDIQKAQVSGQGDSLHEHIANLAGSPAIKKGILQTVKVVDELVKVMGRHKPENIVIEMARENQTTQKGQKNSRERMKRIEEGIKELGSQILKEHPVENTQLQNEKLYLYYLQNGRDMYVDQELDINRLSDYDVDHIVPQSFLKDDSIDNKVLTRSDKARGKSDNVPSEEVVKKMKNYWRQLLNAKLITQRKFDNLTKAERGGLSELDKAGFIKRQLVETRQITKHVAQILDSRMNTKYDENDKLIREVKVITLKSKLVSDFRKDFQFYKVREINNYHHAHDAYLNAVVGTALIKKYPKLESEFVYGDYKVYDVRKMIAKSEQEIGKATAKYFFYSNIMNFFKTEITLANGEIRKRPLIETNGETGEIVWDKGRDFATVRKVLSMPQVNIVKKTEVQTGGFSKESILPKRNSDKLIARKKDWDPKKYGGFDSPTVAYSVLVVAKVEKGKSKKLKSVKELLGITIMERSSFEKNPIDFLEAKGYKEVKKDLIIKLPKYSLFELENGRKRMLASAGELQKGNELALPSKYVNFLYLASHYEKLKGSPEDNEQKQLFVEQHKHYLDEIIEQISEFSKRVILADANLDKVLSAYNKHRDKPIREQAENIIHLFTLTNLGAPAAFKYFDTTIDRKRYTSTKEVLDATLIHQSITGLYETRIDLSQLGGDGGGGSGGTLNIEDEYRLHETSKEPDVSLGSTWLSDFPQAWAETGGMGLAVRQAPLIIPLKATSTPVSIKQYPMSQEARLGIKPHIQRLLDQGILVPCQSPWNTPLLPVKKPGTNDYRPVQDLREVNKRVEDIHPTVPNPYNLLSGLPPSHQWYTVLDLKDAFFCLRLHPTSQPLFAFEWRDPEMGISGQLTWTRLPQGFKNSPTLFNEALHRDLAGFRIQHPDLILLQYVDDLLLAATSELDCQQGTRALLQTLGDLGYRASAKKAQICQKQVKYLGYLLKEGQRWLTEARKETVMGQPIPKTPRQLREFLGKAGFCRLFIPGFAEMAAPLYPLTKPGTLFNWGPDQQKAFQEIKQALLTAPALGLPDLTKPFELFVDEKQGYAKGVLTQKLGPWRRPVAYLSKKLDPVAAGWPPCLRMVAAIAVLTKDAGKLTMGQPLVILAPHAVEALVKQPPDRWLSNARMTHYQALLLDTDRVQFGPVVALNPATLLPLPEEGLQHDCLDILAEAHGTRSDLMDQPLPDADHTWYTDGSSFLQEGQRKAGAAVTTETEVIWARALPAGTSAQRAELIALTQALKMAEGKKLNVYTDSRYAFATAHIHGEIYRRRGWLTSEGKEIKNKDEILALLKALFLPKRLSIIHCPGHQKGNSAEARGNRMADQAAREVATRETPETSTLLAGKRTADGSEFEKRTADGSEFESPKKKAKVE

SEQ ID NO: 2324 - protein, 2110 aa, synthetic construct
MPAAKRVKLDGGDKKYSIGLDIGTNSVGWAVITDEYKVPSKKFKVLGNTDRHSIKKNLIGALLFDSGETAEATRLKRTARRRYTRRKNRICYLQEIFSNEMAKVDDSFFHRLEESFLVEEDKKHERHPIFGNIVDEVAYHEKYPTIYHLRKKLVDSTDKADLRLIYLALAHMIKFRGHFLIEGDLNPDNSDVDKLFIQLVQTYNQLFEENPINASGVDAKAILSARLSKSRRLENLIAQLPGEKKNGLFGNLIALSLGLTPNFKSNFDLAEDAKLQLSKDTYDDDLDNLLAQIGDQYADLFLAAKNLSDAILLSDILRVNTEITKAPLSASMIKRYDEHHQDLTLLKALVRQQLPEKYKEIFFDQSKNGYAGYIDGGASQEEFYKFIKPILEKMDGTEELLVKLNREDLLRKQRTFDNGSIPHQIHLGELHAILRRQEDFYPFLKDNREKIEKILTFRIPYYVGPLARGNSRFAWMTRKSEETITPWNFEEVVDKGASAQSFIERMTNFDKNLPNEKVLPKHSLLYEYFTVYNELTKVKYVTEGMRKPAFLSGEQKKAIVDLLFKTNRKVTVKQLKEDYFKKIECFDSVEISGVEDRFNASLGTYHDLLKIIKDKDFLDNEENEDILEDIVLTLTLFEDREMIEERLKTYAHLFDDKVMKQLKRRRYTGWGRLSRKLINGIRDKQSGKTILDFLKSDGFANRNFMQLIHDDSLTFKEDIQKAQVSGQGDSLHEHIANLAGSPAIKKGILQTVKVVDELVKVMGRHKPENIVIEMARENQTTQKGQKNSRERMKRIEEGIKELGSQILKEHPVENTQLQNEKLYLYYLQNGRDMYVDQELDINRLSDYDVDHIVPQSFLKDDSIDNKVLTRSDKARGKSDNVPSEEVVKKMKNYWRQLLNAKLITQRKFDNLTKAERGGLSELDKAGFIKRQLVETRQITKHVAQILDSRMNTKYDENDKLIREVKVITLKSKLVSDFRKDFQFYKVREINNYHHAHDAYLNAVVGTALIKKYPKLESEFVYGDYKVYDVRKMIAKSEQEIGKATAKYFFYSNIMNFFKTEITLANGEIRKRPLIETNGETGEIVWDKGRDFATVRKVLSMPQVNIVKKTEVQTGGFSKESILPKRNSDKLIARKKDWDPKKYGGFDSPTVAYSVLVVAKVEKGKSKKLKSVKELLGITIMERSSFEKNPIDFLEAKGYKEVKKDLIIKLPKYSLFELENGRKRMLASAGELQKGNELALPSKYVNFLYLASHYEKLKGSPEDNEQKQLFVEQHKHYLDEIIEQISEFSKRVILADANLDKVLSAYNKHRDKPIREQAENIIHLFTLTNLGAPAAFKYFDTTIDRKRYTSTKEVLDATLIHQSITGLYETRIDLSQLGGDGGEAAAKEAAAKEAAAKEAAAKEAAAKGGTLNIEDEYRLHETSKEPDVSLGSTWLSDFPQAWAETGGMGLAVRQAPLIIPLKATSTPVSIKQYPMSQEARLGIKPHIQRLLDQGILVPCQSPWNTPLLPVKKPGTNDYRPVQDLREVNKRVEDIHPTVPNPYNLLSGLPPSHQWYTVLDLKDAFFCLRLHPTSQPLFAFEWRDPEMGISGQLTWTRLPQGFKNSPTLFNEALHRDLAGFRIQHPDLILLQYVDDLLLAATSELDCQQGTRALLQTLGDLGYRASAKKAQICQKQVKYLGYLLKEGQRWLTEARKETVMGQPIPKTPRQLREFLGKAGFCRLFIPGFAEMAAPLYPLTKPGTLFNWGPDQQKAFQEIKQALLTAPALGLPDLTKPFELFVDEKQGYAKGVLTQKLGPWRRPVAYLSKKLDPVAAGWPPCLRMVAAIAVLTKDAGKLTMGQPLVILAPHAVEALVKQPPDRWLSNARMTHYQALLLDTDRVQFGPVVALNPATLLPLPEEGLQHDCLDILAEAHGTRSDLMDQPLPDADHTWYTDGSSFLQEGQRKAGAAVTTETEVIWARALPAGTSAQRAELIALTQALKMAEGKKLNVYTDSRYAFATAHIHGEIYRRRGWLTSEGKEIKNKDEILALLKALFLPKRLSIIHCPGHQKGNSAEARGNRMADQAAREVATRETPETSTLLAGKRTADGSEFEKRTADGSEFESPKKKAKVE

SEQ ID NO: 2325 - protein, 2105 aa, synthetic construct
MPAAKRVKLDGGDKKYSIGLDIGTNSVGWAVITDEYKVPSKKFKVLGNTDRHSIKKNLIGALLFDSGETAEATRLKRTARRRYTRRKNRICYLQEIFSNEMAKVDDSFFHRLEESFLVEEDKKHERHPIFGNIVDEVAYHEKYPTIYHLRKKLVDSTDKADLRLIYLALAHMIKFRGHFLIEGDLNPDNSDVDKLFIQLVQTYNQLFEENPINASGVDAKAILSARLSKSRRLENLIAQLPGEKKNGLFGNLIALSLGLTPNFKSNFDLAEDAKLQLSKDTYDDDLDNLLAQIGDQYADLFLAAKNLSDAILLSDILRVNTEITKAPLSASMIKRYDEHHQDLTLLKALVRQQLPEKYKEIFFDQSKNGYAGYIDGGASQEEFYKFIKPILEKMDGTEELLVKLNREDLLRKQRTFDNGSIPHQIHLGELHAILRRQEDFYPFLKDNREKIEKILTFRIPYYVGPLARGNSRFAWMTRKSEETITPWNFEEVVDKGASAQSFIERMTNFDKNLPNEKVLPKHSLLYEYFTVYNELTKVKYVTEGMRKPAFLSGEQKKAIVDLLFKTNRKVTVKQLKEDYFKKIECFDSVEISGVEDRFNASLGTYHDLLKIIKDKDFLDNEENEDILEDIVLTLTLFEDREMIEERLKTYAHLFDDKVMKQLKRRRYTGWGRLSRKLINGIRDKQSGKTILDFLKSDGFANRNFMQLIHDDSLTFKEDIQKAQVSGQGDSLHEHIANLAGSPAIKKGILQTVKVVDELVKVMGRHKPENIVIEMARENQTTQKGQKNSRERMKRIEEGIKELGSQILKEHPVENTQLQNEKLYLYYLQNGRDMYVDQELDINRLSDYDVDHIVPQSFLKDDSIDNKVLTRSDKARGKSDNVPSEEVVKKMKNYWRQLLNAKLITQRKFDNLTKAERGGLSELDKAGFIKRQLVETRQITKHVAQILDSRMNTKYDENDKLIREVKVITLKSKLVSDFRKDFQFYKVREINNYHHAHDAYLNAVVGTALIKKYPKLESEFVYGDYKVYDVRKMIAKSEQEIGKATAKYFFYSNIMNFFKTEITLANGEIRKRPLIETNGETGEIVWDKGRDFATVRKVLSMPQVNIVKKTEVQTGGFSKESILPKRNSDKLIARKKDWDPKKYGGFDSPTVAYSVLVVAKVEKGKSKKLKSVKELLGITIMERSSFEKNPIDFLEAKGYKEVKKDLIIKLPKYSLFELENGRKRMLASAGELQKGNELALPSKYVNFLYLASHYEKLKGSPEDNEQKQLFVEQHKHYLDEIIEQISEFSKRVILADANLDKVLSAYNKHRDKPIREQAENIIHLFTLTNLGAPAAFKYFDTTIDRKRYTSTKEVLDATLIHQSITGLYETRIDLSQLGGDGGEAAAKEAAAKEAAAKEAAAKGGTLNIEDEYRLHETSKEPDVSLGSTWLSDFPQAWAETGGMGLAVRQAPLIIPLKATSTPVSIKQYPMSQEARLGIKPHIQRLLDQGILVPCQSPWNTPLLPVKKPGTNDYRPVQDLREVNKRVEDIHPTVPNPYNLLSGLPPSHQWYTVLDLKDAFFCLRLHPTSQPLFAFEWRDPEMGISGQLTWTRLPQGFKNSPTLFNEALHRDLAGFRIQHPDLILLQYVDDLLLAATSELDCQQGTRALLQTLGDLGYRASAKKAQICQKQVKYLGYLLKEGQRWLTEARKETVMGQPIPKTPRQLREFLGKAGFCRLFIPGFAEMAAPLYPLTKPGTLFNWGPDQQKAFQEIKQALLTAPALGLPDLTKPFELFVDEKQGYAKGVLTQKLGPWRRPVAYLSKKLDPVAAGWPPCLRMVAAIAVLTKDAGKLTMGQPLVILAPHAVEALVKQPPDRWLSNARMTHYQALLLDTDRVQFGPVVALNPATLLPLPEEGLQHDCLDILAEAHGTRSDLMDQPLPDADHTWYTDGSSFLQEGQRKAGAAVTTETEVIWARALPAGTSAQRAELIALTQALKMAEGKKLNVYTDSRYAFATAHIHGEIYRRRGWLTSEGKEIKNKDEILALLKALFLPKRLSIIHCPGHQKGNSAEARGNRMADQAAREVATRETPETSTLLAGKRTADGSEFEKRTADGSEFESPKKKAKVE

SEQ ID NO: 2326 - protein, 2096 aa, synthetic construct
MPAAKRVKLDGGDKKYSIGLDIGTNSVGWAVITDEYKVPSKKFKVLGNTDRHSIKKNLIGALLFDSGETAEATRLKRTARRRYTRRKNRICYLQEIFSNEMAKVDDSFFHRLEESFLVEEDKKHERHPIFGNIVDEVAYHEKYPTIYHLRKKLVDSTDKADLRLIYLALAHMIKFRGHFLIEGDLNPDNSDVDKLFIQLVQTYNQLFEENPINASGVDAKAILSARLSKSRRLENLIAQLPGEKKNGLFGNLIALSLGLTPNFKSNFDLAEDAKLQLSKDTYDDDLDNLLAQIGDQYADLFLAAKNLSDAILLSDILRVNTEITKAPLSASMIKRYDEHHQDLTLLKALVRQQLPEKYKEIFFDQSKNGYAGYIDGGASQEEFYKFIKPILEKMDGTEELLVKLNREDLLRKQRTFDNGSIPHQIHLGELHAILRRQEDFYPFLKDNREKIEKILTFRIPYYVGPLARGNSRFAWMTRKSEETITPWNFEEVVDKGASAQSFIERMTNFDKNLPNEKVLPKHSLLYEYFTVYNELTKVKYVTEGMRKPAFLSGEQKKAIVDLLFKTNRKVTVKQLKEDYFKKIECFDSVEISGVEDRFNASLGTYHDLLKIIKDKDFLDNEENEDILEDIVLTLTLFEDREMIEERLKTYAHLFDDKVMKQLKRRRYTGWGRLSRKLINGIRDKQSGKTILDFLKSDGFANRNFMQLIHDDSLTFKEDIQKAQVSGQGDSLHEHIANLAGSPAIKKGILQTVKVVDELVKVMGRHKPENIVIEMARENQTTQKGQKNSRERMKRIEEGIKELGSQILKEHPVENTQLQNEKLYLYYLQNGRDMYVDQELDINRLSDYDVDHIVPQSFLKDDSIDNKVLTRSDKARGKSDNVPSEEVVKKMKNYWRQLLNAKLITQRKFDNLTKAERGGLSELDKAGFIKRQLVETRQITKHVAQILDSRMNTKYDENDKLIREVKVITLKSKLVSDFRKDFQFYKVREINNYHHAHDAYLNAVVGTALIKKYPKLESEFVYGDYKVYDVRKMIAKSEQEIGKATAKYFFYSNIMNFFKTEITLANGEIRKRPLIETNGETGEIVWDKGRDFATVRKVLSMPQVNIVKKTEVQTGGFSKESILPKRNSDKLIARKKDWDPKKYGGFDSPTVAYSVLVVAKVEKGKSKKLKSVKELLGITIMERSSFEKNPIDFLEAKGYKEVKKDLIIKLPKYSLFELENGRKRMLASAGELQKGNELALPSKYVNFLYLASHYEKLKGSPEDNEQKQLFVEQHKHYLDEIIEQISEFSKRVILADANLDKVLSAYNKHRDKPIREQAENIIHLFTLTNLGAPAAFKYFDTTIDRKRYTSTKEVLDATLIHQSITGLYETRIDLSQLGGDGGGGSEAAAKPAPGGTLNIEDEYRLHETSKEPDVSLGSTWLSDFPQAWAETGGMGLAVRQAPLIIPLKATSTPVSIKQYPMSQEARLGIKPHIQRLLDQGILVPCQSPWNTPLLPVKKPGTNDYRPVQDLREVNKRVEDIHPTVPNPYNLLSGLPPSHQWYTVLDLKDAFFCLRLHPTSQPLFAFEWRDPEMGISGQLTWTRLPQGFKNSPTLFNEALHRDLAGFRIQHPDLILLQYVDDLLLAATSELDCQQGTRALLQTLGDLGYRASAKKAQICQKQVKYLGYLLKEGQRWLTEARKETVMGQPIPKTPRQLREFLGKAGFCRLFIPGFAEMAAPLYPLTKPGTLFNWGPDQQKAFQEIKQALLTAPALGLPDLTKPFELFVDEKQGYAKGVLTQKLGPWRRPVAYLSKKLDPVAAGWPPCLRMVAAIAVLTKDAGKLTMGQPLVILAPHAVEALVKQPPDRWLSNARMTHYQALLLDTDRVQFGPVVALNPATLLPLPEEGLQHDCLDILAEAHGTRSDLMDQPLPDADHTWYTDGSSFLQEGQRKAGAAVTTETEVIWARALPAGTSAQRAELIALTQALKMAEGKKLNVYTDSRYAFATAHIHGEIYRRRGWLTSEGKEIKNKDEILALLKALFLPKRLSIIHCPGHQKGNSAEARGNRMADQAAREVATRETPETSTLLAGKRTADGSEFEKRTADGSEFESPKKKAKVE

SEQ ID NO: 2327 - protein, 2096 aa, synthetic construct
MPAAKRVKLDGGDKKYSIGLDIGTNSVGWAVITDEYKVPSKKFKVLGNTDRHSIKKNLIGALLFDSGETAEATRLKRTARRRYTRRKNRICYLQEIFSNEMAKVDDSFFHRLEESFLVEEDKKHERHPIFGNIVDEVAYHEKYPTIYHLRKKLVDSTDKADLRLIYLALAHMIKFRGHFLIEGDLNPDNSDVDKLFIQLVQTYNQLFEENPINASGVDAKAILSARLSKSRRLENLIAQLPGEKKNGLFGNLIALSLGLTPNFKSNFDLAEDAKLQLSKDTYDDDLDNLLAQIGDQYADLFLAAKNLSDAILLSDILRVNTEITKAPLSASMIKRYDEHHQDLTLLKALVRQQLPEKYKEIFFDQSKNGYAGYIDGGASQEEFYKFIKPILEKMDGTEELLVKLNREDLLRKQRTFDNGSIPHQIHLGELHAILRRQEDFYPFLKDNREKIEKILTFRIPYYVGPLARGNSRFAWMTRKSEETITPWNFEEVVDKGASAQSFIERMTNFDKNLPNEKVLPKHSLLYEYFTVYNELTKVKYVTEGMRKPAFLSGEQKKAIVDLLFKTNRKVTVKQLKEDYFKKIECFDSVEISGVEDRFNASLGTYHDLLKIIKDKDFLDNEENEDILEDIVLTLTLFEDREMIEERLKTYAHLFDDKVMKQLKRRRYTGWGRLSRKLINGIRDKQSGKTILDFLKSDGFANRNFMQLIHDDSLTFKEDIQKAQVSGQGDSLHEHIANLAGSPAIKKGILQTVKVVDELVKVMGRHKPENIVIEMARENQTTQKGQKNSRERMKRIEEGIKELGSQILKEHPVENTQLQNEKLYLYYLQNGRDMYVDQELDINRLSDYDVDHIVPQSFLKDDSIDNKVLTRSDKARGKSDNVPSEEVVKKMKNYWRQLLNAKLITQRKFDNLTKAERGGLSELDKAGFIKRQLVETRQITKHVAQILDSRMNTKYDENDKLIREVKVITLKSKLVSDFRKDFQFYKVREINNYHHAHDAYLNAVVGTALIKKYPKLESEFVYGDYKVYDVRKMIAKSEQEIGKATAKYFFYSNIMNFFKTEITLANGEIRKRPLIETNGETGEIVWDKGRDFATVRKVLSMPQVNIVKKTEVQTGGFSKESILPKRNSDKLIARKKDWDPKKYGGFDSPTVAYSVLVVAKVEKGKSKKLKSVKELLGITIMERSSFEKNPIDFLEAKGYKEVKKDLIIKLPKYSLFELENGRKRMLASAGELQKGNELALPSKYVNFLYLASHYEKLKGSPEDNEQKQLFVEQHKHYLDEIIEQISEFSKRVILADANLDKVLSAYNKHRDKPIREQAENIIHLFTLTNLGAPAAFKYFDTTIDRKRYTSTKEVLDATLIHQSITGLYETRIDLSQLGGDGGGGGGSSEAAAKGGTLNIEDEYRLHETSKEPDVSLGSTWLSDFPQAWAETGGMGLAVRQAPLIIPLKATSTPVSIKQYPMSQEARLGIKPHIQRLLDQGILVPCQSPWNTPLLPVKKPGTNDYRPVQDLREVNKRVEDIHPTVPNPYNLLSGLPPSHQWYTVLDLKDAFFCLRLHPTSQPLFAFEWRDPEMGISGQLTWTRLPQGFKNSPTLFNEALHRDLAGFRIQHPDLILLQYVDDLLLAATSELDCQQGTRALLQTLGDLGYRASAKKAQICQKQVKYLGYLLKEGQRWLTEARKETVMGQPIPKTPRQLREFLGKAGFCRLFIPGFAEMAAPLYPLTKPGTLFNWGPDQQKAFQEIKQALLTAPALGLPDLTKPFELFVDEKQGYAKGVLTQKLGPWRRPVAYLSKKLDPVAAGWPPCLRMVAAIAVLTKDAGKLTMGQPLVILAPHAVEALVKQPPDRWLSNARMTHYQALLLDTDRVQFGPVVALNPATLLPLPEEGLQHDCLDILAEAHGTRSDLMDQPLPDADHTWYTDGSSFLQEGQRKAGAAVTTETEVIWARALPAGTSAQRAELIALTQALKMAEGKKLNVYTDSRYAFATAHIHGEIYRRRGWLTSEGKEIKNKDEILALLKALFLPKRLSIIHCPGHQKGNSAEARGNRMADQAAREVATRETPETSTLLAGKRTADGSEFEKRTADGSEFESPKKKAKVE

SEQ ID NO: 2328 - protein, 2090 aa, synthetic construct
MPAAKRVKLDGGDKKYSIGLDIGTNSVGWAVITDEYKVPSKKFKVLGNTDRHSIKKNLIGALLFDSGETAEATRLKRTARRRYTRRKNRICYLQEIFSNEMAKVDDSFFHRLEESFLVEEDKKHERHPIFGNIVDEVAYHEKYPTIYHLRKKLVDSTDKADLRLIYLALAHMIKFRGHFLIEGDLNPDNSDVDKLFIQLVQTYNQLFEENPINASGVDAKAILSARLSKSRRLENLIAQLPGEKKNGLFGNLIALSLGLTPNFKSNFDLAEDAKLQLSKDTYDDDLDNLLAQIGDQYADLFLAAKNLSDAILLSDILRVNTEITKAPLSASMIKRYDEHHQDLTLLKALVRQQLPEKYKEIFFDQSKNGYAGYIDGGASQEEFYKFIKPILEKMDGTEELLVKLNREDLLRKQRTFDNGSIPHQIHLGELHAILRRQEDFYPFLKDNREKIEKILTFRIPYYVGPLARGNSRFAWMTRKSEETITPWNFEEVVDKGASAQSFIERMTNFDKNLPNEKVLPKHSLLYEYFTVYNELTKVKYVTEGMRKPAFLSGEQKKAIVDLLFKTNRKVTVKQLKEDYFKKIECFDSVEISGVEDRFNASLGTYHDLLKIIKDKDFLDNEENEDILEDIVLTLTLFEDREMIEERLKTYAHLFDDKVMKQLKRRRYTGWGRLSRKLINGIRDKQSGKTILDFLKSDGFANRNFMQLIHDDSLTFKEDIQKAQVSGQGDSLHEHIANLAGSPAIKKGILQTVKVVDELVKVMGRHKPENIVIEMARENQTTQKGQKNSRERMKRIEEGIKELGSQILKEHPVENTQLQNEKLYLYYLQNGRDMYVDQELDINRLSDYDVDHIVPQSFLKDDSIDNKVLTRSDKARGKSDNVPSEEVVKKMKNYWRQLLNAKLITQRKFDNLTKAERGGLSELDKAGFIKRQLVETRQITKHVAQILDSRMNTKYDENDKLIREVKVITLKSKLVSDFRKDFQFYKVREINNYHHAHDAYLNAVVGTALIKKYPKLESEFVYGDYKVYDVRKMIAKSEQEIGKATAKYFFYSNIMNFFKTEITLANGEIRKRPLIETNGETGEIVWDKGRDFATVRKVLSMPQVNIVKKTEVQTGGFSKESILPKRNSDKLIARKKDWDPKKYGGFDSPTVAYSVLVVAKVEKGKSKKLKSVKELLGITIMERSSFEKNPIDFLEAKGYKEVKKDLIIKLPKYSLFELENGRKRMLASAGELQKGNELALPSKYVNFLYLASHYEKLKGSPEDNEQKQLFVEQHKHYLDEIIEQISEFSKRVILADANLDKVLSAYNKHRDKPIREQAENIIHLFTLTNLGAPAAFKYFDTTIDRKRYTSTKEVLDATLIHQSITGLYETRIDLSQLGGDGGEAAAKGGTLNIEDEYRLHETSKEPDVSLGSTWLSDFPQAWAETGGMGLAVRQAPLIIPLKATSTPVSIKQYPMSQEARLGIKPHIQRLLDQGILVPCQSPWNTPLLPVKKPGTNDYRPVQDLREVNKRVEDIHPTVPNPYNLLSGLPPSHQWYTVLDLKDAFFCLRLHPTSQPLFAFEWRDPEMGISGQLTWTRLPQGFKNSPTLFNEALHRDLAGFRIQHPDLILLQYVDDLLLAATSELDCQQGTRALLQTLGDLGYRASAKKAQICQKQVKYLGYLLKEGQRWLTEARKETVMGQPIPKTPRQLREFLGKAGFCRLFIPGFAEMAAPLYPLTKPGTLFNWGPDQQKAFQEIKQALLTAPALGLPDLTKPFELFVDEKQGYAKGVLTQKLGPWRRPVAYLSKKLDPVAAGWPPCLRMVAAIAVLTKDAGKLTMGQPLVILAPHAVEALVKQPPDRWLSNARMTHYQALLLDTDRVQFGPVVALNPATLLPLPEEGLQHDCLDILAEAHGTRSDLMDQPLPDADHTWYTDGSSFLQEGQRKAGAAVTTETEVIWARALPAGTSAQRAELIALTQALKMAEGKKLNVYTDSRYAFATAHIHGEIYRRRGWLTSEGKEIKNKDEILALLKALFLPKRLSIIHCPGHQKGNSAEARGNRMADQAAREVATRETPETSTLLAGKRTADGSEFEKRTADGSEFESPKKKAKVE

SEQ ID NO: 2329 - protein, 2094 aa, synthetic construct
MPAAKRVKLDGGDKKYSIGLDIGTNSVGWAVITDEYKVPSKKFKVLGNTDRHSIKKNLIGALLFDSGETAEATRLKRTARRRYTRRKNRICYLQEIFSNEMAKVDDSFFHRLEESFLVEEDKKHERHPIFGNIVDEVAYHEKYPTIYHLRKKLVDSTDKADLRLIYLALAHMIKFRGHFLIEGDLNPDNSDVDKLFIQLVQTYNQLFEENPINASGVDAKAILSARLSKSRRLENLIAQLPGEKKNGLFGNLIALSLGLTPNFKSNFDLAEDAKLQLSKDTYDDDLDNLLAQIGDQYADLFLAAKNLSDAILLSDILRVNTEITKAPLSASMIKRYDEHHQDLTLLKALVRQQLPEKYKEIFFDQSKNGYAGYIDGGASQEEFYKFIKPILEKMDGTEELLVKLNREDLLRKQRTFDNGSIPHQIHLGELHAILRRQEDFYPFLKDNREKIEKILTFRIPYYVGPLARGNSRFAWMTRKSEETITPWNFEEVVDKGASAQSFIERMTNFDKNLPNEKVLPKHSLLYEYFTVYNELTKVKYVTEGMRKPAFLSGEQKKAIVDLLFKTNRKVTVKQLKEDYFKKIECFDSVEISGVEDRFNASLGTYHDLLKIIKDKDFLDNEENEDILEDIVLTLTLFEDREMIEERLKTYAHLFDDKVMKQLKRRRYTGWGRLSRKLINGIRDKQSGKTILDFLKSDGFANRNFMQLIHDDSLTFKEDIQKAQVSGQGDSLHEHIANLAGSPAIKKGILQTVKVVDELVKVMGRHKPENIVIEMARENQTTQKGQKNSRERMKRIEEGIKELGSQILKEHPVENTQLQNEKLYLYYLQNGRDMYVDQELDINRLSDYDVDHIVPQSFLKDDSIDNKVLTRSDKARGKSDNVPSEEVVKKMKNYWRQLLNAKLITQRKFDNLTKAERGGLSELDKAGFIKRQLVETRQITKHVAQILDSRMNTKYDENDKLIREVKVITLKSKLVSDFRKDFQFYKVREINNYHHAHDAYLNAVVGTALIKKYPKLESEFVYGDYKVYDVRKMIAKSEQEIGKATAKYFFYSNIMNFFKTEITLANGEIRKRPLIETNGETGEIVWDKGRDFATVRKVLSMPQVNIVKKTEVQTGGFSKESILPKRNSDKLIARKKDWDPKKYGGFDSPTVAYSVLVVAKVEKGKSKKLKSVKELLGITIMERSSFEKNPIDFLEAKGYKEVKKDLIIKLPKYSLFELENGRKRMLASAGELQKGNELALPSKYVNFLYLASHYEKLKGSPEDNEQKQLFVEQHKHYLDEIIEQISEFSKRVILADANLDKVLSAYNKHRDKPIREQAENIIHLFTLTNLGAPAAFKYFDTTIDRKRYTSTKEVLDATLIHQSITGLYETRIDLSQLGGDGGGSSPAPGGGGGTLNIEDEYRLHETSKEPDVSLGSTWLSDFPQAWAETGGMGLAVRQAPLIIPLKATSTPVSIKQYPMSQEARLGIKPHIQRLLDQGILVPCQSPWNTPLLPVKKPGTNDYRPVQDLREVNKRVEDIHPTVPNPYNLLSGLPPSHQWYTVLDLKDAFFCLRLHPTSQPLFAFEWRDPEMGISGQLTWTRLPQGFKNSPTLFNEALHRDLAGFRIQHPDLILLQYVDDLLLAATSELDCQQGTRALLQTLGDLGYRASAKKAQICQKQVKYLGYLLKEGQRWLTEARKETVMGQPIPKTPRQLREFLGKAGFCRLFIPGFAEMAAPLYPLTKPGTLFNWGPDQQKAFQEIKQALLTAPALGLPDLTKPFELFVDEKQGYAKGVLTQKLGPWRRPVAYLSKKLDPVAAGWPPCLRMVAAIAVLTKDAGKLTMGQPLVILAPHAVEALVKQPPDRWLSNARMTHYQALLLDTDRVQFGPVVALNPATLLPLPEEGLQHDCLDILAEAHGTRSDLMDQPLPDADHTWYTDGSSFLQEGQRKAGAAVTTETEVIWARALPAGTSAQRAELIALTQALKMAEGKKLNVYTDSRYAFATAHIHGEIYRRRGWLTSEGKEIKNKDEILALLKALFLPKRLSIIHCPGHQKGNSAEARGNRMADQAAREVATRETPETSTLLAGKRTADGSEFEKRTADGSEFESPKKKAKVE

SEQ ID NO: 2330 - protein, 2088 aa, synthetic construct
MPAAKRVKLDGGDKKYSIGLDIGTNSVGWAVITDEYKVPSKKFKVLGNTDRHSIKKNLIGALLFDSGETAEATRLKRTARRRYTRRKNRICYLQEIFSNEMAKVDDSFFHRLEESFLVEEDKKHERHPIFGNIVDEVAYHEKYPTIYHLRKKLVDSTDKADLRLIYLALAHMIKFRGHFLIEGDLNPDNSDVDKLFIQLVQTYNQLFEENPINASGVDAKAILSARLSKSRRLENLIAQLPGEKKNGLFGNLIALSLGLTPNFKSNFDLAEDAKLQLSKDTYDDDLDNLLAQIGDQYADLFLAAKNLSDAILLSDILRVNTEITKAPLSASMIKRYDEHHQDLTLLKALVRQQLPEKYKEIFFDQSKNGYAGYIDGGASQEEFYKFIKPILEKMDGTEELLVKLNREDLLRKQRTFDNGSIPHQIHLGELHAILRRQEDFYPFLKDNREKIEKILTFRIPYYVGPLARGNSRFAWMTRKSEETITPWNFEEVVDKGASAQSFIERMTNFDKNLPNEKVLPKHSLLYEYFTVYNELTKVKYVTEGMRKPAFLSGEQKKAIVDLLFKTNRKVTVKQLKEDYFKKIECFDSVEISGVEDRFNASLGTYHDLLKIIKDKDFLDNEENEDILEDIVLTLTLFEDREMIEERLKTYAHLFDDKVMKQLKRRRYTGWGRLSRKLINGIRDKQSGKTILDFLKSDGFANRNFMQLIHDDSLTFKEDIQKAQVSGQGDSLHEHIANLAGSPAIKKGILQTVKVVDELVKVMGRHKPENIVIEMARENQTTQKGQKNSRERMKRIEEGIKELGSQILKEHPVENTQLQNEKLYLYYLQNGRDMYVDQELDINRLSDYDVDHIVPQSFLKDDSIDNKVLTRSDKARGKSDNVPSEEVVKKMKNYWRQLLNAKLITQRKFDNLTKAERGGLSELDKAGFIKRQLVETRQITKHVAQILDSRMNTKYDENDKLIREVKVITLKSKLVSDFRKDFQFYKVREINNYHHAHDAYLNAVVGTALIKKYPKLESEFVYGDYKVYDVRKMIAKSEQEIGKATAKYFFYSNIMNFFKTEITLANGEIRKRPLIETNGETGEIVWDKGRDFATVRKVLSMPQVNIVKKTEVQTGGFSKESILPKRNSDKLIARKKDWDPKKYGGFDSPTVAYSVLVVAKVEKGKSKKLKSVKELLGITIMERSSFEKNPIDFLEAKGYKEVKKDLIIKLPKYSLFELENGRKRMLASAGELQKGNELALPSKYVNFLYLASHYEKLKGSPEDNEQKQLFVEQHKHYLDEIIEQISEFSKRVILADANLDKVLSAYNKHRDKPIREQAENIIHLFTLTNLGAPAAFKYFDTTIDRKRYTSTKEVLDATLIHQSITGLYETRIDLSQLGGDGGGSSGGTLNIEDEYRLHETSKEPDVSLGSTWLSDFPQAWAETGGMGLAVRQAPLIIPLKATSTPVSIKQYPMSQEARLGIKPHIQRLLDQGILVPCQSPWNTPLLPVKKPGTNDYRPVQDLREVNKRVEDIHPTVPNPYNLLSGLPPSHQWYTVLDLKDAFFCLRLHPTSQPLFAFEWRDPEMGISGQLTWTRLPQGFKNSPTLFNEALHRDLAGFRIQHPDLILLQYVDDLLLAATSELDCQQGTRALLQTLGDLGYRASAKKAQICQKQVKYLGYLLKEGQRWLTEARKETVMGQPIPKTPRQLREFLGKAGFCRLFIPGFAEMAAPLYPLTKPGTLFNWGPDQQKAFQEIKQALLTAPALGLPDLTKPFELFVDEKQGYAKGVLTQKLGPWRRPVAYLSKKLDPVAAGWPPCLRMVAAIAVLTKDAGKLTMGQPLVILAPHAVEALVKQPPDRWLSNARMTHYQALLLDTDRVQFGPVVALNPATLLPLPEEGLQHDCLDILAEAHGTRSDLMDQPLPDADHTWYTDGSSFLQEGQRKAGAAVTTETEVIWARALPAGTSAQRAELIALTQALKMAEGKKLNVYTDSRYAFATAHIHGEIYRRRGWLTSEGKEIKNKDEILALLKALFLPKRLSIIHCPGHQKGNSAEARGNRMADQAAREVATRETPETSTLLAGKRTADGSEFEKRTADGSEFESPKKKAKVE

SEQ ID NO: 2331 - protein, 2094 aa, synthetic construct
MPAAKRVKLDGGDKKYSIGLDIGTNSVGWAVITDEYKVPSKKFKVLGNTDRHSIKKNLIGALLFDSGETAEATRLKRTARRRYTRRKNRICYLQEIFSNEMAKVDDSFFHRLEESFLVEEDKKHERHPIFGNIVDEVAYHEKYPTIYHLRKKLVDSTDKADLRLIYLALAHMIKFRGHFLIEGDLNPDNSDVDKLFIQLVQTYNQLFEENPINASGVDAKAILSARLSKSRRLENLIAQLPGEKKNGLFGNLIALSLGLTPNFKSNFDLAEDAKLQLSKDTYDDDLDNLLAQIGDQYADLFLAAKNLSDAILLSDILRVNTEITKAPLSASMIKRYDEHHQDLTLLKALVRQQLPEKYKEIFFDQSKNGYAGYIDGGASQEEFYKFIKPILEKMDGTEELLVKLNREDLLRKQRTFDNGSIPHQIHLGELHAILRRQEDFYPFLKDNREKIEKILTFRIPYYVGPLARGNSRFAWMTRKSEETITPWNFEEVVDKGASAQSFIERMTNFDKNLPNEKVLPKHSLLYEYFTVYNELTKVKYVTEGMRKPAFLSGEQKKAIVDLLFKTNRKVTVKQLKEDYFKKIECFDSVEISGVEDRFNASLGTYHDLLKIIKDKDFLDNEENEDILEDIVLTLTLFEDREMIEERLKTYAHLFDDKVMKQLKRRRYTGWGRLSRKLINGIRDKQSGKTILDFLKSDGFANRNFMQLIHDDSLTFKEDIQKAQVSGQGDSLHEHIANLAGSPAIKKGILQTVKVVDELVKVMGRHKPENIVIEMARENQTTQKGQKNSRERMKRIEEGIKELGSQILKEHPVENTQLQNEKLYLYYLQNGRDMYVDQELDINRLSDYDVDHIVPQSFLKDDSIDNKVLTRSDKARGKSDNVPSEEVVKKMKNYWRQLLNAKLITQRKFDNLTKAERGGLSELDKAGFIKRQLVETRQITKHVAQILDSRMNTKYDENDKLIREVKVITLKSKLVSDFRKDFQFYKVREINNYHHAHDAYLNAVVGTALIKKYPKLESEFVYGDYKVYDVRKMIAKSEQEIGKATAKYFFYSNIMNFFKTEITLANGEIRKRPLIETNGETGEIVWDKGRDFATVRKVLSMPQVNIVKKTEVQTGGFSKESILPKRNSDKLIARKKDWDPKKYGGFDSPTVAYSVLVVAKVEKGKSKKLKSVKELLGITIMERSSFEKNPIDFLEAKGYKEVKKDLIIKLPKYSLFELENGRKRMLASAGELQKGNELALPSKYVNFLYLASHYEKLKGSPEDNEQKQLFVEQHKHYLDEIIEQISEFSKRVILADANLDKVLSAYNKHRDKPIREQAENIIHLFTLTNLGAPAAFKYFDTTIDRKRYTSTKEVLDATLIHQSITGLYETRIDLSQLGGDGGGGSGSSGGGGGTLNIEDEYRLHETSKEPDVSLGSTWLSDFPQAWAETGGMGLAVRQAPLIIPLKATSTPVSIKQYPMSQEARLGIKPHIQRLLDQGILVPCQSPWNTPLLPVKKPGTNDYRPVQDLREVNKRVEDIHPTVPNPYNLLSGLPPSHQWYTVLDLKDAFFCLRLHPTSQPLFAFEWRDPEMGISGQLTWTRLPQGFKNSPTLFNEALHRDLAGFRIQHPDLILLQYVDDLLLAATSELDCQQGTRALLQTLGDLGYRASAKKAQICQKQVKYLGYLLKEGQRWLTEARKETVMGQPIPKTPRQLREFLGKAGFCRLFIPGFAEMAAPLYPLTKPGTLFNWGPDQQKAFQEIKQALLTAPALGLPDLTKPFELFVDEKQGYAKGVLTQKLGPWRRPVAYLSKKLDPVAAGWPPCLRMVAAIAVLTKDAGKLTMGQPLVILAPHAVEALVKQPPDRWLSNARMTHYQALLLDTDRVQFGPVVALNPATLLPLPEEGLQHDCLDILAEAHGTRSDLMDQPLPDADHTWYTDGSSFLQEGQRKAGAAVTTETEVIWARALPAGTSAQRAELIALTQALKMAEGKKLNVYTDSRYAFATAHIHGEIYRRRGWLTSEGKEIKNKDEILALLKALFLPKRLSIIHCPGHQKGNSAEARGNRMADQAAREVATRETPETSTLLAGKRTADGSEFEKRTADGSEFESPKKKAKVE

SEQ ID NO: 2332 - protein, 2096 aa, synthetic construct
MPAAKRVKLDGGDKKYSIGLDIGTNSVGWAVITDEYKVPSKKFKVLGNTDRHSIKKNLIGALLFDSGETAEATRLKRTARRRYTRRKNRICYLQEIFSNEMAKVDDSFFHRLEESFLVEEDKKHERHPIFGNIVDEVAYHEKYPTIYHLRKKLVDSTDKADLRLIYLALAHMIKFRGHFLIEGDLNPDNSDVDKLFIQLVQTYNQLFEENPINASGVDAKAILSARLSKSRRLENLIAQLPGEKKNGLFGNLIALSLGLTPNFKSNFDLAEDAKLQLSKDTYDDDLDNLLAQIGDQYADLFLAAKNLSDAILLSDILRVNTEITKAPLSASMIKRYDEHHQDLTLLKALVRQQLPEKYKEIFFDQSKNGYAGYIDGGASQEEFYKFIKPILEKMDGTEELLVKLNREDLLRKQRTFDNGSIPHQIHLGELHAILRRQEDFYPFLKDNREKIEKILTFRIPYYVGPLARGNSRFAWMTRKSEETITPWNFEEVVDKGASAQSFIERMTNFDKNLPNEKVLPKHSLLYEYFTVYNELTKVKYVTEGMRKPAFLSGEQKKAIVDLLFKTNRKVTVKQLKEDYFKKIECFDSVEISGVEDRFNASLGTYHDLLKIIKDKDFLDNEENEDILEDIVLTLTLFEDREMIEERLKTYAHLFDDKVMKQLKRRRYTGWGRLSRKLINGIRDKQSGKTILDFLKSDGFANRNFMQLIHDDSLTFKEDIQKAQVSGQGDSLHEHIANLAGSPAIKKGILQTVKVVDELVKVMGRHKPENIVIEMARENQTTQKGQKNSRERMKRIEEGIKELGSQILKEHPVENTQLQNEKLYLYYLQNGRDMYVDQELDINRLSDYDVDHIVPQSFLKDDSIDNKVLTRSDKARGKSDNVPSEEVVKKMKNYWRQLLNAKLITQRKFDNLTKAERGGLSELDKAGFIKRQLVETRQITKHVAQILDSRMNTKYDENDKLIREVKVITLKSKLVSDFRKDFQFYKVREINNYHHAHDAYLNAVVGTALIKKYPKLESEFVYGDYKVYDVRKMIAKSEQEIGKATAKYFFYSNIMNFFKTEITLANGEIRKRPLIETNGETGEIVWDKGRDFATVRKVLSMPQVNIVKKTEVQTGGFSKESILPKRNSDKLIARKKDWDPKKYGGFDSPTVAYSVLVVAKVEKGKSKKLKSVKELLGITIMERSSFEKNPIDFLEAKGYKEVKKDLIIKLPKYSLFELENGRKRMLASAGELQKGNELALPSKYVNFLYLASHYEKLKGSPEDNEQKQLFVEQHKHYLDEIIEQISEFSKRVILADANLDKVLSAYNKHRDKPIREQAENIIHLFTLTNLGAPAAFKYFDTTIDRKRYTSTKEVLDATLIHQSITGLYETRIDLSQLGGDGGPAPGGSEAAAKGGTLNIEDEYRLHETSKEPDVSLGSTWLSDFPQAWAETGGMGLAVRQAPLIIPLKATSTPVSIKQYPMSQEARLGIKPHIQRLLDQGILVPCQSPWNTPLLPVKKPGTNDYRPVQDLREVNKRVEDIHPTVPNPYNLLSGLPPSHQWYTVLDLKDAFFCLRLHPTSQPLFAFEWRDPEMGISGQLTWTRLPQGFKNSPTLFNEALHRDLAGFRIQHPDLILLQYVDDLLLAATSELDCQQGTRALLQTLGDLGYRASAKKAQICQKQVKYLGYLLKEGQRWLTEARKETVMGQPIPKTPRQLREFLGKAGFCRLFIPGFAEMAAPLYPLTKPGTLFNWGPDQQKAFQEIKQALLTAPALGLPDLTKPFELFVDEKQGYAKGVLTQKLGPWRRPVAYLSKKLDPVAAGWPPCLRMVAAIAVLTKDAGKLTMGQPLVILAPHAVEALVKQPPDRWLSNARMTHYQALLLDTDRVQFGPVVALNPATLLPLPEEGLQHDCLDILAEAHGTRSDLMDQPLPDADHTWYTDGSSFLQEGQRKAGAAVTTETEVIWARALPAGTSAQRAELIALTQALKMAEGKKLNVYTDSRYAFATAHIHGEIYRRRGWLTSEGKEIKNKDEILALLKALFLPKRLSIIHCPGHQKGNSAEARGNRMADQAAREVATRETPETSTLLAGKRTADGSEFEKRTADGSEFESPKKKAKVE

SEQ ID NO: 2333 - protein, 2100 aa, synthetic construct
MPAAKRVKLDGGDKKYSIGLDIGTNSVGWAVITDEYKVPSKKFKVLGNTDRHSIKKNLIGALLFDSGETAEATRLKRTARRRYTRRKNRICYLQEIFSNEMAKVDDSFFHRLEESFLVEEDKKHERHPIFGNIVDEVAYHEKYPTIYHLRKKLVDSTDKADLRLIYLALAHMIKFRGHFLIEGDLNPDNSDVDKLFIQLVQTYNQLFEENPINASGVDAKAILSARLSKSRRLENLIAQLPGEKKNGLFGNLIALSLGLTPNFKSNFDLAEDAKLQLSKDTYDDDLDNLLAQIGDQYADLFLAAKNLSDAILLSDILRVNTEITKAPLSASMIKRYDEHHQDLTLLKALVRQQLPEKYKEIFFDQSKNGYAGYIDGGASQEEFYKFIKPILEKMDGTEELLVKLNREDLLRKQRTFDNGSIPHQIHLGELHAILRRQEDFYPFLKDNREKIEKILTFRIPYYVGPLARGNSRFAWMTRKSEETITPWNFEEVVDKGASAQSFIERMTNFDKNLPNEKVLPKHSLLYEYFTVYNELTKVKYVTEGMRKPAFLSGEQKKAIVDLLFKTNRKVTVKQLKEDYFKKIECFDSVEISGVEDRFNASLGTYHDLLKIIKDKDFLDNEENEDILEDIVLTLTLFEDREMIEERLKTYAHLFDDKVMKQLKRRRYTGWGRLSRKLINGIRDKQSGKTILDFLKSDGFANRNFMQLIHDDSLTFKEDIQKAQVSGQGDSLHEHIANLAGSPAIKKGILQTVKVVDELVKVMGRHKPENIVIEMARENQTTQKGQKNSRERMKRIEEGIKELGSQILKEHPVENTQLQNEKLYLYYLQNGRDMYVDQELDINRLSDYDVDHIVPQSFLKDDSIDNKVLTRSDKARGKSDNVPSEEVVKKMKNYWRQLLNAKLITQRKFDNLTKAERGGLSELDKAGFIKRQLVETRQITKHVAQILDSRMNTKYDENDKLIREVKVITLKSKLVSDFRKDFQFYKVREINNYHHAHDAYLNAVVGTALIKKYPKLESEFVYGDYKVYDVRKMIAKSEQEIGKATAKYFFYSNIMNFFKTEITLANGEIRKRPLIETNGETGEIVWDKGRDFATVRKVLSMPQVNIVKKTEVQTGGFSKESILPKRNSDKLIARKKDWDPKKYGGFDSPTVAYSVLVVAKVEKGKSKKLKSVKELLGITIMERSSFEKNPIDFLEAKGYKEVKKDLIIKLPKYSLFELENGRKRMLASAGELQKGNELALPSKYVNFLYLASHYEKLKGSPEDNEQKQLFVEQHKHYLDEIIEQISEFSKRVILADANLDKVLSAYNKHRDKPIREQAENIIHLFTLTNLGAPAAFKYFDTTIDRKRYTSTKEVLDATLIHQSITGLYETRIDLSQLGGDGGGGGGSGGGGSGGGGSGGTLNIEDEYRLHETSKEPDVSLGSTWLSDFPQAWAETGGMGLAVRQAPLIIPLKATSTPVSIKQYPMSQEARLGIKPHIQRLLDQGILVPCQSPWNTPLLPVKKPGTNDYRPVQDLREVNKRVEDIHPTVPNPYNLLSGLPPSHQWYTVLDLKDAFFCLRLHPTSQPLFAFEWRDPEMGISGQLTWTRLPQGFKNSPTLFNEALHRDLAGFRIQHPDLILLQYVDDLLLAATSELDCQQGTRALLQTLGDLGYRASAKKAQICQKQVKYLGYLLKEGQRWLTEARKETVMGQPIPKTPRQLREFLGKAGFCRLFIPGFAEMAAPLYPLTKPGTLFNWGPDQQKAFQEIKQALLTAPALGLPDLTKPFELFVDEKQGYAKGVLTQKLGPWRRPVAYLSKKLDPVAAGWPPCLRMVAAIAVLTKDAGKLTMGQPLVILAPHAVEALVKQPPDRWLSNARMTHYQALLLDTDRVQFGPVVALNPATLLPLPEEGLQHDCLDILAEAHGTRSDLMDQPLPDADHTWYTDGSSFLQEGQRKAGAAVTTETEVIWARALPAGTSAQRAELIALTQALKMAEGKKLNVYTDSRYAFATAHIHGEIYRRRGWLTSEGKEIKNKDEILALLKALFLPKRLSIIHCPGHQKGNSAEARGNRMADQAAREVATRETPETSTLLAGKRTADGSEFEKRTADGSEFESPKKKAKVE

SEQ ID NO: 2334 - protein, 2096 aa, synthetic construct
MPAAKRVKLDGGDKKYSIGLDIGTNSVGWAVITDEYKVPSKKFKVLGNTDRHSIKKNLIGALLFDSGETAEATRLKRTARRRYTRRKNRICYLQEIFSNEMAKVDDSFFHRLEESFLVEEDKKHERHPIFGNIVDEVAYHEKYPTIYHLRKKLVDSTDKADLRLIYLALAHMIKFRGHFLIEGDLNPDNSDVDKLFIQLVQTYNQLFEENPINASGVDAKAILSARLSKSRRLENLIAQLPGEKKNGLFGNLIALSLGLTPNFKSNFDLAEDAKLQLSKDTYDDDLDNLLAQIGDQYADLFLAAKNLSDAILLSDILRVNTEITKAPLSASMIKRYDEHHQDLTLLKALVRQQLPEKYKEIFFDQSKNGYAGYIDGGASQEEFYKFIKPILEKMDGTEELLVKLNREDLLRKQRTFDNGSIPHQIHLGELHAILRRQEDFYPFLKDNREKIEKILTFRIPYYVGPLARGNSRFAWMTRKSEETITPWNFEEVVDKGASAQSFIERMTNFDKNLPNEKVLPKHSLLYEYFTVYNELTKVKYVTEGMRKPAFLSGEQKKAIVDLLFKTNRKVTVKQLKEDYFKKIECFDSVEISGVEDRFNASLGTYHDLLKIIKDKDFLDNEENEDILEDIVLTLTLFEDREMIEERLKTYAHLFDDKVMKQLKRRRYTGWGRLSRKLINGIRDKQSGKTILDFLKSDGFANRNFMQLIHDDSLTFKEDIQKAQVSGQGDSLHEHIANLAGSPAIKKGILQTVKVVDELVKVMGRHKPENIVIEMARENQTTQKGQKNSRERMKRIEEGIKELGSQILKEHPVENTQLQNEKLYLYYLQNGRDMYVDQELDINRLSDYDVDHIVPQSFLKDDSIDNKVLTRSDKARGKSDNVPSEEVVKKMKNYWRQLLNAKLITQRKFDNLTKAERGGLSELDKAGFIKRQLVETRQITKHVAQILDSRMNTKYDENDKLIREVKVITLKSKLVSDFRKDFQFYKVREINNYHHAHDAYLNAVVGTALIKKYPKLESEFVYGDYKVYDVRKMIAKSEQEIGKATAKYFFYSNIMNFFKTEITLANGEIRKRPLIETNGETGEIVWDKGRDFATVRKVLSMPQVNIVKKTEVQTGGFSKESILPKRNSDKLIARKKDWDPKKYGGFDSPTVAYSVLVVAKVEKGKSKKLKSVKELLGITIMERSSFEKNPIDFLEAKGYKEVKKDLIIKLPKYSLFELENGRKRMLASAGELQKGNELALPSKYVNFLYLASHYEKLKGSPEDNEQKQLFVEQHKHYLDEIIEQISEFSKRVILADANLDKVLSAYNKHRDKPIREQAENIIHLFTLTNLGAPAAFKYFDTTIDRKRYTSTKEVLDATLIHQSITGLYETRIDLSQLGGDGGEAAAKGGSGGGGGTLNIEDEYRLHETSKEPDVSLGSTWLSDFPQAWAETGGMGLAVRQAPLIIPLKATSTPVSIKQYPMSQEARLGIKPHIQRLLDQGILVPCQSPWNTPLLPVKKPGTNDYRPVQDLREVNKRVEDIHPTVPNPYNLLSGLPPSHQWYTVLDLKDAFFCLRLHPTSQPLFAFEWRDPEMGISGQLTWTRLPQGFKNSPTLFNEALHRDLAGFRIQHPDLILLQYVDDLLLAATSELDCQQGTRALLQTLGDLGYRASAKKAQICQKQVKYLGYLLKEGQRWLTEARKETVMGQPIPKTPRQLREFLGKAGFCRLFIPGFAEMAAPLYPLTKPGTLFNWGPDQQKAFQEIKQALLTAPALGLPDLTKPFELFVDEKQGYAKGVLTQKLGPWRRPVAYLSKKLDPVAAGWPPCLRMVAAIAVLTKDAGKLTMGQPLVILAPHAVEALVKQPPDRWLSNARMTHYQALLLDTDRVQFGPVVALNPATLLPLPEEGLQHDCLDILAEAHGTRSDLMDQPLPDADHTWYTDGSSFLQEGQRKAGAAVTTETEVIWARALPAGTSAQRAELIALTQALKMAEGKKLNVYTDSRYAFATAHIHGEIYRRRGWLTSEGKEIKNKDEILALLKALFLPKRLSIIHCPGHQKGNSAEARGNRMADQAAREVATRETPETSTLLAGKRTADGSEFEKRTADGSEFESPKKKAKVE

SEQ ID NO: 2335 - protein, 2091 aa, synthetic construct
MPAAKRVKLDGGDKKYSIGLDIGTNSVGWAVITDEYKVPSKKFKVLGNTDRHSIKKNLIGALLFDSGETAEATRLKRTARRRYTRRKNRICYLQEIFSNEMAKVDDSFFHRLEESFLVEEDKKHERHPIFGNIVDEVAYHEKYPTIYHLRKKLVDSTDKADLRLIYLALAHMIKFRGHFLIEGDLNPDNSDVDKLFIQLVQTYNQLFEENPINASGVDAKAILSARLSKSRRLENLIAQLPGEKKNGLFGNLIALSLGLTPNFKSNFDLAEDAKLQLSKDTYDDDLDNLLAQIGDQYADLFLAAKNLSDAILLSDILRVNTEITKAPLSASMIKRYDEHHQDLTLLKALVRQQLPEKYKEIFFDQSKNGYAGYIDGGASQEEFYKFIKPILEKMDGTEELLVKLNREDLLRKQRTFDNGSIPHQIHLGELHAILRRQEDFYPFLKDNREKIEKILTFRIPYYVGPLARGNSRFAWMTRKSEETITPWNFEEVVDKGASAQSFIERMTNFDKNLPNEKVLPKHSLLYEYFTVYNELTKVKYVTEGMRKPAFLSGEQKKAIVDLLFKTNRKVTVKQLKEDYFKKIECFDSVEISGVEDRFNASLGTYHDLLKIIKDKDFLDNEENEDILEDIVLTLTLFEDREMIEERLKTYAHLFDDKVMKQLKRRRYTGWGRLSRKLINGIRDKQSGKTILDFLKSDGFANRNFMQLIHDDSLTFKEDIQKAQVSGQGDSLHEHIANLAGSPAIKKGILQTVKVVDELVKVMGRHKPENIVIEMARENQTTQKGQKNSRERMKRIEEGIKELGSQILKEHPVENTQLQNEKLYLYYLQNGRDMYVDQELDINRLSDYDVDHIVPQSFLKDDSIDNKVLTRSDKARGKSDNVPSEEVVKKMKNYWRQLLNAKLITQRKFDNLTKAERGGLSELDKAGFIKRQLVETRQITKHVAQILDSRMNTKYDENDKLIREVKVITLKSKLVSDFRKDFQFYKVREINNYHHAHDAYLNAVVGTALIKKYPKLESEFVYGDYKVYDVRKMIAKSEQEIGKATAKYFFYSNIMNFFKTEITLANGEIRKRPLIETNGETGEIVWDKGRDFATVRKVLSMPQVNIVKKTEVQTGGFSKESILPKRNSDKLIARKKDWDPKKYGGFDSPTVAYSVLVVAKVEKGKSKKLKSVKELLGITIMERSSFEKNPIDFLEAKGYKEVKKDLIIKLPKYSLFELENGRKRMLASAGELQKGNELALPSKYVNFLYLASHYEKLKGSPEDNEQKQLFVEQHKHYLDEIIEQISEFSKRVILADANLDKVLSAYNKHRDKPIREQAENIIHLFTLTNLGAPAAFKYFDTTIDRKRYTSTKEVLDATLIHQSITGLYETRIDLSQLGGDGGGGSGGGGGTLNIEDEYRLHETSKEPDVSLGSTWLSDFPQAWAETGGMGLAVRQAPLIIPLKATSTPVSIKQYPMSQEARLGIKPHIQRLLDQGILVPCQSPWNTPLLPVKKPGTNDYRPVQDLREVNKRVEDIHPTVPNPYNLLSGLPPSHQWYTVLDLKDAFFCLRLHPTSQPLFAFEWRDPEMGISGQLTWTRLPQGFKNSPTLFNEALHRDLAGFRIQHPDLILLQYVDDLLLAATSELDCQQGTRALLQTLGDLGYRASAKKAQICQKQVKYLGYLLKEGQRWLTEARKETVMGQPIPKTPRQLREFLGKAGFCRLFIPGFAEMAAPLYPLTKPGTLFNWGPDQQKAFQEIKQALLTAPALGLPDLTKPFELFVDEKQGYAKGVLTQKLGPWRRPVAYLSKKLDPVAAGWPPCLRMVAAIAVLTKDAGKLTMGQPLVILAPHAVEALVKQPPDRWLSNARMTHYQALLLDTDRVQFGPVVALNPATLLPLPEEGLQHDCLDILAEAHGTRSDLMDQPLPDADHTWYTDGSSFLQEGQRKAGAAVTTETEVIWARALPAGTSAQRAELIALTQALKMAEGKKLNVYTDSRYAFATAHIHGEIYRRRGWLTSEGKEIKNKDEILALLKALFLPKRLSIIHCPGHQKGNSAEARGNRMADQAAREVATRETPETSTLLAGKRTADGSEFEKRTADGSEFESPKKKAKVE

SEQ ID NO: 2336 - protein, 2091 aa, synthetic construct
MPAAKRVKLDGGDKKYSIGLDIGTNSVGWAVITDEYKVPSKKFKVLGNTDRHSIKKNLIGALLFDSGETAEATRLKRTARRRYTRRKNRICYLQEIFSNEMAKVDDSFFHRLEESFLVEEDKKHERHPIFGNIVDEVAYHEKYPTIYHLRKKLVDSTDKADLRLIYLALAHMIKFRGHFLIEGDLNPDNSDVDKLFIQLVQTYNQLFEENPINASGVDAKAILSARLSKSRRLENLIAQLPGEKKNGLFGNLIALSLGLTPNFKSNFDLAEDAKLQLSKDTYDDDLDNLLAQIGDQYADLFLAAKNLSDAILLSDILRVNTEITKAPLSASMIKRYDEHHQDLTLLKALVRQQLPEKYKEIFFDQSKNGYAGYIDGGASQEEFYKFIKPILEKMDGTEELLVKLNREDLLRKQRTFDNGSIPHQIHLGELHAILRRQEDFYPFLKDNREKIEKILTFRIPYYVGPLARGNSRFAWMTRKSEETITPWNFEEVVDKGASAQSFIERMTNFDKNLPNEKVLPKHSLLYEYFTVYNELTKVKYVTEGMRKPAFLSGEQKKAIVDLLFKTNRKVTVKQLKEDYFKKIECFDSVEISGVEDRFNASLGTYHDLLKIIKDKDFLDNEENEDILEDIVLTLTLFEDREMIEERLKTYAHLFDDKVMKQLKRRRYTGWGRLSRKLINGIRDKQSGKTILDFLKSDGFANRNFMQLIHDDSLTFKEDIQKAQVSGQGDSLHEHIANLAGSPAIKKGILQTVKVVDELVKVMGRHKPENIVIEMARENQTTQKGQKNSRERMKRIEEGIKELGSQILKEHPVENTQLQNEKLYLYYLQNGRDMYVDQELDINRLSDYDVDHIVPQSFLKDDSIDNKVLTRSDKARGKSDNVPSEEVVKKMKNYWRQLLNAKLITQRKFDNLTKAERGGLSELDKAGFIKRQLVETRQITKHVAQILDSRMNTKYDENDKLIREVKVITLKSKLVSDFRKDFQFYKVREINNYHHAHDAYLNAVVGTALIKKYPKLESEFVYGDYKVYDVRKMIAKSEQEIGKATAKYFFYSNIMNFFKTEITLANGEIRKRPLIETNGETGEIVWDKGRDFATVRKVLSMPQVNIVKKTEVQTGGFSKESILPKRNSDKLIARKKDWDPKKYGGFDSPTVAYSVLVVAKVEKGKSKKLKSVKELLGITIMERSSFEKNPIDFLEAKGYKEVKKDLIIKLPKYSLFELENGRKRMLASAGELQKGNELALPSKYVNFLYLASHYEKLKGSPEDNEQKQLFVEQHKHYLDEIIEQISEFSKRVILADANLDKVLSAYNKHRDKPIREQAENIIHLFTLTNLGAPAAFKYFDTTIDRKRYTSTKEVLDATLIHQSITGLYETRIDLSQLGGDGGPAPGSSGGTLNIEDEYRLHETSKEPDVSLGSTWLSDFPQAWAETGGMGLAVRQAPLIIPLKATSTPVSIKQYPMSQEARLGIKPHIQRLLDQGILVPCQSPWNTPLLPVKKPGTNDYRPVQDLREVNKRVEDIHPTVPNPYNLLSGLPPSHQWYTVLDLKDAFFCLRLHPTSQPLFAFEWRDPEMGISGQLTWTRLPQGFKNSPTLFNEALHRDLAGFRIQHPDLILLQYVDDLLLAATSELDCQQGTRALLQTLGDLGYRASAKKAQICQKQVKYLGYLLKEGQRWLTEARKETVMGQPIPKTPRQLREFLGKAGFCRLFIPGFAEMAAPLYPLTKPGTLFNWGPDQQKAFQEIKQALLTAPALGLPDLTKPFELFVDEKQGYAKGVLTQKLGPWRRPVAYLSKKLDPVAAGWPPCLRMVAAIAVLTKDAGKLTMGQPLVILAPHAVEALVKQPPDRWLSNARMTHYQALLLDTDRVQFGPVVALNPATLLPLPEEGLQHDCLDILAEAHGTRSDLMDQPLPDADHTWYTDGSSFLQEGQRKAGAAVTTETEVIWARALPAGTSAQRAELIALTQALKMAEGKKLNVYTDSRYAFATAHIHGEIYRRRGWLTSEGKEIKNKDEILALLKALFLPKRLSIIHCPGHQKGNSAEARGNRMADQAAREVATRETPETSTLLAGKRTADGSEFEKRTADGSEFESPKKKAKVE

SEQ ID NO: 2337 - protein, 2093 aa, synthetic construct
MPAAKRVKLDGGDKKYSIGLDIGTNSVGWAVITDEYKVPSKKFKVLGNTDRHSIKKNLIGALLFDSGETAEATRLKRTARRRYTRRKNRICYLQEIFSNEMAKVDDSFFHRLEESFLVEEDKKHERHPIFGNIVDEVAYHEKYPTIYHLRKKLVDSTDKADLRLIYLALAHMIKFRGHFLIEGDLNPDNSDVDKLFIQLVQTYNQLFEENPINASGVDAKAILSARLSKSRRLENLIAQLPGEKKNGLFGNLIALSLGLTPNFKSNFDLAEDAKLQLSKDTYDDDLDNLLAQIGDQYADLFLAAKNLSDAILLSDILRVNTEITKAPLSASMIKRYDEHHQDLTLLKALVRQQLPEKYKEIFFDQSKNGYAGYIDGGASQEEFYKFIKPILEKMDGTEELLVKLNREDLLRKQRTFDNGSIPHQIHLGELHAILRRQEDFYPFLKDNREKIEKILTFRIPYYVGPLARGNSRFAWMTRKSEETITPWNFEEVVDKGASAQSFIERMTNFDKNLPNEKVLPKHSLLYEYFTVYNELTKVKYVTEGMRKPAFLSGEQKKAIVDLLFKTNRKVTVKQLKEDYFKKIECFDSVEISGVEDRFNASLGTYHDLLKIIKDKDFLDNEENEDILEDIVLTLTLFEDREMIEERLKTYAHLFDDKVMKQLKRRRYTGWGRLSRKLINGIRDKQSGKTILDFLKSDGFANRNFMQLIHDDSLTFKEDIQKAQVSGQGDSLHEHIANLAGSPAIKKGILQTVKVVDELVKVMGRHKPENIVIEMARENQTTQKGQKNSRERMKRIEEGIKELGSQILKEHPVENTQLQNEKLYLYYLQNGRDMYVDQELDINRLSDYDVDHIVPQSFLKDDSIDNKVLTRSDKARGKSDNVPSEEVVKKMKNYWRQLLNAKLITQRKFDNLTKAERGGLSELDKAGFIKRQLVETRQITKHVAQILDSRMNTKYDENDKLIREVKVITLKSKLVSDFRKDFQFYKVREINNYHHAHDAYLNAVVGTALIKKYPKLESEFVYGDYKVYDVRKMIAKSEQEIGKATAKYFFYSNIMNFFKTEITLANGEIRKRPLIETNGETGEIVWDKGRDFATVRKVLSMPQVNIVKKTEVQTGGFSKESILPKRNSDKLIARKKDWDPKKYGGFDSPTVAYSVLVVAKVEKGKSKKLKSVKELLGITIMERSSFEKNPIDFLEAKGYKEVKKDLIIKLPKYSLFELENGRKRMLASAGELQKGNELALPSKYVNFLYLASHYEKLKGSPEDNEQKQLFVEQHKHYLDEIIEQISEFSKRVILADANLDKVLSAYNKHRDKPIREQAENIIHLFTLTNLGAPAAFKYFDTTIDRKRYTSTKEVLDATLIHQSITGLYETRIDLSQLGGDGGEAAAKPAPGGTLNIEDEYRLHETSKEPDVSLGSTWLSDFPQAWAETGGMGLAVRQAPLIIPLKATSTPVSIKQYPMSQEARLGIKPHIQRLLDQGILVPCQSPWNTPLLPVKKPGTNDYRPVQDLREVNKRVEDIHPTVPNPYNLLSGLPPSHQWYTVLDLKDAFFCLRLHPTSQPLFAFEWRDPEMGISGQLTWTRLPQGFKNSPTLFNEALHRDLAGFRIQHPDLILLQYVDDLLLAATSELDCQQGTRALLQTLGDLGYRASAKKAQICQKQVKYLGYLLKEGQRWLTEARKETVMGQPIPKTPRQLREFLGKAGFCRLFIPGFAEMAAPLYPLTKPGTLFNWGPDQQKAFQEIKQALLTAPALGLPDLTKPFELFVDEKQGYAKGVLTQKLGPWRRPVAYLSKKLDPVAAGWPPCLRMVAAIAVLTKDAGKLTMGQPLVILAPHAVEALVKQPPDRWLSNARMTHYQALLLDTDRVQFGPVVALNPATLLPLPEEGLQHDCLDILAEAHGTRSDLMDQPLPDADHTWYTDGSSFLQEGQRKAGAAVTTETEVIWARALPAGTSAQRAELIALTQALKMAEGKKLNVYTDSRYAFATAHIHGEIYRRRGWLTSEGKEIKNKDEILALLKALFLPKRLSIIHCPGHQKGNSAEARGNRMADQAAREVATRETPETSTLLAGKRTADGSEFEKRTADGSEFESPKKKAKVE

SEQ ID NO: 2338 - protein, 2096 aa, synthetic construct
MPAAKRVKLDGGDKKYSIGLDIGTNSVGWAVITDEYKVPSKKFKVLGNTDRHSIKKNLIGALLFDSGETAEATRLKRTARRRYTRRKNRICYLQEIFSNEMAKVDDSFFHRLEESFLVEEDKKHERHPIFGNIVDEVAYHEKYPTIYHLRKKLVDSTDKADLRLIYLALAHMIKFRGHFLIEGDLNPDNSDVDKLFIQLVQTYNQLFEENPINASGVDAKAILSARLSKSRRLENLIAQLPGEKKNGLFGNLIALSLGLTPNFKSNFDLAEDAKLQLSKDTYDDDLDNLLAQIGDQYADLFLAAKNLSDAILLSDILRVNTEITKAPLSASMIKRYDEHHQDLTLLKALVRQQLPEKYKEIFFDQSKNGYAGYIDGGASQEEFYKFIKPILEKMDGTEELLVKLNREDLLRKQRTFDNGSIPHQIHLGELHAILRRQEDFYPFLKDNREKIEKILTFRIPYYVGPLARGNSRFAWMTRKSEETITPWNFEEVVDKGASAQSFIERMTNFDKNLPNEKVLPKHSLLYEYFTVYNELTKVKYVTEGMRKPAFLSGEQKKAIVDLLFKTNRKVTVKQLKEDYFKKIECFDSVEISGVEDRFNASLGTYHDLLKIIKDKDFLDNEENEDILEDIVLTLTLFEDREMIEERLKTYAHLFDDKVMKQLKRRRYTGWGRLSRKLINGIRDKQSGKTILDFLKSDGFANRNFMQLIHDDSLTFKEDIQKAQVSGQGDSLHEHIANLAGSPAIKKGILQTVKVVDELVKVMGRHKPENIVIEMARENQTTQKGQKNSRERMKRIEEGIKELGSQILKEHPVENTQLQNEKLYLYYLQNGRDMYVDQELDINRLSDYDVDHIVPQSFLKDDSIDNKVLTRSDKARGKSDNVPSEEVVKKMKNYWRQLLNAKLITQRKFDNLTKAERGGLSELDKAGFIKRQLVETRQITKHVAQILDSRMNTKYDENDKLIREVKVITLKSKLVSDFRKDFQFYKVREINNYHHAHDAYLNAVVGTALIKKYPKLESEFVYGDYKVYDVRKMIAKSEQEIGKATAKYFFYSNIMNFFKTEITLANGEIRKRPLIETNGETGEIVWDKGRDFATVRKVLSMPQVNIVKKTEVQTGGFSKESILPKRNSDKLIARKKDWDPKKYGGFDSPTVAYSVLVVAKVEKGKSKKLKSVKELLGITIMERSSFEKNPIDFLEAKGYKEVKKDLIIKLPKYSLFELENGRKRMLASAGELQKGNELALPSKYVNFLYLASHYEKLKGSPEDNEQKQLFVEQHKHYLDEIIEQISEFSKRVILADANLDKVLSAYNKHRDKPIREQAENIIHLFTLTNLGAPAAFKYFDTTIDRKRYTSTKEVLDATLIHQSITGLYETRIDLSQLGGDGGGGSPAPEAAAKGGTLNIEDEYRLHETSKEPDVSLGSTWLSDFPQAWAETGGMGLAVRQAPLIIPLKATSTPVSIKQYPMSQEARLGIKPHIQRLLDQGILVPCQSPWNTPLLPVKKPGTNDYRPVQDLREVNKRVEDIHPTVPNPYNLLSGLPPSHQWYTVLDLKDAFFCLRLHPTSQPLFAFEWRDPEMGISGQLTWTRLPQGFKNSPTLFNEALHRDLAGFRIQHPDLILLQYVDDLLLAATSELDCQQGTRALLQTLGDLGYRASAKKAQICQKQVKYLGYLLKEGQRWLTEARKETVMGQPIPKTPRQLREFLGKAGFCRLFIPGFAEMAAPLYPLTKPGTLFNWGPDQQKAFQEIKQALLTAPALGLPDLTKPFELFVDEKQGYAKGVLTQKLGPWRRPVAYLSKKLDPVAAGWPPCLRMVAAIAVLTKDAGKLTMGQPLVILAPHAVEALVKQPPDRWLSNARMTHYQALLLDTDRVQFGPVVALNPATLLPLPEEGLQHDCLDILAEAHGTRSDLMDQPLPDADHTWYTDGSSFLQEGQRKAGAAVTTETEVIWARALPAGTSAQRAELIALTQALKMAEGKKLNVYTDSRYAFATAHIHGEIYRRRGWLTSEGKEIKNKDEILALLKALFLPKRLSIIHCPGHQKGNSAEARGNRMADQAAREVATRETPETSTLLAGKRTADGSEFEKRTADGSEFESPKKKAKVE

SEQ ID NO: 2339 - protein, 2094 aa, synthetic construct
MPAAKRVKLDGGDKKYSIGLDIGTNSVGWAVITDEYKVPSKKFKVLGNTDRHSIKKNLIGALLFDSGETAEATRLKRTARRRYTRRKNRICYLQEIFSNEMAKVDDSFFHRLEESFLVEEDKKHERHPIFGNIVDEVAYHEKYPTIYHLRKKLVDSTDKADLRLIYLALAHMIKFRGHFLIEGDLNPDNSDVDKLFIQLVQTYNQLFEENPINASGVDAKAILSARLSKSRRLENLIAQLPGEKKNGLFGNLIALSLGLTPNFKSNFDLAEDAKLQLSKDTYDDDLDNLLAQIGDQYADLFLAAKNLSDAILLSDILRVNTEITKAPLSASMIKRYDEHHQDLTLLKALVRQQLPEKYKEIFFDQSKNGYAGYIDGGASQEEFYKFIKPILEKMDGTEELLVKLNREDLLRKQRTFDNGSIPHQIHLGELHAILRRQEDFYPFLKDNREKIEKILTFRIPYYVGPLARGNSRFAWMTRKSEETITPWNFEEVVDKGASAQSFIERMTNFDKNLPNEKVLPKHSLLYEYFTVYNELTKVKYVTEGMRKPAFLSGEQKKAIVDLLFKTNRKVTVKQLKEDYFKKIECFDSVEISGVEDRFNASLGTYHDLLKIIKDKDFLDNEENEDILEDIVLTLTLFEDREMIEERLKTYAHLFDDKVMKQLKRRRYTGWGRLSRKLINGIRDKQSGKTILDFLKSDGFANRNFMQLIHDDSLTFKEDIQKAQVSGQGDSLHEHIANLAGSPAIKKGILQTVKVVDELVKVMGRHKPENIVIEMARENQTTQKGQKNSRERMKRIEEGIKELGSQILKEHPVENTQLQNEKLYLYYLQNGRDMYVDQELDINRLSDYDVDHIVPQSFLKDDSIDNKVLTRSDKARGKSDNVPSEEVVKKMKNYWRQLLNAKLITQRKFDNLTKAERGGLSELDKAGFIKRQLVETRQITKHVAQILDSRMNTKYDENDKLIREVKVITLKSKLVSDFRKDFQFYKVREINNYHHAHDAYLNAVVGTALIKKYPKLESEFVYGDYKVYDVRKMIAKSEQEIGKATAKYFFYSNIMNFFKTEITLANGEIRKRPLIETNGETGEIVWDKGRDFATVRKVLSMPQVNIVKKTEVQTGGFSKESILPKRNSDKLIARKKDWDPKKYGGFDSPTVAYSVLVVAKVEKGKSKKLKSVKELLGITIMERSSFEKNPIDFLEAKGYKEVKKDLIIKLPKYSLFELENGRKRMLASAGELQKGNELALPSKYVNFLYLASHYEKLKGSPEDNEQKQLFVEQHKHYLDEIIEQISEFSKRVILADANLDKVLSAYNKHRDKPIREQAENIIHLFTLTNLGAPAAFKYFDTTIDRKRYTSTKEVLDATLIHQSITGLYETRIDLSQLGGDGGGGSGSSPAPGGTLNIEDEYRLHETSKEPDVSLGSTWLSDFPQAWAETGGMGLAVRQAPLIIPLKATSTPVSIKQYPMSQEARLGIKPHIQRLLDQGILVPCQSPWNTPLLPVKKPGTNDYRPVQDLREVNKRVEDIHPTVPNPYNLLSGLPPSHQWYTVLDLKDAFFCLRLHPTSQPLFAFEWRDPEMGISGQLTWTRLPQGFKNSPTLFNEALHRDLAGFRIQHPDLILLQYVDDLLLAATSELDCQQGTRALLQTLGDLGYRASAKKAQICQKQVKYLGYLLKEGQRWLTEARKETVMGQPIPKTPRQLREFLGKAGFCRLFIPGFAEMAAPLYPLTKPGTLFNWGPDQQKAFQEIKQALLTAPALGLPDLTKPFELFVDEKQGYAKGVLTQKLGPWRRPVAYLSKKLDPVAAGWPPCLRMVAAIAVLTKDAGKLTMGQPLVILAPHAVEALVKQPPDRWLSNARMTHYQALLLDTDRVQFGPVVALNPATLLPLPEEGLQHDCLDILAEAHGTRSDLMDQPLPDADHTWYTDGSSFLQEGQRKAGAAVTTETEVIWARALPAGTSAQRAELIALTQALKMAEGKKLNVYTDSRYAFATAHIHGEIYRRRGWLTSEGKEIKNKDEILALLKALFLPKRLSIIHCPGHQKGNSAEARGNRMADQAAREVATRETPETSTLLAGKRTADGSEFEKRTADGSEFESPKKKAKVE

SEQ ID NO: 2340 - protein, 2091 aa, synthetic construct
MPAAKRVKLDGGDKKYSIGLDIGTNSVGWAVITDEYKVPSKKFKVLGNTDRHSIKKNLIGALLFDSGETAEATRLKRTARRRYTRRKNRICYLQEIFSNEMAKVDDSFFHRLEESFLVEEDKKHERHPIFGNIVDEVAYHEKYPTIYHLRKKLVDSTDKADLRLIYLALAHMIKFRGHFLIEGDLNPDNSDVDKLFIQLVQTYNQLFEENPINASGVDAKAILSARLSKSRRLENLIAQLPGEKKNGLFGNLIALSLGLTPNFKSNFDLAEDAKLQLSKDTYDDDLDNLLAQIGDQYADLFLAAKNLSDAILLSDILRVNTEITKAPLSASMIKRYDEHHQDLTLLKALVRQQLPEKYKEIFFDQSKNGYAGYIDGGASQEEFYKFIKPILEKMDGTEELLVKLNREDLLRKQRTFDNGSIPHQIHLGELHAILRRQEDFYPFLKDNREKIEKILTFRIPYYVGPLARGNSRFAWMTRKSEETITPWNFEEVVDKGASAQSFIERMTNFDKNLPNEKVLPKHSLLYEYFTVYNELTKVKYVTEGMRKPAFLSGEQKKAIVDLLFKTNRKVTVKQLKEDYFKKIECFDSVEISGVEDRFNASLGTYHDLLKIIKDKDFLDNEENEDILEDIVLTLTLFEDREMIEERLKTYAHLFDDKVMKQLKRRRYTGWGRLSRKLINGIRDKQSGKTILDFLKSDGFANRNFMQLIHDDSLTFKEDIQKAQVSGQGDSLHEHIANLAGSPAIKKGILQTVKVVDELVKVMGRHKPENIVIEMARENQTTQKGQKNSRERMKRIEEGIKELGSQILKEHPVENTQLQNEKLYLYYLQNGRDMYVDQELDINRLSDYDVDHIVPQSFLKDDSIDNKVLTRSDKARGKSDNVPSEEVVKKMKNYWRQLLNAKLITQRKFDNLTKAERGGLSELDKAGFIKRQLVETRQITKHVAQILDSRMNTKYDENDKLIREVKVITLKSKLVSDFRKDFQFYKVREINNYHHAHDAYLNAVVGTALIKKYPKLESEFVYGDYKVYDVRKMIAKSEQEIGKATAKYFFYSNIMNFFKTEITLANGEIRKRPLIETNGETGEIVWDKGRDFATVRKVLSMPQVNIVKKTEVQTGGFSKESILPKRNSDKLIARKKDWDPKKYGGFDSPTVAYSVLVVAKVEKGKSKKLKSVKELLGITIMERSSFEKNPIDFLEAKGYKEVKKDLIIKLPKYSLFELENGRKRMLASAGELQKGNELALPSKYVNFLYLASHYEKLKGSPEDNEQKQLFVEQHKHYLDEIIEQISEFSKRVILADANLDKVLSAYNKHRDKPIREQAENIIHLFTLTNLGAPAAFKYFDTTIDRKRYTSTKEVLDATLIHQSITGLYETRIDLSQLGGDGGPAPGGSGGTLNIEDEYRLHETSKEPDVSLGSTWLSDFPQAWAETGGMGLAVRQAPLIIPLKATSTPVSIKQYPMSQEARLGIKPHIQRLLDQGILVPCQSPWNTPLLPVKKPGTNDYRPVQDLREVNKRVEDIHPTVPNPYNLLSGLPPSHQWYTVLDLKDAFFCLRLHPTSQPLFAFEWRDPEMGISGQLTWTRLPQGFKNSPTLFNEALHRDLAGFRIQHPDLILLQYVDDLLLAATSELDCQQGTRALLQTLGDLGYRASAKKAQICQKQVKYLGYLLKEGQRWLTEARKETVMGQPIPKTPRQLREFLGKAGFCRLFIPGFAEMAAPLYPLTKPGTLFNWGPDQQKAFQEIKQALLTAPALGLPDLTKPFELFVDEKQGYAKGVLTQKLGPWRRPVAYLSKKLDPVAAGWPPCLRMVAAIAVLTKDAGKLTMGQPLVILAPHAVEALVKQPPDRWLSNARMTHYQALLLDTDRVQFGPVVALNPATLLPLPEEGLQHDCLDILAEAHGTRSDLMDQPLPDADHTWYTDGSSFLQEGQRKAGAAVTTETEVIWARALPAGTSAQRAELIALTQALKMAEGKKLNVYTDSRYAFATAHIHGEIYRRRGWLTSEGKEIKNKDEILALLKALFLPKRLSIIHCPGHQKGNSAEARGNRMADQAAREVATRETPETSTLLAGKRTADGSEFEKRTADGSEFESPKKKAKVE

SEQ ID NO: 2341 - protein, 2093 aa, synthetic construct
MPAAKRVKLDGGDKKYSIGLDIGTNSVGWAVITDEYKVPSKKFKVLGNTDRHSIKKNLIGALLFDSGETAEATRLKRTARRRYTRRKNRICYLQEIFSNEMAKVDDSFFHRLEESFLVEEDKKHERHPIFGNIVDEVAYHEKYPTIYHLRKKLVDSTDKADLRLIYLALAHMIKFRGHFLIEGDLNPDNSDVDKLFIQLVQTYNQLFEENPINASGVDAKAILSARLSKSRRLENLIAQLPGEKKNGLFGNLIALSLGLTPNFKSNFDLAEDAKLQLSKDTYDDDLDNLLAQIGDQYADLFLAAKNLSDAILLSDILRVNTEITKAPLSASMIKRYDEHHQDLTLLKALVRQQLPEKYKEIFFDQSKNGYAGYIDGGASQEEFYKFIKPILEKMDGTEELLVKLNREDLLRKQRTFDNGSIPHQIHLGELHAILRRQEDFYPFLKDNREKIEKILTFRIPYYVGPLARGNSRFAWMTRKSEETITPWNFEEVVDKGASAQSFIERMTNFDKNLPNEKVLPKHSLLYEYFTVYNELTKVKYVTEGMRKPAFLSGEQKKAIVDLLFKTNRKVTVKQLKEDYFKKIECFDSVEISGVEDRFNASLGTYHDLLKIIKDKDFLDNEENEDILEDIVLTLTLFEDREMIEERLKTYAHLFDDKVMKQLKRRRYTGWGRLSRKLINGIRDKQSGKTILDFLKSDGFANRNFMQLIHDDSLTFKEDIQKAQVSGQGDSLHEHIANLAGSPAIKKGILQTVKVVDELVKVMGRHKPENIVIEMARENQTTQKGQKNSRERMKRIEEGIKELGSQILKEHPVENTQLQNEKLYLYYLQNGRDMYVDQELDINRLSDYDVDHIVPQSFLKDDSIDNKVLTRSDKARGKSDNVPSEEVVKKMKNYWRQLLNAKLITQRKFDNLTKAERGGLSELDKAGFIKRQLVETRQITKHVAQILDSRMNTKYDENDKLIREVKVITLKSKLVSDFRKDFQFYKVREINNYHHAHDAYLNAVVGTALIKKYPKLESEFVYGDYKVYDVRKMIAKSEQEIGKATAKYFFYSNIMNFFKTEITLANGEIRKRPLIETNGETGEIVWDKGRDFATVRKVLSMPQVNIVKKTEVQTGGFSKESILPKRNSDKLIARKKDWDPKKYGGFDSPTVAYSVLVVAKVEKGKSKKLKSVKELLGITIMERSSFEKNPIDFLEAKGYKEVKKDLIIKLPKYSLFELENGRKRMLASAGELQKGNELALPSKYVNFLYLASHYEKLKGSPEDNEQKQLFVEQHKHYLDEIIEQISEFSKRVILADANLDKVLSAYNKHRDKPIREQAENIIHLFTLTNLGAPAAFKYFDTTIDRKRYTSTKEVLDATLIHQSITGLYETRIDLSQLGGDGGEAAAKGGSGGTLNIEDEYRLHETSKEPDVSLGSTWLSDFPQAWAETGGMGLAVRQAPLIIPLKATSTPVSIKQYPMSQEARLGIKPHIQRLLDQGILVPCQSPWNTPLLPVKKPGTNDYRPVQDLREVNKRVEDIHPTVPNPYNLLSGLPPSHQWYTVLDLKDAFFCLRLHPTSQPLFAFEWRDPEMGISGQLTWTRLPQGFKNSPTLFNEALHRDLAGFRIQHPDLILLQYVDDLLLAATSELDCQQGTRALLQTLGDLGYRASAKKAQICQKQVKYLGYLLKEGQRWLTEARKETVMGQPIPKTPRQLREFLGKAGFCRLFIPGFAEMAAPLYPLTKPGTLFNWGPDQQKAFQEIKQALLTAPALGLPDLTKPFELFVDEKQGYAKGVLTQKLGPWRRPVAYLSKKLDPVAAGWPPCLRMVAAIAVLTKDAGKLTMGQPLVILAPHAVEALVKQPPDRWLSNARMTHYQALLLDTDRVQFGPVVALNPATLLPLPEEGLQHDCLDILAEAHGTRSDLMDQPLPDADHTWYTDGSSFLQEGQRKAGAAVTTETEVIWARALPAGTSAQRAELIALTQALKMAEGKKLNVYTDSRYAFATAHIHGEIYRRRGWLTSEGKEIKNKDEILALLKALFLPKRLSIIHCPGHQKGNSAEARGNRMADQAAREVATRETPETSTLLAGKRTADGSEFEKRTADGSEFESPKKKAKVE

SEQ ID NO: 2342 - protein, 2093 aa, synthetic construct
MPAAKRVKLDGGDKKYSIGLDIGTNSVGWAVITDEYKVPSKKFKVLGNTDRHSIKKNLIGALLFDSGETAEATRLKRTARRRYTRRKNRICYLQEIFSNEMAKVDDSFFHRLEESFLVEEDKKHERHPIFGNIVDEVAYHEKYPTIYHLRKKLVDSTDKADLRLIYLALAHMIKFRGHFLIEGDLNPDNSDVDKLFIQLVQTYNQLFEENPINASGVDAKAILSARLSKSRRLENLIAQLPGEKKNGLFGNLIALSLGLTPNFKSNFDLAEDAKLQLSKDTYDDDLDNLLAQIGDQYADLFLAAKNLSDAILLSDILRVNTEITKAPLSASMIKRYDEHHQDLTLLKALVRQQLPEKYKEIFFDQSKNGYAGYIDGGASQEEFYKFIKPILEKMDGTEELLVKLNREDLLRKQRTFDNGSIPHQIHLGELHAILRRQEDFYPFLKDNREKIEKILTFRIPYYVGPLARGNSRFAWMTRKSEETITPWNFEEVVDKGASAQSFIERMTNFDKNLPNEKVLPKHSLLYEYFTVYNELTKVKYVTEGMRKPAFLSGEQKKAIVDLLFKTNRKVTVKQLKEDYFKKIECFDSVEISGVEDRFNASLGTYHDLLKIIKDKDFLDNEENEDILEDIVLTLTLFEDREMIEERLKTYAHLFDDKVMKQLKRRRYTGWGRLSRKLINGIRDKQSGKTILDFLKSDGFANRNFMQLIHDDSLTFKEDIQKAQVSGQGDSLHEHIANLAGSPAIKKGILQTVKVVDELVKVMGRHKPENIVIEMARENQTTQKGQKNSRERMKRIEEGIKELGSQILKEHPVENTQLQNEKLYLYYLQNGRDMYVDQELDINRLSDYDVDHIVPQSFLKDDSIDNKVLTRSDKARGKSDNVPSEEVVKKMKNYWRQLLNAKLITQRKFDNLTKAERGGLSELDKAGFIKRQLVETRQITKHVAQILDSRMNTKYDENDKLIREVKVITLKSKLVSDFRKDFQFYKVREINNYHHAHDAYLNAVVGTALIKKYPKLESEFVYGDYKVYDVRKMIAKSEQEIGKATAKYFFYSNIMNFFKTEITLANGEIRKRPLIETNGETGEIVWDKGRDFATVRKVLSMPQVNIVKKTEVQTGGFSKESILPKRNSDKLIARKKDWDPKKYGGFDSPTVAYSVLVVAKVEKGKSKKLKSVKELLGITIMERSSFEKNPIDFLEAKGYKEVKKDLIIKLPKYSLFELENGRKRMLASAGELQKGNELALPSKYVNFLYLASHYEKLKGSPEDNEQKQLFVEQHKHYLDEIIEQISEFSKRVILADANLDKVLSAYNKHRDKPIREQAENIIHLFTLTNLGAPAAFKYFDTTIDRKRYTSTKEVLDATLIHQSITGLYETRIDLSQLGGDGGGGGEAAAKGGTLNIEDEYRLHETSKEPDVSLGSTWLSDFPQAWAETGGMGLAVRQAPLIIPLKATSTPVSIKQYPMSQEARLGIKPHIQRLLDQGILVPCQSPWNTPLLPVKKPGTNDYRPVQDLREVNKRVEDIHPTVPNPYNLLSGLPPSHQWYTVLDLKDAFFCLRLHPTSQPLFAFEWRDPEMGISGQLTWTRLPQGFKNSPTLFNEALHRDLAGFRIQHPDLILLQYVDDLLLAATSELDCQQGTRALLQTLGDLGYRASAKKAQICQKQVKYLGYLLKEGQRWLTEARKETVMGQPIPKTPRQLREFLGKAGFCRLFIPGFAEMAAPLYPLTKPGTLFNWGPDQQKAFQEIKQALLTAPALGLPDLTKPFELFVDEKQGYAKGVLTQKLGPWRRPVAYLSKKLDPVAAGWPPCLRMVAAIAVLTKDAGKLTMGQPLVILAPHAVEALVKQPPDRWLSNARMTHYQALLLDTDRVQFGPVVALNPATLLPLPEEGLQHDCLDILAEAHGTRSDLMDQPLPDADHTWYTDGSSFLQEGQRKAGAAVTTETEVIWARALPAGTSAQRAELIALTQALKMAEGKKLNVYTDSRYAFATAHIHGEIYRRRGWLTSEGKEIKNKDEILALLKALFLPKRLSIIHCPGHQKGNSAEARGNRMADQAAREVATRETPETSTLLAGKRTADGSEFEKRTADGSEFESPKKKAKVE

SEQ ID NO: 2343 - protein, 2131 aa, synthetic construct
MPAAKRVKLDGGDKKYSIGLDIGTNSVGWAVITDEYKVPSKKFKVLGNTDRHSIKKNLIGALLFDSGETAEATRLKRTARRRYTRRKNRICYLQEIFSNEMAKVDDSFFHRLEESFLVEEDKKHERHPIFGNIVDEVAYHEKYPTIYHLRKKLVDSTDKADLRLIYLALAHMIKFRGHFLIEGDLNPDNSDVDKLFIQLVQTYNQLFEENPINASGVDAKAILSARLSKSRRLENLIAQLPGEKKNGLFGNLIALSLGLTPNFKSNFDLAEDAKLQLSKDTYDDDLDNLLAQIGDQYADLFLAAKNLSDAILLSDILRVNTEITKAPLSASMIKRYDEHHQDLTLLKALVRQQLPEKYKEIFFDQSKNGYAGYIDGGASQEEFYKFIKPILEKMDGTEELLVKLNREDLLRKQRTFDNGSIPHQIHLGELHAILRRQEDFYPFLKDNREKIEKILTFRIPYYVGPLARGNSRFAWMTRKSEETITPWNFEEVVDKGASAQSFIERMTNFDKNLPNEKVLPKHSLLYEYFTVYNELTKVKYVTEGMRKPAFLSGEQKKAIVDLLFKTNRKVTVKQLKEDYFKKIECFDSVEISGVEDRFNASLGTYHDLLKIIKDKDFLDNEENEDILEDIVLTLTLFEDREMIEERLKTYAHLFDDKVMKQLKRRRYTGWGRLSRKLINGIRDKQSGKTILDFLKSDGFANRNFMQLIHDDSLTFKEDIQKAQVSGQGDSLHEHIANLAGSPAIKKGILQTVKVVDELVKVMGRHKPENIVIEMARENQTTQKGQKNSRERMKRIEEGIKELGSQILKEHPVENTQLQNEKLYLYYLQNGRDMYVDQELDINRLSDYDVDHIVPQSFLKDDSIDNKVLTRSDKARGKSDNVPSEEVVKKMKNYWRQLLNAKLITQRKFDNLTKAERGGLSELDKAGFIKRQLVETRQITKHVAQILDSRMNTKYDENDKLIREVKVITLKSKLVSDFRKDFQFYKVREINNYHHAHDAYLNAVVGTALIKKYPKLESEFVYGDYKVYDVRKMIAKSEQEIGKATAKYFFYSNIMNFFKTEITLANGEIRKRPLIETNGETGEIVWDKGRDFATVRKVLSMPQVNIVKKTEVQTGGFSKESILPKRNSDKLIARKKDWDPKKYGGFDSPTVAYSVLVVAKVEKGKSKKLKSVKELLGITIMERSSFEKNPIDFLEAKGYKEVKKDLIIKLPKYSLFELENGRKRMLASAGELQKGNELALPSKYVNFLYLASHYEKLKGSPEDNEQKQLFVEQHKHYLDEIIEQISEFSKRVILADANLDKVLSAYNKHRDKPIREQAENIIHLFTLTNLGAPAAFKYFDTTIDRKRYTSTKEVLDATLIHQSITGLYETRIDLSQLGGDGGAEAAAKEAAAKEAAAKEAAAKALEAEAAAKEAAAKEAAAKEAAAKAGGTLNIEDEYRLHETSKEPDVSLGSTWLSDFPQAWAETGGMGLAVRQAPLIIPLKATSTPVSIKQYPMSQEARLGIKPHIQRLLDQGILVPCQSPWNTPLLPVKKPGTNDYRPVQDLREVNKRVEDIHPTVPNPYNLLSGLPPSHQWYTVLDLKDAFFCLRLHPTSQPLFAFEWRDPEMGISGQLTWTRLPQGFKNSPTLFNEALHRDLAGFRIQHPDLILLQYVDDLLLAATSELDCQQGTRALLQTLGDLGYRASAKKAQICQKQVKYLGYLLKEGQRWLTEARKETVMGQPIPKTPRQLREFLGKAGFCRLFIPGFAEMAAPLYPLTKPGTLFNWGPDQQKAFQEIKQALLTAPALGLPDLTKPFELFVDEKQGYAKGVLTQKLGPWRRPVAYLSKKLDPVAAGWPPCLRMVAAIAVLTKDAGKLTMGQPLVILAPHAVEALVKQPPDRWLSNARMTHYQALLLDTDRVQFGPVVALNPATLLPLPEEGLQHDCLDILAEAHGTRSDLMDQPLPDADHTWYTDGSSFLQEGQRKAGAAVTTETEVIWARALPAGTSAQRAELIALTQALKMAEGKKLNVYTDSRYAFATAHIHGEIYRRRGWLTSEGKEIKNKDEILALLKALFLPKRLSIIHCPGHQKGNSAEARGNRMADQAAREVATRETPETSTLLAGKRTADGSEFEKRTADGSEFESPKKKAKVE

SEQ ID NO: 2344 - protein, 2096 aa, synthetic construct
MPAAKRVKLDGGDKKYSIGLDIGTNSVGWAVITDEYKVPSKKFKVLGNTDRHSIKKNLIGALLFDSGETAEATRLKRTARRRYTRRKNRICYLQEIFSNEMAKVDDSFFHRLEESFLVEEDKKHERHPIFGNIVDEVAYHEKYPTIYHLRKKLVDSTDKADLRLIYLALAHMIKFRGHFLIEGDLNPDNSDVDKLFIQLVQTYNQLFEENPINASGVDAKAILSARLSKSRRLENLIAQLPGEKKNGLFGNLIALSLGLTPNFKSNFDLAEDAKLQLSKDTYDDDLDNLLAQIGDQYADLFLAAKNLSDAILLSDILRVNTEITKAPLSASMIKRYDEHHQDLTLLKALVRQQLPEKYKEIFFDQSKNGYAGYIDGGASQEEFYKFIKPILEKMDGTEELLVKLNREDLLRKQRTFDNGSIPHQIHLGELHAILRRQEDFYPFLKDNREKIEKILTFRIPYYVGPLARGNSRFAWMTRKSEETITPWNFEEVVDKGASAQSFIERMTNFDKNLPNEKVLPKHSLLYEYFTVYNELTKVKYVTEGMRKPAFLSGEQKKAIVDLLFKTNRKVTVKQLKEDYFKKIECFDSVEISGVEDRFNASLGTYHDLLKIIKDKDFLDNEENEDILEDIVLTLTLFEDREMIEERLKTYAHLFDDKVMKQLKRRRYTGWGRLSRKLINGIRDKQSGKTILDFLKSDGFANRNFMQLIHDDSLTFKEDIQKAQVSGQGDSLHEHIANLAGSPAIKKGILQTVKVVDELVKVMGRHKPENIVIEMARENQTTQKGQKNSRERMKRIEEGIKELGSQILKEHPVENTQLQNEKLYLYYLQNGRDMYVDQELDINRLSDYDVDHIVPQSFLKDDSIDNKVLTRSDKARGKSDNVPSEEVVKKMKNYWRQLLNAKLITQRKFDNLTKAERGGLSELDKAGFIKRQLVETRQITKHVAQILDSRMNTKYDENDKLIREVKVITLKSKLVSDFRKDFQFYKVREINNYHHAHDAYLNAVVGTALIKKYPKLESEFVYGDYKVYDVRKMIAKSEQEIGKATAKYFFYSNIMNFFKTEITLANGEIRKRPLIETNGETGEIVWDKGRDFATVRKVLSMPQVNIVKKTEVQTGGFSKESILPKRNSDKLIARKKDWDPKKYGGFDSPTVAYSVLVVAKVEKGKSKKLKSVKELLGITIMERSSFEKNPIDFLEAKGYKEVKKDLIIKLPKYSLFELENGRKRMLASAGELQKGNELALPSKYVNFLYLASHYEKLKGSPEDNEQKQLFVEQHKHYLDEIIEQISEFSKRVILADANLDKVLSAYNKHRDKPIREQAENIIHLFTLTNLGAPAAFKYFDTTIDRKRYTSTKEVLDATLIHQSITGLYETRIDLSQLGGDGGEAAAKGGGGGSGGTLNIEDEYRLHETSKEPDVSLGSTWLSDFPQAWAETGGMGLAVRQAPLIIPLKATSTPVSIKQYPMSQEARLGIKPHIQRLLDQGILVPCQSPWNTPLLPVKKPGTNDYRPVQDLREVNKRVEDIHPTVPNPYNLLSGLPPSHQWYTVLDLKDAFFCLRLHPTSQPLFAFEWRDPEMGISGQLTWTRLPQGFKNSPTLFNEALHRDLAGFRIQHPDLILLQYVDDLLLAATSELDCQQGTRALLQTLGDLGYRASAKKAQICQKQVKYLGYLLKEGQRWLTEARKETVMGQPIPKTPRQLREFLGKAGFCRLFIPGFAEMAAPLYPLTKPGTLFNWGPDQQKAFQEIKQALLTAPALGLPDLTKPFELFVDEKQGYAKGVLTQKLGPWRRPVAYLSKKLDPVAAGWPPCLRMVAAIAVLTKDAGKLTMGQPLVILAPHAVEALVKQPPDRWLSNARMTHYQALLLDTDRVQFGPVVALNPATLLPLPEEGLQHDCLDILAEAHGTRSDLMDQPLPDADHTWYTDGSSFLQEGQRKAGAAVTTETEVIWARALPAGTSAQRAELIALTQALKMAEGKKLNVYTDSRYAFATAHIHGEIYRRRGWLTSEGKEIKNKDEILALLKALFLPKRLSIIHCPGHQKGNSAEARGNRMADQAAREVATRETPETSTLLAGKRTADGSEFEKRTADGSEFESPKKKAKVE

SEQ ID NO: 2345 - protein, 2096 aa, synthetic construct
MPAAKRVKLDGGDKKYSIGLDIGTNSVGWAVITDEYKVPSKKFKVLGNTDRHSIKKNLIGALLFDSGETAEATRLKRTARRRYTRRKNRICYLQEIFSNEMAKVDDSFFHRLEESFLVEEDKKHERHPIFGNIVDEVAYHEKYPTIYHLRKKLVDSTDKADLRLIYLALAHMIKFRGHFLIEGDLNPDNSDVDKLFIQLVQTYNQLFEENPINASGVDAKAILSARLSKSRRLENLIAQLPGEKKNGLFGNLIALSLGLTPNFKSNFDLAEDAKLQLSKDTYDDDLDNLLAQIGDQYADLFLAAKNLSDAILLSDILRVNTEITKAPLSASMIKRYDEHHQDLTLLKALVRQQLPEKYKEIFFDQSKNGYAGYIDGGASQEEFYKFIKPILEKMDGTEELLVKLNREDLLRKQRTFDNGSIPHQIHLGELHAILRRQEDFYPFLKDNREKIEKILTFRIPYYVGPLARGNSRFAWMTRKSEETITPWNFEEVVDKGASAQSFIERMTNFDKNLPNEKVLPKHSLLYEYFTVYNELTKVKYVTEGMRKPAFLSGEQKKAIVDLLFKTNRKVTVKQLKEDYFKKIECFDSVEISGVEDRFNASLGTYHDLLKIIKDKDFLDNEENEDILEDIVLTLTLFEDREMIEERLKTYAHLFDDKVMKQLKRRRYTGWGRLSRKLINGIRDKQSGKTILDFLKSDGFANRNFMQLIHDDSLTFKEDIQKAQVSGQGDSLHEHIANLAGSPAIKKGILQTVKVVDELVKVMGRHKPENIVIEMARENQTTQKGQKNSRERMKRIEEGIKELGSQILKEHPVENTQLQNEKLYLYYLQNGRDMYVDQELDINRLSDYDVDHIVPQSFLKDDSIDNKVLTRSDKARGKSDNVPSEEVVKKMKNYWRQLLNAKLITQRKFDNLTKAERGGLSELDKAGFIKRQLVETRQITKHVAQILDSRMNTKYDENDKLIREVKVITLKSKLVSDFRKDFQFYKVREINNYHHAHDAYLNAVVGTALIKKYPKLESEFVYGDYKVYDVRKMIAKSEQEIGKATAKYFFYSNIMNFFKTEITLANGEIRKRPLIETNGETGEIVWDKGRDFATVRKVLSMPQVNIVKKTEVQTGGFSKESILPKRNSDKLIARKKDWDPKKYGGFDSPTVAYSVLVVAKVEKGKSKKLKSVKELLGITIMERSSFEKNPIDFLEAKGYKEVKKDLIIKLPKYSLFELENGRKRMLASAGELQKGNELALPSKYVNFLYLASHYEKLKGSPEDNEQKQLFVEQHKHYLDEIIEQISEFSKRVILADANLDKVLSAYNKHRDKPIREQAENIIHLFTLTNLGAPAAFKYFDTTIDRKRYTSTKEVLDATLIHQSITGLYETRIDLSQLGGDGGGSSPAPEAAAKGGTLNIEDEYRLHETSKEPDVSLGSTWLSDFPQAWAETGGMGLAVRQAPLIIPLKATSTPVSIKQYPMSQEARLGIKPHIQRLLDQGILVPCQSPWNTPLLPVKKPGTNDYRPVQDLREVNKRVEDIHPTVPNPYNLLSGLPPSHQWYTVLDLKDAFFCLRLHPTSQPLFAFEWRDPEMGISGQLTWTRLPQGFKNSPTLFNEALHRDLAGFRIQHPDLILLQYVDDLLLAATSELDCQQGTRALLQTLGDLGYRASAKKAQICQKQVKYLGYLLKEGQRWLTEARKETVMGQPIPKTPRQLREFLGKAGFCRLFIPGFAEMAAPLYPLTKPGTLFNWGPDQQKAFQEIKQALLTAPALGLPDLTKPFELFVDEKQGYAKGVLTQKLGPWRRPVAYLSKKLDPVAAGWPPCLRMVAAIAVLTKDAGKLTMGQPLVILAPHAVEALVKQPPDRWLSNARMTHYQALLLDTDRVQFGPVVALNPATLLPLPEEGLQHDCLDILAEAHGTRSDLMDQPLPDADHTWYTDGSSFLQEGQRKAGAAVTTETEVIWARALPAGTSAQRAELIALTQALKMAEGKKLNVYTDSRYAFATAHIHGEIYRRRGWLTSEGKEIKNKDEILALLKALFLPKRLSIIHCPGHQKGNSAEARGNRMADQAAREVATRETPETSTLLAGKRTADGSEFEKRTADGSEFESPKKKAKVE

SEQ ID NO: 2346 - protein, 2094 aa, synthetic construct
MPAAKRVKLDGGDKKYSIGLDIGTNSVGWAVITDEYKVPSKKFKVLGNTDRHSIKKNLIGALLFDSGETAEATRLKRTARRRYTRRKNRICYLQEIFSNEMAKVDDSFFHRLEESFLVEEDKKHERHPIFGNIVDEVAYHEKYPTIYHLRKKLVDSTDKADLRLIYLALAHMIKFRGHFLIEGDLNPDNSDVDKLFIQLVQTYNQLFEENPINASGVDAKAILSARLSKSRRLENLIAQLPGEKKNGLFGNLIALSLGLTPNFKSNFDLAEDAKLQLSKDTYDDDLDNLLAQIGDQYADLFLAAKNLSDAILLSDILRVNTEITKAPLSASMIKRYDEHHQDLTLLKALVRQQLPEKYKEIFFDQSKNGYAGYIDGGASQEEFYKFIKPILEKMDGTEELLVKLNREDLLRKQRTFDNGSIPHQIHLGELHAILRRQEDFYPFLKDNREKIEKILTFRIPYYVGPLARGNSRFAWMTRKSEETITPWNFEEVVDKGASAQSFIERMTNFDKNLPNEKVLPKHSLLYEYFTVYNELTKVKYVTEGMRKPAFLSGEQKKAIVDLLFKTNRKVTVKQLKEDYFKKIECFDSVEISGVEDRFNASLGTYHDLLKIIKDKDFLDNEENEDILEDIVLTLTLFEDREMIEERLKTYAHLFDDKVMKQLKRRRYTGWGRLSRKLINGIRDKQSGKTILDFLKSDGFANRNFMQLIHDDSLTFKEDIQKAQVSGQGDSLHEHIANLAGSPAIKKGILQTVKVVDELVKVMGRHKPENIVIEMARENQTTQKGQKNSRERMKRIEEGIKELGSQILKEHPVENTQLQNEKLYLYYLQNGRDMYVDQELDINRLSDYDVDHIVPQSFLKDDSIDNKVLTRSDKARGKSDNVPSEEVVKKMKNYWRQLLNAKLITQRKFDNLTKAERGGLSELDKAGFIKRQLVETRQITKHVAQILDSRMNTKYDENDKLIREVKVITLKSKLVSDFRKDFQFYKVREINNYHHAHDAYLNAVVGTALIKKYPKLESEFVYGDYKVYDVRKMIAKSEQEIGKATAKYFFYSNIMNFFKTEITLANGEIRKRPLIETNGETGEIVWDKGRDFATVRKVLSMPQVNIVKKTEVQTGGFSKESILPKRNSDKLIARKKDWDPKKYGGFDSPTVAYSVLVVAKVEKGKSKKLKSVKELLGITIMERSSFEKNPIDFLEAKGYKEVKKDLIIKLPKYSLFELENGRKRMLASAGELQKGNELALPSKYVNFLYLASHYEKLKGSPEDNEQKQLFVEQHKHYLDEIIEQISEFSKRVILADANLDKVLSAYNKHRDKPIREQAENIIHLFTLTNLGAPAAFKYFDTTIDRKRYTSTKEVLDATLIHQSITGLYETRIDLSQLGGDGGGGGGSSPAPGGTLNIEDEYRLHETSKEPDVSLGSTWLSDFPQAWAETGGMGLAVRQAPLIIPLKATSTPVSIKQYPMSQEARLGIKPHIQRLLDQGILVPCQSPWNTPLLPVKKPGTNDYRPVQDLREVNKRVEDIHPTVPNPYNLLSGLPPSHQWYTVLDLKDAFFCLRLHPTSQPLFAFEWRDPEMGISGQLTWTRLPQGFKNSPTLFNEALHRDLAGFRIQHPDLILLQYVDDLLLAATSELDCQQGTRALLQTLGDLGYRASAKKAQICQKQVKYLGYLLKEGQRWLTEARKETVMGQPIPKTPRQLREFLGKAGFCRLFIPGFAEMAAPLYPLTKPGTLFNWGPDQQKAFQEIKQALLTAPALGLPDLTKPFELFVDEKQGYAKGVLTQKLGPWRRPVAYLSKKLDPVAAGWPPCLRMVAAIAVLTKDAGKLTMGQPLVILAPHAVEALVKQPPDRWLSNARMTHYQALLLDTDRVQFGPVVALNPATLLPLPEEGLQHDCLDILAEAHGTRSDLMDQPLPDADHTWYTDGSSFLQEGQRKAGAAVTTETEVIWARALPAGTSAQRAELIALTQALKMAEGKKLNVYTDSRYAFATAHIHGEIYRRRGWLTSEGKEIKNKDEILALLKALFLPKRLSIIHCPGHQKGNSAEARGNRMADQAAREVATRETPETSTLLAGKRTADGSEFEKRTADGSEFESPKKKAKVE

SEQ ID NO: 2347 - protein, 2096 aa, synthetic construct
MPAAKRVKLDGGDKKYSIGLDIGTNSVGWAVITDEYKVPSKKFKVLGNTDRHSIKKNLIGALLFDSGETAEATRLKRTARRRYTRRKNRICYLQEIFSNEMAKVDDSFFHRLEESFLVEEDKKHERHPIFGNIVDEVAYHEKYPTIYHLRKKLVDSTDKADLRLIYLALAHMIKFRGHFLIEGDLNPDNSDVDKLFIQLVQTYNQLFEENPINASGVDAKAILSARLSKSRRLENLIAQLPGEKKNGLFGNLIALSLGLTPNFKSNFDLAEDAKLQLSKDTYDDDLDNLLAQIGDQYADLFLAAKNLSDAILLSDILRVNTEITKAPLSASMIKRYDEHHQDLTLLKALVRQQLPEKYKEIFFDQSKNGYAGYIDGGASQEEFYKFIKPILEKMDGTEELLVKLNREDLLRKQRTFDNGSIPHQIHLGELHAILRRQEDFYPFLKDNREKIEKILTFRIPYYVGPLARGNSRFAWMTRKSEETITPWNFEEVVDKGASAQSFIERMTNFDKNLPNEKVLPKHSLLYEYFTVYNELTKVKYVTEGMRKPAFLSGEQKKAIVDLLFKTNRKVTVKQLKEDYFKKIECFDSVEISGVEDRFNASLGTYHDLLKIIKDKDFLDNEENEDILEDIVLTLTLFEDREMIEERLKTYAHLFDDKVMKQLKRRRYTGWGRLSRKLINGIRDKQSGKTILDFLKSDGFANRNFMQLIHDDSLTFKEDIQKAQVSGQGDSLHEHIANLAGSPAIKKGILQTVKVVDELVKVMGRHKPENIVIEMARENQTTQKGQKNSRERMKRIEEGIKELGSQILKEHPVENTQLQNEKLYLYYLQNGRDMYVDQELDINRLSDYDVDHIVPQSFLKDDSIDNKVLTRSDKARGKSDNVPSEEVVKKMKNYWRQLLNAKLITQRKFDNLTKAERGGLSELDKAGFIKRQLVETRQITKHVAQILDSRMNTKYDENDKLIREVKVITLKSKLVSDFRKDFQFYKVREINNYHHAHDAYLNAVVGTALIKKYPKLESEFVYGDYKVYDVRKMIAKSEQEIGKATAKYFFYSNIMNFFKTEITLANGEIRKRPLIETNGETGEIVWDKGRDFATVRKVLSMPQVNIVKKTEVQTGGFSKESILPKRNSDKLIARKKDWDPKKYGGFDSPTVAYSVLVVAKVEKGKSKKLKSVKELLGITIMERSSFEKNPIDFLEAKGYKEVKKDLIIKLPKYSLFELENGRKRMLASAGELQKGNELALPSKYVNFLYLASHYEKLKGSPEDNEQKQLFVEQHKHYLDEIIEQISEFSKRVILADANLDKVLSAYNKHRDKPIREQAENIIHLFTLTNLGAPAAFKYFDTTIDRKRYTSTKEVLDATLIHQSITGLYETRIDLSQLGGDGGPAPEAAAKGSSGGTLNIEDEYRLHETSKEPDVSLGSTWLSDFPQAWAETGGMGLAVRQAPLIIPLKATSTPVSIKQYPMSQEARLGIKPHIQRLLDQGILVPCQSPWNTPLLPVKKPGTNDYRPVQDLREVNKRVEDIHPTVPNPYNLLSGLPPSHQWYTVLDLKDAFFCLRLHPTSQPLFAFEWRDPEMGISGQLTWTRLPQGFKNSPTLFNEALHRDLAGFRIQHPDLILLQYVDDLLLAATSELDCQQGTRALLQTLGDLGYRASAKKAQICQKQVKYLGYLLKEGQRWLTEARKETVMGQPIPKTPRQLREFLGKAGFCRLFIPGFAEMAAPLYPLTKPGTLFNWGPDQQKAFQEIKQALLTAPALGLPDLTKPFELFVDEKQGYAKGVLTQKLGPWRRPVAYLSKKLDPVAAGWPPCLRMVAAIAVLTKDAGKLTMGQPLVILAPHAVEALVKQPPDRWLSNARMTHYQALLLDTDRVQFGPVVALNPATLLPLPEEGLQHDCLDILAEAHGTRSDLMDQPLPDADHTWYTDGSSFLQEGQRKAGAAVTTETEVIWARALPAGTSAQRAELIALTQALKMAEGKKLNVYTDSRYAFATAHIHGEIYRRRGWLTSEGKEIKNKDEILALLKALFLPKRLSIIHCPGHQKGNSAEARGNRMADQAAREVATRETPETSTLLAGKRTADGSEFEKRTADGSEFESPKKKAKVE

SEQ ID NO: 2348 - protein, 2093 aa, synthetic construct
MPAAKRVKLDGGDKKYSIGLDIGTNSVGWAVITDEYKVPSKKFKVLGNTDRHSIKKNLIGALLFDSGETAEATRLKRTARRRYTRRKNRICYLQEIFSNEMAKVDDSFFHRLEESFLVEEDKKHERHPIFGNIVDEVAYHEKYPTIYHLRKKLVDSTDKADLRLIYLALAHMIKFRGHFLIEGDLNPDNSDVDKLFIQLVQTYNQLFEENPINASGVDAKAILSARLSKSRRLENLIAQLPGEKKNGLFGNLIALSLGLTPNFKSNFDLAEDAKLQLSKDTYDDDLDNLLAQIGDQYADLFLAAKNLSDAILLSDILRVNTEITKAPLSASMIKRYDEHHQDLTLLKALVRQQLPEKYKEIFFDQSKNGYAGYIDGGASQEEFYKFIKPILEKMDGTEELLVKLNREDLLRKQRTFDNGSIPHQIHLGELHAILRRQEDFYPFLKDNREKIEKILTFRIPYYVGPLARGNSRFAWMTRKSEETITPWNFEEVVDKGASAQSFIERMTNFDKNLPNEKVLPKHSLLYEYFTVYNELTKVKYVTEGMRKPAFLSGEQKKAIVDLLFKTNRKVTVKQLKEDYFKKIECFDSVEISGVEDRFNASLGTYHDLLKIIKDKDFLDNEENEDILEDIVLTLTLFEDREMIEERLKTYAHLFDDKVMKQLKRRRYTGWGRLSRKLINGIRDKQSGKTILDFLKSDGFANRNFMQLIHDDSLTFKEDIQKAQVSGQGDSLHEHIANLAGSPAIKKGILQTVKVVDELVKVMGRHKPENIVIEMARENQTTQKGQKNSRERMKRIEEGIKELGSQILKEHPVENTQLQNEKLYLYYLQNGRDMYVDQELDINRLSDYDVDHIVPQSFLKDDSIDNKVLTRSDKARGKSDNVPSEEVVKKMKNYWRQLLNAKLITQRKFDNLTKAERGGLSELDKAGFIKRQLVETRQITKHVAQILDSRMNTKYDENDKLIREVKVITLKSKLVSDFRKDFQFYKVREINNYHHAHDAYLNAVVGTALIKKYPKLESEFVYGDYKVYDVRKMIAKSEQEIGKATAKYFFYSNIMNFFKTEITLANGEIRKRPLIETNGETGEIVWDKGRDFATVRKVLSMPQVNIVKKTEVQTGGFSKESILPKRNSDKLIARKKDWDPKKYGGFDSPTVAYSVLVVAKVEKGKSKKLKSVKELLGITIMERSSFEKNPIDFLEAKGYKEVKKDLIIKLPKYSLFELENGRKRMLASAGELQKGNELALPSKYVNFLYLASHYEKLKGSPEDNEQKQLFVEQHKHYLDEIIEQISEFSKRVILADANLDKVLSAYNKHRDKPIREQAENIIHLFTLTNLGAPAAFKYFDTTIDRKRYTSTKEVLDATLIHQSITGLYETRIDLSQLGGDGGEAAAKGGGGGTLNIEDEYRLHETSKEPDVSLGSTWLSDFPQAWAETGGMGLAVRQAPLIIPLKATSTPVSIKQYPMSQEARLGIKPHIQRLLDQGILVPCQSPWNTPLLPVKKPGTNDYRPVQDLREVNKRVEDIHPTVPNPYNLLSGLPPSHQWYTVLDLKDAFFCLRLHPTSQPLFAFEWRDPEMGISGQLTWTRLPQGFKNSPTLFNEALHRDLAGFRIQHPDLILLQYVDDLLLAATSELDCQQGTRALLQTLGDLGYRASAKKAQICQKQVKYLGYLLKEGQRWLTEARKETVMGQPIPKTPRQLREFLGKAGFCRLFIPGFAEMAAPLYPLTKPGTLFNWGPDQQKAFQEIKQALLTAPALGLPDLTKPFELFVDEKQGYAKGVLTQKLGPWRRPVAYLSKKLDPVAAGWPPCLRMVAAIAVLTKDAGKLTMGQPLVILAPHAVEALVKQPPDRWLSNARMTHYQALLLDTDRVQFGPVVALNPATLLPLPEEGLQHDCLDILAEAHGTRSDLMDQPLPDADHTWYTDGSSFLQEGQRKAGAAVTTETEVIWARALPAGTSAQRAELIALTQALKMAEGKKLNVYTDSRYAFATAHIHGEIYRRRGWLTSEGKEIKNKDEILALLKALFLPKRLSIIHCPGHQKGNSAEARGNRMADQAAREVATRETPETSTLLAGKRTADGSEFEKRTADGSEFESPKKKAKVE

SEQ ID NO: 2349 - protein, 2093 aa, synthetic construct
MPAAKRVKLDGGDKKYSIGLDIGTNSVGWAVITDEYKVPSKKFKVLGNTDRHSIKKNLIGALLFDSGETAEATRLKRTARRRYTRRKNRICYLQEIFSNEMAKVDDSFFHRLEESFLVEEDKKHERHPIFGNIVDEVAYHEKYPTIYHLRKKLVDSTDKADLRLIYLALAHMIKFRGHFLIEGDLNPDNSDVDKLFIQLVQTYNQLFEENPINASGVDAKAILSARLSKSRRLENLIAQLPGEKKNGLFGNLIALSLGLTPNFKSNFDLAEDAKLQLSKDTYDDDLDNLLAQIGDQYADLFLAAKNLSDAILLSDILRVNTEITKAPLSASMIKRYDEHHQDLTLLKALVRQQLPEKYKEIFFDQSKNGYAGYIDGGASQEEFYKFIKPILEKMDGTEELLVKLNREDLLRKQRTFDNGSIPHQIHLGELHAILRRQEDFYPFLKDNREKIEKILTFRIPYYVGPLARGNSRFAWMTRKSEETITPWNFEEVVDKGASAQSFIERMTNFDKNLPNEKVLPKHSLLYEYFTVYNELTKVKYVTEGMRKPAFLSGEQKKAIVDLLFKTNRKVTVKQLKEDYFKKIECFDSVEISGVEDRFNASLGTYHDLLKIIKDKDFLDNEENEDILEDIVLTLTLFEDREMIEERLKTYAHLFDDKVMKQLKRRRYTGWGRLSRKLINGIRDKQSGKTILDFLKSDGFANRNFMQLIHDDSLTFKEDIQKAQVSGQGDSLHEHIANLAGSPAIKKGILQTVKVVDELVKVMGRHKPENIVIEMARENQTTQKGQKNSRERMKRIEEGIKELGSQILKEHPVENTQLQNEKLYLYYLQNGRDMYVDQELDINRLSDYDVDHIVPQSFLKDDSIDNKVLTRSDKARGKSDNVPSEEVVKKMKNYWRQLLNAKLITQRKFDNLTKAERGGLSELDKAGFIKRQLVETRQITKHVAQILDSRMNTKYDENDKLIREVKVITLKSKLVSDFRKDFQFYKVREINNYHHAHDAYLNAVVGTALIKKYPKLESEFVYGDYKVYDVRKMIAKSEQEIGKATAKYFFYSNIMNFFKTEITLANGEIRKRPLIETNGETGEIVWDKGRDFATVRKVLSMPQVNIVKKTEVQTGGFSKESILPKRNSDKLIARKKDWDPKKYGGFDSPTVAYSVLVVAKVEKGKSKKLKSVKELLGITIMERSSFEKNPIDFLEAKGYKEVKKDLIIKLPKYSLFELENGRKRMLASAGELQKGNELALPSKYVNFLYLASHYEKLKGSPEDNEQKQLFVEQHKHYLDEIIEQISEFSKRVILADANLDKVLSAYNKHRDKPIREQAENIIHLFTLTNLGAPAAFKYFDTTIDRKRYTSTKEVLDATLIHQSITGLYETRIDLSQLGGDGGGGGGGGGGGGTLNIEDEYRLHETSKEPDVSLGSTWLSDFPQAWAETGGMGLAVRQAPLIIPLKATSTPVSIKQYPMSQEARLGIKPHIQRLLDQGILVPCQSPWNTPLLPVKKPGTNDYRPVQDLREVNKRVEDIHPTVPNPYNLLSGLPPSHQWYTVLDLKDAFFCLRLHPTSQPLFAFEWRDPEMGISGQLTWTRLPQGFKNSPTLFNEALHRDLAGFRIQHPDLILLQYVDDLLLAATSELDCQQGTRALLQTLGDLGYRASAKKAQICQKQVKYLGYLLKEGQRWLTEARKETVMGQPIPKTPRQLREFLGKAGFCRLFIPGFAEMAAPLYPLTKPGTLFNWGPDQQKAFQEIKQALLTAPALGLPDLTKPFELFVDEKQGYAKGVLTQKLGPWRRPVAYLSKKLDPVAAGWPPCLRMVAAIAVLTKDAGKLTMGQPLVILAPHAVEALVKQPPDRWLSNARMTHYQALLLDTDRVQFGPVVALNPATLLPLPEEGLQHDCLDILAEAHGTRSDLMDQPLPDADHTWYTDGSSFLQEGQRKAGAAVTTETEVIWARALPAGTSAQRAELIALTQALKMAEGKKLNVYTDSRYAFATAHIHGEIYRRRGWLTSEGKEIKNKDEILALLKALFLPKRLSIIHCPGHQKGNSAEARGNRMADQAAREVATRETPETSTLLAGKRTADGSEFEKRTADGSEFESPKKKAKVE

SEQ ID NO: 2350 - protein, 2093 aa, synthetic construct
MPAAKRVKLDGGDKKYSIGLDIGTNSVGWAVITDEYKVPSKKFKVLGNTDRHSIKKNLIGALLFDSGETAEATRLKRTARRRYTRRKNRICYLQEIFSNEMAKVDDSFFHRLEESFLVEEDKKHERHPIFGNIVDEVAYHEKYPTIYHLRKKLVDSTDKADLRLIYLALAHMIKFRGHFLIEGDLNPDNSDVDKLFIQLVQTYNQLFEENPINASGVDAKAILSARLSKSRRLENLIAQLPGEKKNGLFGNLIALSLGLTPNFKSNFDLAEDAKLQLSKDTYDDDLDNLLAQIGDQYADLFLAAKNLSDAILLSDILRVNTEITKAPLSASMIKRYDEHHQDLTLLKALVRQQLPEKYKEIFFDQSKNGYAGYIDGGASQEEFYKFIKPILEKMDGTEELLVKLNREDLLRKQRTFDNGSIPHQIHLGELHAILRRQEDFYPFLKDNREKIEKILTFRIPYYVGPLARGNSRFAWMTRKSEETITPWNFEEVVDKGASAQSFIERMTNFDKNLPNEKVLPKHSLLYEYFTVYNELTKVKYVTEGMRKPAFLSGEQKKAIVDLLFKTNRKVTVKQLKEDYFKKIECFDSVEISGVEDRFNASLGTYHDLLKIIKDKDFLDNEENEDILEDIVLTLTLFEDREMIEERLKTYAHLFDDKVMKQLKRRRYTGWGRLSRKLINGIRDKQSGKTILDFLKSDGFANRNFMQLIHDDSLTFKEDIQKAQVSGQGDSLHEHIANLAGSPAIKKGILQTVKVVDELVKVMGRHKPENIVIEMARENQTTQKGQKNSRERMKRIEEGIKELGSQILKEHPVENTQLQNEKLYLYYLQNGRDMYVDQELDINRLSDYDVDHIVPQSFLKDDSIDNKVLTRSDKARGKSDNVPSEEVVKKMKNYWRQLLNAKLITQRKFDNLTKAERGGLSELDKAGFIKRQLVETRQITKHVAQILDSRMNTKYDENDKLIREVKVITLKSKLVSDFRKDFQFYKVREINNYHHAHDAYLNAVVGTALIKKYPKLESEFVYGDYKVYDVRKMIAKSEQEIGKATAKYFFYSNIMNFFKTEITLANGEIRKRPLIETNGETGEIVWDKGRDFATVRKVLSMPQVNIVKKTEVQTGGFSKESILPKRNSDKLIARKKDWDPKKYGGFDSPTVAYSVLVVAKVEKGKSKKLKSVKELLGITIMERSSFEKNPIDFLEAKGYKEVKKDLIIKLPKYSLFELENGRKRMLASAGELQKGNELALPSKYVNFLYLASHYEKLKGSPEDNEQKQLFVEQHKHYLDEIIEQISEFSKRVILADANLDKVLSAYNKHRDKPIREQAENIIHLFTLTNLGAPAAFKYFDTTIDRKRYTSTKEVLDATLIHQSITGLYETRIDLSQLGGDGGEAAAKGSSGGTLNIEDEYRLHETSKEPDVSLGSTWLSDFPQAWAETGGMGLAVRQAPLIIPLKATSTPVSIKQYPMSQEARLGIKPHIQRLLDQGILVPCQSPWNTPLLPVKKPGTNDYRPVQDLREVNKRVEDIHPTVPNPYNLLSGLPPSHQWYTVLDLKDAFFCLRLHPTSQPLFAFEWRDPEMGISGQLTWTRLPQGFKNSPTLFNEALHRDLAGFRIQHPDLILLQYVDDLLLAATSELDCQQGTRALLQTLGDLGYRASAKKAQICQKQVKYLGYLLKEGQRWLTEARKETVMGQPIPKTPRQLREFLGKAGFCRLFIPGFAEMAAPLYPLTKPGTLFNWGPDQQKAFQEIKQALLTAPALGLPDLTKPFELFVDEKQGYAKGVLTQKLGPWRRPVAYLSKKLDPVAAGWPPCLRMVAAIAVLTKDAGKLTMGQPLVILAPHAVEALVKQPPDRWLSNARMTHYQALLLDTDRVQFGPVVALNPATLLPLPEEGLQHDCLDILAEAHGTRSDLMDQPLPDADHTWYTDGSSFLQEGQRKAGAAVTTETEVIWARALPAGTSAQRAELIALTQALKMAEGKKLNVYTDSRYAFATAHIHGEIYRRRGWLTSEGKEIKNKDEILALLKALFLPKRLSIIHCPGHQKGNSAEARGNRMADQAAREVATRETPETSTLLAGKRTADGSEFEKRTADGSEFESPKKKAKVE

SEQ ID NO: 2351 - protein, 2096 aa, synthetic construct
MPAAKRVKLDGGDKKYSIGLDIGTNSVGWAVITDEYKVPSKKFKVLGNTDRHSIKKNLIGALLFDSGETAEATRLKRTARRRYTRRKNRICYLQEIFSNEMAKVDDSFFHRLEESFLVEEDKKHERHPIFGNIVDEVAYHEKYPTIYHLRKKLVDSTDKADLRLIYLALAHMIKFRGHFLIEGDLNPDNSDVDKLFIQLVQTYNQLFEENPINASGVDAKAILSARLSKSRRLENLIAQLPGEKKNGLFGNLIALSLGLTPNFKSNFDLAEDAKLQLSKDTYDDDLDNLLAQIGDQYADLFLAAKNLSDAILLSDILRVNTEITKAPLSASMIKRYDEHHQDLTLLKALVRQQLPEKYKEIFFDQSKNGYAGYIDGGASQEEFYKFIKPILEKMDGTEELLVKLNREDLLRKQRTFDNGSIPHQIHLGELHAILRRQEDFYPFLKDNREKIEKILTFRIPYYVGPLARGNSRFAWMTRKSEETITPWNFEEVVDKGASAQSFIERMTNFDKNLPNEKVLPKHSLLYEYFTVYNELTKVKYVTEGMRKPAFLSGEQKKAIVDLLFKTNRKVTVKQLKEDYFKKIECFDSVEISGVEDRFNASLGTYHDLLKIIKDKDFLDNEENEDILEDIVLTLTLFEDREMIEERLKTYAHLFDDKVMKQLKRRRYTGWGRLSRKLINGIRDKQSGKTILDFLKSDGFANRNFMQLIHDDSLTFKEDIQKAQVSGQGDSLHEHIANLAGSPAIKKGILQTVKVVDELVKVMGRHKPENIVIEMARENQTTQKGQKNSRERMKRIEEGIKELGSQILKEHPVENTQLQNEKLYLYYLQNGRDMYVDQELDINRLSDYDVDHIVPQSFLKDDSIDNKVLTRSDKARGKSDNVPSEEVVKKMKNYWRQLLNAKLITQRKFDNLTKAERGGLSELDKAGFIKRQLVETRQITKHVAQILDSRMNTKYDENDKLIREVKVITLKSKLVSDFRKDFQFYKVREINNYHHAHDAYLNAVVGTALIKKYPKLESEFVYGDYKVYDVRKMIAKSEQEIGKATAKYFFYSNIMNFFKTEITLANGEIRKRPLIETNGETGEIVWDKGRDFATVRKVLSMPQVNIVKKTEVQTGGFSKESILPKRNSDKLIARKKDWDPKKYGGFDSPTVAYSVLVVAKVEKGKSKKLKSVKELLGITIMERSSFEKNPIDFLEAKGYKEVKKDLIIKLPKYSLFELENGRKRMLASAGELQKGNELALPSKYVNFLYLASHYEKLKGSPEDNEQKQLFVEQHKHYLDEIIEQISEFSKRVILADANLDKVLSAYNKHRDKPIREQAENIIHLFTLTNLGAPAAFKYFDTTIDRKRYTSTKEVLDATLIHQSITGLYETRIDLSQLGGDGGGGGGGSEAAAKGGTLNIEDEYRLHETSKEPDVSLGSTWLSDFPQAWAETGGMGLAVRQAPLIIPLKATSTPVSIKQYPMSQEARLGIKPHIQRLLDQGILVPCQSPWNTPLLPVKKPGTNDYRPVQDLREVNKRVEDIHPTVPNPYNLLSGLPPSHQWYTVLDLKDAFFCLRLHPTSQPLFAFEWRDPEMGISGQLTWTRLPQGFKNSPTLFNEALHRDLAGFRIQHPDLILLQYVDDLLLAATSELDCQQGTRALLQTLGDLGYRASAKKAQICQKQVKYLGYLLKEGQRWLTEARKETVMGQPIPKTPRQLREFLGKAGFCRLFIPGFAEMAAPLYPLTKPGTLFNWGPDQQKAFQEIKQALLTAPALGLPDLTKPFELFVDEKQGYAKGVLTQKLGPWRRPVAYLSKKLDPVAAGWPPCLRMVAAIAVLTKDAGKLTMGQPLVILAPHAVEALVKQPPDRWLSNARMTHYQALLLDTDRVQFGPVVALNPATLLPLPEEGLQHDCLDILAEAHGTRSDLMDQPLPDADHTWYTDGSSFLQEGQRKAGAAVTTETEVIWARALPAGTSAQRAELIALTQALKMAEGKKLNVYTDSRYAFATAHIHGEIYRRRGWLTSEGKEIKNKDEILALLKALFLPKRLSIIHCPGHQKGNSAEARGNRMADQAAREVATRETPETSTLLAGKRTADGSEFEKRTADGSEFESPKKKAKVE

SEQ ID NO: 2352 - protein, 2096 aa, synthetic construct
MPAAKRVKLDGGDKKYSIGLDIGTNSVGWAVITDEYKVPSKKFKVLGNTDRHSIKKNLIGALLFDSGETAEATRLKRTARRRYTRRKNRICYLQEIFSNEMAKVDDSFFHRLEESFLVEEDKKHERHPIFGNIVDEVAYHEKYPTIYHLRKKLVDSTDKADLRLIYLALAHMIKFRGHFLIEGDLNPDNSDVDKLFIQLVQTYNQLFEENPINASGVDAKAILSARLSKSRRLENLIAQLPGEKKNGLFGNLIALSLGLTPNFKSNFDLAEDAKLQLSKDTYDDDLDNLLAQIGDQYADLFLAAKNLSDAILLSDILRVNTEITKAPLSASMIKRYDEHHQDLTLLKALVRQQLPEKYKEIFFDQSKNGYAGYIDGGASQEEFYKFIKPILEKMDGTEELLVKLNREDLLRKQRTFDNGSIPHQIHLGELHAILRRQEDFYPFLKDNREKIEKILTFRIPYYVGPLARGNSRFAWMTRKSEETITPWNFEEVVDKGASAQSFIERMTNFDKNLPNEKVLPKHSLLYEYFTVYNELTKVKYVTEGMRKPAFLSGEQKKAIVDLLFKTNRKVTVKQLKEDYFKKIECFDSVEISGVEDRFNASLGTYHDLLKIIKDKDFLDNEENEDILEDIVLTLTLFEDREMIEERLKTYAHLFDDKVMKQLKRRRYTGWGRLSRKLINGIRDKQSGKTILDFLKSDGFANRNFMQLIHDDSLTFKEDIQKAQVSGQGDSLHEHIANLAGSPAIKKGILQTVKVVDELVKVMGRHKPENIVIEMARENQTTQKGQKNSRERMKRIEEGIKELGSQILKEHPVENTQLQNEKLYLYYLQNGRDMYVDQELDINRLSDYDVDHIVPQSFLKDDSIDNKVLTRSDKARGKSDNVPSEEVVKKMKNYWRQLLNAKLITQRKFDNLTKAERGGLSELDKAGFIKRQLVETRQITKHVAQILDSRMNTKYDENDKLIREVKVITLKSKLVSDFRKDFQFYKVREINNYHHAHDAYLNAVVGTALIKKYPKLESEFVYGDYKVYDVRKMIAKSEQEIGKATAKYFFYSNIMNFFKTEITLANGEIRKRPLIETNGETGEIVWDKGRDFATVRKVLSMPQVNIVKKTEVQTGGFSKESILPKRNSDKLIARKKDWDPKKYGGFDSPTVAYSVLVVAKVEKGKSKKLKSVKELLGITIMERSSFEKNPIDFLEAKGYKEVKKDLIIKLPKYSLFELENGRKRMLASAGELQKGNELALPSKYVNFLYLASHYEKLKGSPEDNEQKQLFVEQHKHYLDEIIEQISEFSKRVILADANLDKVLSAYNKHRDKPIREQAENIIHLFTLTNLGAPAAFKYFDTTIDRKRYTSTKEVLDATLIHQSITGLYETRIDLSQLGGDGGGSSEAAAKGGSGGTLNIEDEYRLHETSKEPDVSLGSTWLSDFPQAWAETGGMGLAVRQAPLIIPLKATSTPVSIKQYPMSQEARLGIKPHIQRLLDQGILVPCQSPWNTPLLPVKKPGTNDYRPVQDLREVNKRVEDIHPTVPNPYNLLSGLPPSHQWYTVLDLKDAFFCLRLHPTSQPLFAFEWRDPEMGISGQLTWTRLPQGFKNSPTLFNEALHRDLAGFRIQHPDLILLQYVDDLLLAATSELDCQQGTRALLQTLGDLGYRASAKKAQICQKQVKYLGYLLKEGQRWLTEARKETVMGQPIPKTPRQLREFLGKAGFCRLFIPGFAEMAAPLYPLTKPGTLFNWGPDQQKAFQEIKQALLTAPALGLPDLTKPFELFVDEKQGYAKGVLTQKLGPWRRPVAYLSKKLDPVAAGWPPCLRMVAAIAVLTKDAGKLTMGQPLVILAPHAVEALVKQPPDRWLSNARMTHYQALLLDTDRVQFGPVVALNPATLLPLPEEGLQHDCLDILAEAHGTRSDLMDQPLPDADHTWYTDGSSFLQEGQRKAGAAVTTETEVIWARALPAGTSAQRAELIALTQALKMAEGKKLNVYTDSRYAFATAHIHGEIYRRRGWLTSEGKEIKNKDEILALLKALFLPKRLSIIHCPGHQKGNSAEARGNRMADQAAREVATRETPETSTLLAGKRTADGSEFEKRTADGSEFESPKKKAKVE

SEQ ID NO: 2353 - protein, 2091 aa, synthetic construct
MPAAKRVKLDGGDKKYSIGLDIGTNSVGWAVITDEYKVPSKKFKVLGNTDRHSIKKNLIGALLFDSGETAEATRLKRTARRRYTRRKNRICYLQEIFSNEMAKVDDSFFHRLEESFLVEEDKKHERHPIFGNIVDEVAYHEKYPTIYHLRKKLVDSTDKADLRLIYLALAHMIKFRGHFLIEGDLNPDNSDVDKLFIQLVQTYNQLFEENPINASGVDAKAILSARLSKSRRLENLIAQLPGEKKNGLFGNLIALSLGLTPNFKSNFDLAEDAKLQLSKDTYDDDLDNLLAQIGDQYADLFLAAKNLSDAILLSDILRVNTEITKAPLSASMIKRYDEHHQDLTLLKALVRQQLPEKYKEIFFDQSKNGYAGYIDGGASQEEFYKFIKPILEKMDGTEELLVKLNREDLLRKQRTFDNGSIPHQIHLGELHAILRRQEDFYPFLKDNREKIEKILTFRIPYYVGPLARGNSRFAWMTRKSEETITPWNFEEVVDKGASAQSFIERMTNFDKNLPNEKVLPKHSLLYEYFTVYNELTKVKYVTEGMRKPAFLSGEQKKAIVDLLFKTNRKVTVKQLKEDYFKKIECFDSVEISGVEDRFNASLGTYHDLLKIIKDKDFLDNEENEDILEDIVLTLTLFEDREMIEERLKTYAHLFDDKVMKQLKRRRYTGWGRLSRKLINGIRDKQSGKTILDFLKSDGFANRNFMQLIHDDSLTFKEDIQKAQVSGQGDSLHEHIANLAGSPAIKKGILQTVKVVDELVKVMGRHKPENIVIEMARENQTTQKGQKNSRERMKRIEEGIKELGSQILKEHPVENTQLQNEKLYLYYLQNGRDMYVDQELDINRLSDYDVDHIVPQSFLKDDSIDNKVLTRSDKARGKSDNVPSEEVVKKMKNYWRQLLNAKLITQRKFDNLTKAERGGLSELDKAGFIKRQLVETRQITKHVAQILDSRMNTKYDENDKLIREVKVITLKSKLVSDFRKDFQFYKVREINNYHHAHDAYLNAVVGTALIKKYPKLESEFVYGDYKVYDVRKMIAKSEQEIGKATAKYFFYSNIMNFFKTEITLANGEIRKRPLIETNGETGEIVWDKGRDFATVRKVLSMPQVNIVKKTEVQTGGFSKESILPKRNSDKLIARKKDWDPKKYGGFDSPTVAYSVLVVAKVEKGKSKKLKSVKELLGITIMERSSFEKNPIDFLEAKGYKEVKKDLIIKLPKYSLFELENGRKRMLASAGELQKGNELALPSKYVNFLYLASHYEKLKGSPEDNEQKQLFVEQHKHYLDEIIEQISEFSKRVILADANLDKVLSAYNKHRDKPIREQAENIIHLFTLTNLGAPAAFKYFDTTIDRKRYTSTKEVLDATLIHQSITGLYETRIDLSQLGGDGGGGSGSSGGTLNIEDEYRLHETSKEPDVSLGSTWLSDFPQAWAETGGMGLAVRQAPLIIPLKATSTPVSIKQYPMSQEARLGIKPHIQRLLDQGILVPCQSPWNTPLLPVKKPGTNDYRPVQDLREVNKRVEDIHPTVPNPYNLLSGLPPSHQWYTVLDLKDAFFCLRLHPTSQPLFAFEWRDPEMGISGQLTWTRLPQGFKNSPTLFNEALHRDLAGFRIQHPDLILLQYVDDLLLAATSELDCQQGTRALLQTLGDLGYRASAKKAQICQKQVKYLGYLLKEGQRWLTEARKETVMGQPIPKTPRQLREFLGKAGFCRLFIPGFAEMAAPLYPLTKPGTLFNWGPDQQKAFQEIKQALLTAPALGLPDLTKPFELFVDEKQGYAKGVLTQKLGPWRRPVAYLSKKLDPVAAGWPPCLRMVAAIAVLTKDAGKLTMGQPLVILAPHAVEALVKQPPDRWLSNARMTHYQALLLDTDRVQFGPVVALNPATLLPLPEEGLQHDCLDILAEAHGTRSDLMDQPLPDADHTWYTDGSSFLQEGQRKAGAAVTTETEVIWARALPAGTSAQRAELIALTQALKMAEGKKLNVYTDSRYAFATAHIHGEIYRRRGWLTSEGKEIKNKDEILALLKALFLPKRLSIIHCPGHQKGNSAEARGNRMADQAAREVATRETPETSTLLAGKRTADGSEFEKRTADGSEFESPKKKAKVE

SEQ ID NO: 2354 - protein, 2091 aa, synthetic construct
MPAAKRVKLDGGDKKYSIGLDIGTNSVGWAVITDEYKVPSKKFKVLGNTDRHSIKKNLIGALLFDSGETAEATRLKRTARRRYTRRKNRICYLQEIFSNEMAKVDDSFFHRLEESFLVEEDKKHERHPIFGNIVDEVAYHEKYPTIYHLRKKLVDSTDKADLRLIYLALAHMIKFRGHFLIEGDLNPDNSDVDKLFIQLVQTYNQLFEENPINASGVDAKAILSARLSKSRRLENLIAQLPGEKKNGLFGNLIALSLGLTPNFKSNFDLAEDAKLQLSKDTYDDDLDNLLAQIGDQYADLFLAAKNLSDAILLSDILRVNTEITKAPLSASMIKRYDEHHQDLTLLKALVRQQLPEKYKEIFFDQSKNGYAGYIDGGASQEEFYKFIKPILEKMDGTEELLVKLNREDLLRKQRTFDNGSIPHQIHLGELHAILRRQEDFYPFLKDNREKIEKILTFRIPYYVGPLARGNSRFAWMTRKSEETITPWNFEEVVDKGASAQSFIERMTNFDKNLPNEKVLPKHSLLYEYFTVYNELTKVKYVTEGMRKPAFLSGEQKKAIVDLLFKTNRKVTVKQLKEDYFKKIECFDSVEISGVEDRFNASLGTYHDLLKIIKDKDFLDNEENEDILEDIVLTLTLFEDREMIEERLKTYAHLFDDKVMKQLKRRRYTGWGRLSRKLINGIRDKQSGKTILDFLKSDGFANRNFMQLIHDDSLTFKEDIQKAQVSGQGDSLHEHIANLAGSPAIKKGILQTVKVVDELVKVMGRHKPENIVIEMARENQTTQKGQKNSRERMKRIEEGIKELGSQILKEHPVENTQLQNEKLYLYYLQNGRDMYVDQELDINRLSDYDVDHIVPQSFLKDDSIDNKVLTRSDKARGKSDNVPSEEVVKKMKNYWRQLLNAKLITQRKFDNLTKAERGGLSELDKAGFIKRQLVETRQITKHVAQILDSRMNTKYDENDKLIREVKVITLKSKLVSDFRKDFQFYKVREINNYHHAHDAYLNAVVGTALIKKYPKLESEFVYGDYKVYDVRKMIAKSEQEIGKATAKYFFYSNIMNFFKTEITLANGEIRKRPLIETNGETGEIVWDKGRDFATVRKVLSMPQVNIVKKTEVQTGGFSKESILPKRNSDKLIARKKDWDPKKYGGFDSPTVAYSVLVVAKVEKGKSKKLKSVKELLGITIMERSSFEKNPIDFLEAKGYKEVKKDLIIKLPKYSLFELENGRKRMLASAGELQKGNELALPSKYVNFLYLASHYEKLKGSPEDNEQKQLFVEQHKHYLDEIIEQISEFSKRVILADANLDKVLSAYNKHRDKPIREQAENIIHLFTLTNLGAPAAFKYFDTTIDRKRYTSTKEVLDATLIHQSITGLYETRIDLSQLGGDGGGGGGGGGGTLNIEDEYRLHETSKEPDVSLGSTWLSDFPQAWAETGGMGLAVRQAPLIIPLKATSTPVSIKQYPMSQEARLGIKPHIQRLLDQGILVPCQSPWNTPLLPVKKPGTNDYRPVQDLREVNKRVEDIHPTVPNPYNLLSGLPPSHQWYTVLDLKDAFFCLRLHPTSQPLFAFEWRDPEMGISGQLTWTRLPQGFKNSPTLFNEALHRDLAGFRIQHPDLILLQYVDDLLLAATSELDCQQGTRALLQTLGDLGYRASAKKAQICQKQVKYLGYLLKEGQRWLTEARKETVMGQPIPKTPRQLREFLGKAGFCRLFIPGFAEMAAPLYPLTKPGTLFNWGPDQQKAFQEIKQALLTAPALGLPDLTKPFELFVDEKQGYAKGVLTQKLGPWRRPVAYLSKKLDPVAAGWPPCLRMVAAIAVLTKDAGKLTMGQPLVILAPHAVEALVKQPPDRWLSNARMTHYQALLLDTDRVQFGPVVALNPATLLPLPEEGLQHDCLDILAEAHGTRSDLMDQPLPDADHTWYTDGSSFLQEGQRKAGAAVTTETEVIWARALPAGTSAQRAELIALTQALKMAEGKKLNVYTDSRYAFATAHIHGEIYRRRGWLTSEGKEIKNKDEILALLKALFLPKRLSIIHCPGHQKGNSAEARGNRMADQAAREVATRETPETSTLLAGKRTADGSEFEKRTADGSEFESPKKKAKVE

SEQ ID NO: 2355 - protein, 2096 aa, synthetic construct
MPAAKRVKLDGGDKKYSIGLDIGTNSVGWAVITDEYKVPSKKFKVLGNTDRHSIKKNLIGALLFDSGETAEATRLKRTARRRYTRRKNRICYLQEIFSNEMAKVDDSFFHRLEESFLVEEDKKHERHPIFGNIVDEVAYHEKYPTIYHLRKKLVDSTDKADLRLIYLALAHMIKFRGHFLIEGDLNPDNSDVDKLFIQLVQTYNQLFEENPINASGVDAKAILSARLSKSRRLENLIAQLPGEKKNGLFGNLIALSLGLTPNFKSNFDLAEDAKLQLSKDTYDDDLDNLLAQIGDQYADLFLAAKNLSDAILLSDILRVNTEITKAPLSASMIKRYDEHHQDLTLLKALVRQQLPEKYKEIFFDQSKNGYAGYIDGGASQEEFYKFIKPILEKMDGTEELLVKLNREDLLRKQRTFDNGSIPHQIHLGELHAILRRQEDFYPFLKDNREKIEKILTFRIPYYVGPLARGNSRFAWMTRKSEETITPWNFEEVVDKGASAQSFIERMTNFDKNLPNEKVLPKHSLLYEYFTVYNELTKVKYVTEGMRKPAFLSGEQKKAIVDLLFKTNRKVTVKQLKEDYFKKIECFDSVEISGVEDRFNASLGTYHDLLKIIKDKDFLDNEENEDILEDIVLTLTLFEDREMIEERLKTYAHLFDDKVMKQLKRRRYTGWGRLSRKLINGIRDKQSGKTILDFLKSDGFANRNFMQLIHDDSLTFKEDIQKAQVSGQGDSLHEHIANLAGSPAIKKGILQTVKVVDELVKVMGRHKPENIVIEMARENQTTQKGQKNSRERMKRIEEGIKELGSQILKEHPVENTQLQNEKLYLYYLQNGRDMYVDQELDINRLSDYDVDHIVPQSFLKDDSIDNKVLTRSDKARGKSDNVPSEEVVKKMKNYWRQLLNAKLITQRKFDNLTKAERGGLSELDKAGFIKRQLVETRQITKHVAQILDSRMNTKYDENDKLIREVKVITLKSKLVSDFRKDFQFYKVREINNYHHAHDAYLNAVVGTALIKKYPKLESEFVYGDYKVYDVRKMIAKSEQEIGKATAKYFFYSNIMNFFKTEITLANGEIRKRPLIETNGETGEIVWDKGRDFATVRKVLSMPQVNIVKKTEVQTGGFSKESILPKRNSDKLIARKKDWDPKKYGGFDSPTVAYSVLVVAKVEKGKSKKLKSVKELLGITIMERSSFEKNPIDFLEAKGYKEVKKDLIIKLPKYSLFELENGRKRMLASAGELQKGNELALPSKYVNFLYLASHYEKLKGSPEDNEQKQLFVEQHKHYLDEIIEQISEFSKRVILADANLDKVLSAYNKHRDKPIREQAENIIHLFTLTNLGAPAAFKYFDTTIDRKRYTSTKEVLDATLIHQSITGLYETRIDLSQLGGDGGPAPGSSEAAAKGGTLNIEDEYRLHETSKEPDVSLGSTWLSDFPQAWAETGGMGLAVRQAPLIIPLKATSTPVSIKQYPMSQEARLGIKPHIQRLLDQGILVPCQSPWNTPLLPVKKPGTNDYRPVQDLREVNKRVEDIHPTVPNPYNLLSGLPPSHQWYTVLDLKDAFFCLRLHPTSQPLFAFEWRDPEMGISGQLTWTRLPQGFKNSPTLFNEALHRDLAGFRIQHPDLILLQYVDDLLLAATSELDCQQGTRALLQTLGDLGYRASAKKAQICQKQVKYLGYLLKEGQRWLTEARKETVMGQPIPKTPRQLREFLGKAGFCRLFIPGFAEMAAPLYPLTKPGTLFNWGPDQQKAFQEIKQALLTAPALGLPDLTKPFELFVDEKQGYAKGVLTQKLGPWRRPVAYLSKKLDPVAAGWPPCLRMVAAIAVLTKDAGKLTMGQPLVILAPHAVEALVKQPPDRWLSNARMTHYQALLLDTDRVQFGPVVALNPATLLPLPEEGLQHDCLDILAEAHGTRSDLMDQPLPDADHTWYTDGSSFLQEGQRKAGAAVTTETEVIWARALPAGTSAQRAELIALTQALKMAEGKKLNVYTDSRYAFATAHIHGEIYRRRGWLTSEGKEIKNKDEILALLKALFLPKRLSIIHCPGHQKGNSAEARGNRMADQAAREVATRETPETSTLLAGKRTADGSEFEKRTADGSEFESPKKKAKVE

SEQ ID NO: 2356 - protein, 2093 aa, synthetic construct
MPAAKRVKLDGGDKKYSIGLDIGTNSVGWAVITDEYKVPSKKFKVLGNTDRHSIKKNLIGALLFDSGETAEATRLKRTARRRYTRRKNRICYLQEIFSNEMAKVDDSFFHRLEESFLVEEDKKHERHPIFGNIVDEVAYHEKYPTIYHLRKKLVDSTDKADLRLIYLALAHMIKFRGHFLIEGDLNPDNSDVDKLFIQLVQTYNQLFEENPINASGVDAKAILSARLSKSRRLENLIAQLPGEKKNGLFGNLIALSLGLTPNFKSNFDLAEDAKLQLSKDTYDDDLDNLLAQIGDQYADLFLAAKNLSDAILLSDILRVNTEITKAPLSASMIKRYDEHHQDLTLLKALVRQQLPEKYKEIFFDQSKNGYAGYIDGGASQEEFYKFIKPILEKMDGTEELLVKLNREDLLRKQRTFDNGSIPHQIHLGELHAILRRQEDFYPFLKDNREKIEKILTFRIPYYVGPLARGNSRFAWMTRKSEETITPWNFEEVVDKGASAQSFIERMTNFDKNLPNEKVLPKHSLLYEYFTVYNELTKVKYVTEGMRKPAFLSGEQKKAIVDLLFKTNRKVTVKQLKEDYFKKIECFDSVEISGVEDRFNASLGTYHDLLKIIKDKDFLDNEENEDILEDIVLTLTLFEDREMIEERLKTYAHLFDDKVMKQLKRRRYTGWGRLSRKLINGIRDKQSGKTILDFLKSDGFANRNFMQLIHDDSLTFKEDIQKAQVSGQGDSLHEHIANLAGSPAIKKGILQTVKVVDELVKVMGRHKPENIVIEMARENQTTQKGQKNSRERMKRIEEGIKELGSQILKEHPVENTQLQNEKLYLYYLQNGRDMYVDQELDINRLSDYDVDHIVPQSFLKDDSIDNKVLTRSDKARGKSDNVPSEEVVKKMKNYWRQLLNAKLITQRKFDNLTKAERGGLSELDKAGFIKRQLVETRQITKHVAQILDSRMNTKYDENDKLIREVKVITLKSKLVSDFRKDFQFYKVREINNYHHAHDAYLNAVVGTALIKKYPKLESEFVYGDYKVYDVRKMIAKSEQEIGKATAKYFFYSNIMNFFKTEITLANGEIRKRPLIETNGETGEIVWDKGRDFATVRKVLSMPQVNIVKKTEVQTGGFSKESILPKRNSDKLIARKKDWDPKKYGGFDSPTVAYSVLVVAKVEKGKSKKLKSVKELLGITIMERSSFEKNPIDFLEAKGYKEVKKDLIIKLPKYSLFELENGRKRMLASAGELQKGNELALPSKYVNFLYLASHYEKLKGSPEDNEQKQLFVEQHKHYLDEIIEQISEFSKRVILADANLDKVLSAYNKHRDKPIREQAENIIHLFTLTNLGAPAAFKYFDTTIDRKRYTSTKEVLDATLIHQSITGLYETRIDLSQLGGDGGPAPEAAAKGGTLNIEDEYRLHETSKEPDVSLGSTWLSDFPQAWAETGGMGLAVRQAPLIIPLKATSTPVSIKQYPMSQEARLGIKPHIQRLLDQGILVPCQSPWNTPLLPVKKPGTNDYRPVQDLREVNKRVEDIHPTVPNPYNLLSGLPPSHQWYTVLDLKDAFFCLRLHPTSQPLFAFEWRDPEMGISGQLTWTRLPQGFKNSPTLFNEALHRDLAGFRIQHPDLILLQYVDDLLLAATSELDCQQGTRALLQTLGDLGYRASAKKAQICQKQVKYLGYLLKEGQRWLTEARKETVMGQPIPKTPRQLREFLGKAGFCRLFIPGFAEMAAPLYPLTKPGTLFNWGPDQQKAFQEIKQALLTAPALGLPDLTKPFELFVDEKQGYAKGVLTQKLGPWRRPVAYLSKKLDPVAAGWPPCLRMVAAIAVLTKDAGKLTMGQPLVILAPHAVEALVKQPPDRWLSNARMTHYQALLLDTDRVQFGPVVALNPATLLPLPEEGLQHDCLDILAEAHGTRSDLMDQPLPDADHTWYTDGSSFLQEGQRKAGAAVTTETEVIWARALPAGTSAQRAELIALTQALKMAEGKKLNVYTDSRYAFATAHIHGEIYRRRGWLTSEGKEIKNKDEILALLKALFLPKRLSIIHCPGHQKGNSAEARGNRMADQAAREVATRETPETSTLLAGKRTADGSEFEKRTADGSEFESPKKKAKVE

SEQ ID NO: 2357 - protein, 2096 aa, synthetic construct
MPAAKRVKLDGGDKKYSIGLDIGTNSVGWAVITDEYKVPSKKFKVLGNTDRHSIKKNLIGALLFDSGETAEATRLKRTARRRYTRRKNRICYLQEIFSNEMAKVDDSFFHRLEESFLVEEDKKHERHPIFGNIVDEVAYHEKYPTIYHLRKKLVDSTDKADLRLIYLALAHMIKFRGHFLIEGDLNPDNSDVDKLFIQLVQTYNQLFEENPINASGVDAKAILSARLSKSRRLENLIAQLPGEKKNGLFGNLIALSLGLTPNFKSNFDLAEDAKLQLSKDTYDDDLDNLLAQIGDQYADLFLAAKNLSDAILLSDILRVNTEITKAPLSASMIKRYDEHHQDLTLLKALVRQQLPEKYKEIFFDQSKNGYAGYIDGGASQEEFYKFIKPILEKMDGTEELLVKLNREDLLRKQRTFDNGSIPHQIHLGELHAILRRQEDFYPFLKDNREKIEKILTFRIPYYVGPLARGNSRFAWMTRKSEETITPWNFEEVVDKGASAQSFIERMTNFDKNLPNEKVLPKHSLLYEYFTVYNELTKVKYVTEGMRKPAFLSGEQKKAIVDLLFKTNRKVTVKQLKEDYFKKIECFDSVEISGVEDRFNASLGTYHDLLKIIKDKDFLDNEENEDILEDIVLTLTLFEDREMIEERLKTYAHLFDDKVMKQLKRRRYTGWGRLSRKLINGIRDKQSGKTILDFLKSDGFANRNFMQLIHDDSLTFKEDIQKAQVSGQGDSLHEHIANLAGSPAIKKGILQTVKVVDELVKVMGRHKPENIVIEMARENQTTQKGQKNSRERMKRIEEGIKELGSQILKEHPVENTQLQNEKLYLYYLQNGRDMYVDQELDINRLSDYDVDHIVPQSFLKDDSIDNKVLTRSDKARGKSDNVPSEEVVKKMKNYWRQLLNAKLITQRKFDNLTKAERGGLSELDKAGFIKRQLVETRQITKHVAQILDSRMNTKYDENDKLIREVKVITLKSKLVSDFRKDFQFYKVREINNYHHAHDAYLNAVVGTALIKKYPKLESEFVYGDYKVYDVRKMIAKSEQEIGKATAKYFFYSNIMNFFKTEITLANGEIRKRPLIETNGETGEIVWDKGRDFATVRKVLSMPQVNIVKKTEVQTGGFSKESILPKRNSDKLIARKKDWDPKKYGGFDSPTVAYSVLVVAKVEKGKSKKLKSVKELLGITIMERSSFEKNPIDFLEAKGYKEVKKDLIIKLPKYSLFELENGRKRMLASAGELQKGNELALPSKYVNFLYLASHYEKLKGSPEDNEQKQLFVEQHKHYLDEIIEQISEFSKRVILADANLDKVLSAYNKHRDKPIREQAENIIHLFTLTNLGAPAAFKYFDTTIDRKRYTSTKEVLDATLIHQSITGLYETRIDLSQLGGDGGEAAAKPAPGSSGGTLNIEDEYRLHETSKEPDVSLGSTWLSDFPQAWAETGGMGLAVRQAPLIIPLKATSTPVSIKQYPMSQEARLGIKPHIQRLLDQGILVPCQSPWNTPLLPVKKPGTNDYRPVQDLREVNKRVEDIHPTVPNPYNLLSGLPPSHQWYTVLDLKDAFFCLRLHPTSQPLFAFEWRDPEMGISGQLTWTRLPQGFKNSPTLFNEALHRDLAGFRIQHPDLILLQYVDDLLLAATSELDCQQGTRALLQTLGDLGYRASAKKAQICQKQVKYLGYLLKEGQRWLTEARKETVMGQPIPKTPRQLREFLGKAGFCRLFIPGFAEMAAPLYPLTKPGTLFNWGPDQQKAFQEIKQALLTAPALGLPDLTKPFELFVDEKQGYAKGVLTQKLGPWRRPVAYLSKKLDPVAAGWPPCLRMVAAIAVLTKDAGKLTMGQPLVILAPHAVEALVKQPPDRWLSNARMTHYQALLLDTDRVQFGPVVALNPATLLPLPEEGLQHDCLDILAEAHGTRSDLMDQPLPDADHTWYTDGSSFLQEGQRKAGAAVTTETEVIWARALPAGTSAQRAELIALTQALKMAEGKKLNVYTDSRYAFATAHIHGEIYRRRGWLTSEGKEIKNKDEILALLKALFLPKRLSIIHCPGHQKGNSAEARGNRMADQAAREVATRETPETSTLLAGKRTADGSEFEKRTADGSEFESPKKKAKVE

SEQ ID NO: 2358 - protein, 2096 aa, synthetic construct
MPAAKRVKLDGGDKKYSIGLDIGTNSVGWAVITDEYKVPSKKFKVLGNTDRHSIKKNLIGALLFDSGETAEATRLKRTARRRYTRRKNRICYLQEIFSNEMAKVDDSFFHRLEESFLVEEDKKHERHPIFGNIVDEVAYHEKYPTIYHLRKKLVDSTDKADLRLIYLALAHMIKFRGHFLIEGDLNPDNSDVDKLFIQLVQTYNQLFEENPINASGVDAKAILSARLSKSRRLENLIAQLPGEKKNGLFGNLIALSLGLTPNFKSNFDLAEDAKLQLSKDTYDDDLDNLLAQIGDQYADLFLAAKNLSDAILLSDILRVNTEITKAPLSASMIKRYDEHHQDLTLLKALVRQQLPEKYKEIFFDQSKNGYAGYIDGGASQEEFYKFIKPILEKMDGTEELLVKLNREDLLRKQRTFDNGSIPHQIHLGELHAILRRQEDFYPFLKDNREKIEKILTFRIPYYVGPLARGNSRFAWMTRKSEETITPWNFEEVVDKGASAQSFIERMTNFDKNLPNEKVLPKHSLLYEYFTVYNELTKVKYVTEGMRKPAFLSGEQKKAIVDLLFKTNRKVTVKQLKEDYFKKIECFDSVEISGVEDRFNASLGTYHDLLKIIKDKDFLDNEENEDILEDIVLTLTLFEDREMIEERLKTYAHLFDDKVMKQLKRRRYTGWGRLSRKLINGIRDKQSGKTILDFLKSDGFANRNFMQLIHDDSLTFKEDIQKAQVSGQGDSLHEHIANLAGSPAIKKGILQTVKVVDELVKVMGRHKPENIVIEMARENQTTQKGQKNSRERMKRIEEGIKELGSQILKEHPVENTQLQNEKLYLYYLQNGRDMYVDQELDINRLSDYDVDHIVPQSFLKDDSIDNKVLTRSDKARGKSDNVPSEEVVKKMKNYWRQLLNAKLITQRKFDNLTKAERGGLSELDKAGFIKRQLVETRQITKHVAQILDSRMNTKYDENDKLIREVKVITLKSKLVSDFRKDFQFYKVREINNYHHAHDAYLNAVVGTALIKKYPKLESEFVYGDYKVYDVRKMIAKSEQEIGKATAKYFFYSNIMNFFKTEITLANGEIRKRPLIETNGETGEIVWDKGRDFATVRKVLSMPQVNIVKKTEVQTGGFSKESILPKRNSDKLIARKKDWDPKKYGGFDSPTVAYSVLVVAKVEKGKSKKLKSVKELLGITIMERSSFEKNPIDFLEAKGYKEVKKDLIIKLPKYSLFELENGRKRMLASAGELQKGNELALPSKYVNFLYLASHYEKLKGSPEDNEQKQLFVEQHKHYLDEIIEQISEFSKRVILADANLDKVLSAYNKHRDKPIREQAENIIHLFTLTNLGAPAAFKYFDTTIDRKRYTSTKEVLDATLIHQSITGLYETRIDLSQLGGDGGGGSEAAAKGGGGGTLNIEDEYRLHETSKEPDVSLGSTWLSDFPQAWAETGGMGLAVRQAPLIIPLKATSTPVSIKQYPMSQEARLGIKPHIQRLLDQGILVPCQSPWNTPLLPVKKPGTNDYRPVQDLREVNKRVEDIHPTVPNPYNLLSGLPPSHQWYTVLDLKDAFFCLRLHPTSQPLFAFEWRDPEMGISGQLTWTRLPQGFKNSPTLFNEALHRDLAGFRIQHPDLILLQYVDDLLLAATSELDCQQGTRALLQTLGDLGYRASAKKAQICQKQVKYLGYLLKEGQRWLTEARKETVMGQPIPKTPRQLREFLGKAGFCRLFIPGFAEMAAPLYPLTKPGTLFNWGPDQQKAFQEIKQALLTAPALGLPDLTKPFELFVDEKQGYAKGVLTQKLGPWRRPVAYLSKKLDPVAAGWPPCLRMVAAIAVLTKDAGKLTMGQPLVILAPHAVEALVKQPPDRWLSNARMTHYQALLLDTDRVQFGPVVALNPATLLPLPEEGLQHDCLDILAEAHGTRSDLMDQPLPDADHTWYTDGSSFLQEGQRKAGAAVTTETEVIWARALPAGTSAQRAELIALTQALKMAEGKKLNVYTDSRYAFATAHIHGEIYRRRGWLTSEGKEIKNKDEILALLKALFLPKRLSIIHCPGHQKGNSAEARGNRMADQAAREVATRETPETSTLLAGKRTADGSEFEKRTADGSEFESPKKKAKVE

SEQ ID NO: 2359 - protein, 2096 aa, synthetic construct
MPAAKRVKLDGGDKKYSIGLDIGTNSVGWAVITDEYKVPSKKFKVLGNTDRHSIKKNLIGALLFDSGETAEATRLKRTARRRYTRRKNRICYLQEIFSNEMAKVDDSFFHRLEESFLVEEDKKHERHPIFGNIVDEVAYHEKYPTIYHLRKKLVDSTDKADLRLIYLALAHMIKFRGHFLIEGDLNPDNSDVDKLFIQLVQTYNQLFEENPINASGVDAKAILSARLSKSRRLENLIAQLPGEKKNGLFGNLIALSLGLTPNFKSNFDLAEDAKLQLSKDTYDDDLDNLLAQIGDQYADLFLAAKNLSDAILLSDILRVNTEITKAPLSASMIKRYDEHHQDLTLLKALVRQQLPEKYKEIFFDQSKNGYAGYIDGGASQEEFYKFIKPILEKMDGTEELLVKLNREDLLRKQRTFDNGSIPHQIHLGELHAILRRQEDFYPFLKDNREKIEKILTFRIPYYVGPLARGNSRFAWMTRKSEETITPWNFEEVVDKGASAQSFIERMTNFDKNLPNEKVLPKHSLLYEYFTVYNELTKVKYVTEGMRKPAFLSGEQKKAIVDLLFKTNRKVTVKQLKEDYFKKIECFDSVEISGVEDRFNASLGTYHDLLKIIKDKDFLDNEENEDILEDIVLTLTLFEDREMIEERLKTYAHLFDDKVMKQLKRRRYTGWGRLSRKLINGIRDKQSGKTILDFLKSDGFANRNFMQLIHDDSLTFKEDIQKAQVSGQGDSLHEHIANLAGSPAIKKGILQTVKVVDELVKVMGRHKPENIVIEMARENQTTQKGQKNSRERMKRIEEGIKELGSQILKEHPVENTQLQNEKLYLYYLQNGRDMYVDQELDINRLSDYDVDHIVPQSFLKDDSIDNKVLTRSDKARGKSDNVPSEEVVKKMKNYWRQLLNAKLITQRKFDNLTKAERGGLSELDKAGFIKRQLVETRQITKHVAQILDSRMNTKYDENDKLIREVKVITLKSKLVSDFRKDFQFYKVREINNYHHAHDAYLNAVVGTALIKKYPKLESEFVYGDYKVYDVRKMIAKSEQEIGKATAKYFFYSNIMNFFKTEITLANGEIRKRPLIETNGETGEIVWDKGRDFATVRKVLSMPQVNIVKKTEVQTGGFSKESILPKRNSDKLIARKKDWDPKKYGGFDSPTVAYSVLVVAKVEKGKSKKLKSVKELLGITIMERSSFEKNPIDFLEAKGYKEVKKDLIIKLPKYSLFELENGRKRMLASAGELQKGNELALPSKYVNFLYLASHYEKLKGSPEDNEQKQLFVEQHKHYLDEIIEQISEFSKRVILADANLDKVLSAYNKHRDKPIREQAENIIHLFTLTNLGAPAAFKYFDTTIDRKRYTSTKEVLDATLIHQSITGLYETRIDLSQLGGDGGGSSEAAAKPAPGGTLNIEDEYRLHETSKEPDVSLGSTWLSDFPQAWAETGGMGLAVRQAPLIIPLKATSTPVSIKQYPMSQEARLGIKPHIQRLLDQGILVPCQSPWNTPLLPVKKPGTNDYRPVQDLREVNKRVEDIHPTVPNPYNLLSGLPPSHQWYTVLDLKDAFFCLRLHPTSQPLFAFEWRDPEMGISGQLTWTRLPQGFKNSPTLFNEALHRDLAGFRIQHPDLILLQYVDDLLLAATSELDCQQGTRALLQTLGDLGYRASAKKAQICQKQVKYLGYLLKEGQRWLTEARKETVMGQPIPKTPRQLREFLGKAGFCRLFIPGFAEMAAPLYPLTKPGTLFNWGPDQQKAFQEIKQALLTAPALGLPDLTKPFELFVDEKQGYAKGVLTQKLGPWRRPVAYLSKKLDPVAAGWPPCLRMVAAIAVLTKDAGKLTMGQPLVILAPHAVEALVKQPPDRWLSNARMTHYQALLLDTDRVQFGPVVALNPATLLPLPEEGLQHDCLDILAEAHGTRSDLMDQPLPDADHTWYTDGSSFLQEGQRKAGAAVTTETEVIWARALPAGTSAQRAELIALTQALKMAEGKKLNVYTDSRYAFATAHIHGEIYRRRGWLTSEGKEIKNKDEILALLKALFLPKRLSIIHCPGHQKGNSAEARGNRMADQAAREVATRETPETSTLLAGKRTADGSEFEKRTADGSEFESPKKKAKVE

SEQ ID NO: 2360 - protein, 2094 aa, synthetic construct
MPAAKRVKLDGGDKKYSIGLDIGTNSVGWAVITDEYKVPSKKFKVLGNTDRHSIKKNLIGALLFDSGETAEATRLKRTARRRYTRRKNRICYLQEIFSNEMAKVDDSFFHRLEESFLVEEDKKHERHPIFGNIVDEVAYHEKYPTIYHLRKKLVDSTDKADLRLIYLALAHMIKFRGHFLIEGDLNPDNSDVDKLFIQLVQTYNQLFEENPINASGVDAKAILSARLSKSRRLENLIAQLPGEKKNGLFGNLIALSLGLTPNFKSNFDLAEDAKLQLSKDTYDDDLDNLLAQIGDQYADLFLAAKNLSDAILLSDILRVNTEITKAPLSASMIKRYDEHHQDLTLLKALVRQQLPEKYKEIFFDQSKNGYAGYIDGGASQEEFYKFIKPILEKMDGTEELLVKLNREDLLRKQRTFDNGSIPHQIHLGELHAILRRQEDFYPFLKDNREKIEKILTFRIPYYVGPLARGNSRFAWMTRKSEETITPWNFEEVVDKGASAQSFIERMTNFDKNLPNEKVLPKHSLLYEYFTVYNELTKVKYVTEGMRKPAFLSGEQKKAIVDLLFKTNRKVTVKQLKEDYFKKIECFDSVEISGVEDRFNASLGTYHDLLKIIKDKDFLDNEENEDILEDIVLTLTLFEDREMIEERLKTYAHLFDDKVMKQLKRRRYTGWGRLSRKLINGIRDKQSGKTILDFLKSDGFANRNFMQLIHDDSLTFKEDIQKAQVSGQGDSLHEHIANLAGSPAIKKGILQTVKVVDELVKVMGRHKPENIVIEMARENQTTQKGQKNSRERMKRIEEGIKELGSQILKEHPVENTQLQNEKLYLYYLQNGRDMYVDQELDINRLSDYDVDHIVPQSFLKDDSIDNKVLTRSDKARGKSDNVPSEEVVKKMKNYWRQLLNAKLITQRKFDNLTKAERGGLSELDKAGFIKRQLVETRQITKHVAQILDSRMNTKYDENDKLIREVKVITLKSKLVSDFRKDFQFYKVREINNYHHAHDAYLNAVVGTALIKKYPKLESEFVYGDYKVYDVRKMIAKSEQEIGKATAKYFFYSNIMNFFKTEITLANGEIRKRPLIETNGETGEIVWDKGRDFATVRKVLSMPQVNIVKKTEVQTGGFSKESILPKRNSDKLIARKKDWDPKKYGGFDSPTVAYSVLVVAKVEKGKSKKLKSVKELLGITIMERSSFEKNPIDFLEAKGYKEVKKDLIIKLPKYSLFELENGRKRMLASAGELQKGNELALPSKYVNFLYLASHYEKLKGSPEDNEQKQLFVEQHKHYLDEIIEQISEFSKRVILADANLDKVLSAYNKHRDKPIREQAENIIHLFTLTNLGAPAAFKYFDTTIDRKRYTSTKEVLDATLIHQSITGLYETRIDLSQLGGDGGGGSGGSGGSGGTLNIEDEYRLHETSKEPDVSLGSTWLSDFPQAWAETGGMGLAVRQAPLIIPLKATSTPVSIKQYPMSQEARLGIKPHIQRLLDQGILVPCQSPWNTPLLPVKKPGTNDYRPVQDLREVNKRVEDIHPTVPNPYNLLSGLPPSHQWYTVLDLKDAFFCLRLHPTSQPLFAFEWRDPEMGISGQLTWTRLPQGFKNSPTLFNEALHRDLAGFRIQHPDLILLQYVDDLLLAATSELDCQQGTRALLQTLGDLGYRASAKKAQICQKQVKYLGYLLKEGQRWLTEARKETVMGQPIPKTPRQLREFLGKAGFCRLFIPGFAEMAAPLYPLTKPGTLFNWGPDQQKAFQEIKQALLTAPALGLPDLTKPFELFVDEKQGYAKGVLTQKLGPWRRPVAYLSKKLDPVAAGWPPCLRMVAAIAVLTKDAGKLTMGQPLVILAPHAVEALVKQPPDRWLSNARMTHYQALLLDTDRVQFGPVVALNPATLLPLPEEGLQHDCLDILAEAHGTRSDLMDQPLPDADHTWYTDGSSFLQEGQRKAGAAVTTETEVIWARALPAGTSAQRAELIALTQALKMAEGKKLNVYTDSRYAFATAHIHGEIYRRRGWLTSEGKEIKNKDEILALLKALFLPKRLSIIHCPGHQKGNSAEARGNRMADQAAREVATRETPETSTLLAGKRTADGSEFEKRTADGSEFESPKKKAKVE

SEQ ID NO: 2361 - protein, 2095 aa, synthetic construct
MPAAKRVKLDGGDKKYSIGLDIGTNSVGWAVITDEYKVPSKKFKVLGNTDRHSIKKNLIGALLFDSGETAEATRLKRTARRRYTRRKNRICYLQEIFSNEMAKVDDSFFHRLEESFLVEEDKKHERHPIFGNIVDEVAYHEKYPTIYHLRKKLVDSTDKADLRLIYLALAHMIKFRGHFLIEGDLNPDNSDVDKLFIQLVQTYNQLFEENPINASGVDAKAILSARLSKSRRLENLIAQLPGEKKNGLFGNLIALSLGLTPNFKSNFDLAEDAKLQLSKDTYDDDLDNLLAQIGDQYADLFLAAKNLSDAILLSDILRVNTEITKAPLSASMIKRYDEHHQDLTLLKALVRQQLPEKYKEIFFDQSKNGYAGYIDGGASQEEFYKFIKPILEKMDGTEELLVKLNREDLLRKQRTFDNGSIPHQIHLGELHAILRRQEDFYPFLKDNREKIEKILTFRIPYYVGPLARGNSRFAWMTRKSEETITPWNFEEVVDKGASAQSFIERMTNFDKNLPNEKVLPKHSLLYEYFTVYNELTKVKYVTEGMRKPAFLSGEQKKAIVDLLFKTNRKVTVKQLKEDYFKKIECFDSVEISGVEDRFNASLGTYHDLLKIIKDKDFLDNEENEDILEDIVLTLTLFEDREMIEERLKTYAHLFDDKVMKQLKRRRYTGWGRLSRKLINGIRDKQSGKTILDFLKSDGFANRNFMQLIHDDSLTFKEDIQKAQVSGQGDSLHEHIANLAGSPAIKKGILQTVKVVDELVKVMGRHKPENIVIEMARENQTTQKGQKNSRERMKRIEEGIKELGSQILKEHPVENTQLQNEKLYLYYLQNGRDMYVDQELDINRLSDYDVDHIVPQSFLKDDSIDNKVLTRSDKARGKSDNVPSEEVVKKMKNYWRQLLNAKLITQRKFDNLTKAERGGLSELDKAGFIKRQLVETRQITKHVAQILDSRMNTKYDENDKLIREVKVITLKSKLVSDFRKDFQFYKVREINNYHHAHDAYLNAVVGTALIKKYPKLESEFVYGDYKVYDVRKMIAKSEQEIGKATAKYFFYSNIMNFFKTEITLANGEIRKRPLIETNGETGEIVWDKGRDFATVRKVLSMPQVNIVKKTEVQTGGFSKESILPKRNSDKLIARKKDWDPKKYGGFDSPTVAYSVLVVAKVEKGKSKKLKSVKELLGITIMERSSFEKNPIDFLEAKGYKEVKKDLIIKLPKYSLFELENGRKRMLASAGELQKGNELALPSKYVNFLYLASHYEKLKGSPEDNEQKQLFVEQHKHYLDEIIEQISEFSKRVILADANLDKVLSAYNKHRDKPIREQAENIIHLFTLTNLGAPAAFKYFDTTIDRKRYTSTKEVLDATLIHQSITGLYETRIDLSQLGGDGGEAAAKEAAAKGGTLNIEDEYRLHETSKEPDVSLGSTWLSDFPQAWAETGGMGLAVRQAPLIIPLKATSTPVSIKQYPMSQEARLGIKPHIQRLLDQGILVPCQSPWNTPLLPVKKPGTNDYRPVQDLREVNKRVEDIHPTVPNPYNLLSGLPPSHQWYTVLDLKDAFFCLRLHPTSQPLFAFEWRDPEMGISGQLTWTRLPQGFKNSPTLFNEALHRDLAGFRIQHPDLILLQYVDDLLLAATSELDCQQGTRALLQTLGDLGYRASAKKAQICQKQVKYLGYLLKEGQRWLTEARKETVMGQPIPKTPRQLREFLGKAGFCRLFIPGFAEMAAPLYPLTKPGTLFNWGPDQQKAFQEIKQALLTAPALGLPDLTKPFELFVDEKQGYAKGVLTQKLGPWRRPVAYLSKKLDPVAAGWPPCLRMVAAIAVLTKDAGKLTMGQPLVILAPHAVEALVKQPPDRWLSNARMTHYQALLLDTDRVQFGPVVALNPATLLPLPEEGLQHDCLDILAEAHGTRSDLMDQPLPDADHTWYTDGSSFLQEGQRKAGAAVTTETEVIWARALPAGTSAQRAELIALTQALKMAEGKKLNVYTDSRYAFATAHIHGEIYRRRGWLTSEGKEIKNKDEILALLKALFLPKRLSIIHCPGHQKGNSAEARGNRMADQAAREVATRETPETSTLLAGKRTADGSEFEKRTADGSEFESPKKKAKVE

SEQ ID NO: 2362 - protein, 2091 aa, synthetic construct
MPAAKRVKLDGGDKKYSIGLDIGTNSVGWAVITDEYKVPSKKFKVLGNTDRHSIKKNLIGALLFDSGETAEATRLKRTARRRYTRRKNRICYLQEIFSNEMAKVDDSFFHRLEESFLVEEDKKHERHPIFGNIVDEVAYHEKYPTIYHLRKKLVDSTDKADLRLIYLALAHMIKFRGHFLIEGDLNPDNSDVDKLFIQLVQTYNQLFEENPINASGVDAKAILSARLSKSRRLENLIAQLPGEKKNGLFGNLIALSLGLTPNFKSNFDLAEDAKLQLSKDTYDDDLDNLLAQIGDQYADLFLAAKNLSDAILLSDILRVNTEITKAPLSASMIKRYDEHHQDLTLLKALVRQQLPEKYKEIFFDQSKNGYAGYIDGGASQEEFYKFIKPILEKMDGTEELLVKLNREDLLRKQRTFDNGSIPHQIHLGELHAILRRQEDFYPFLKDNREKIEKILTFRIPYYVGPLARGNSRFAWMTRKSEETITPWNFEEVVDKGASAQSFIERMTNFDKNLPNEKVLPKHSLLYEYFTVYNELTKVKYVTEGMRKPAFLSGEQKKAIVDLLFKTNRKVTVKQLKEDYFKKIECFDSVEISGVEDRFNASLGTYHDLLKIIKDKDFLDNEENEDILEDIVLTLTLFEDREMIEERLKTYAHLFDDKVMKQLKRRRYTGWGRLSRKLINGIRDKQSGKTILDFLKSDGFANRNFMQLIHDDSLTFKEDIQKAQVSGQGDSLHEHIANLAGSPAIKKGILQTVKVVDELVKVMGRHKPENIVIEMARENQTTQKGQKNSRERMKRIEEGIKELGSQILKEHPVENTQLQNEKLYLYYLQNGRDMYVDQELDINRLSDYDVDHIVPQSFLKDDSIDNKVLTRSDKARGKSDNVPSEEVVKKMKNYWRQLLNAKLITQRKFDNLTKAERGGLSELDKAGFIKRQLVETRQITKHVAQILDSRMNTKYDENDKLIREVKVITLKSKLVSDFRKDFQFYKVREINNYHHAHDAYLNAVVGTALIKKYPKLESEFVYGDYKVYDVRKMIAKSEQEIGKATAKYFFYSNIMNFFKTEITLANGEIRKRPLIETNGETGEIVWDKGRDFATVRKVLSMPQVNIVKKTEVQTGGFSKESILPKRNSDKLIARKKDWDPKKYGGFDSPTVAYSVLVVAKVEKGKSKKLKSVKELLGITIMERSSFEKNPIDFLEAKGYKEVKKDLIIKLPKYSLFELENGRKRMLASAGELQKGNELALPSKYVNFLYLASHYEKLKGSPEDNEQKQLFVEQHKHYLDEIIEQISEFSKRVILADANLDKVLSAYNKHRDKPIREQAENIIHLFTLTNLGAPAAFKYFDTTIDRKRYTSTKEVLDATLIHQSITGLYETRIDLSQLGGDGGGSSGGGGGTLNIEDEYRLHETSKEPDVSLGSTWLSDFPQAWAETGGMGLAVRQAPLIIPLKATSTPVSIKQYPMSQEARLGIKPHIQRLLDQGILVPCQSPWNTPLLPVKKPGTNDYRPVQDLREVNKRVEDIHPTVPNPYNLLSGLPPSHQWYTVLDLKDAFFCLRLHPTSQPLFAFEWRDPEMGISGQLTWTRLPQGFKNSPTLFNEALHRDLAGFRIQHPDLILLQYVDDLLLAATSELDCQQGTRALLQTLGDLGYRASAKKAQICQKQVKYLGYLLKEGQRWLTEARKETVMGQPIPKTPRQLREFLGKAGFCRLFIPGFAEMAAPLYPLTKPGTLFNWGPDQQKAFQEIKQALLTAPALGLPDLTKPFELFVDEKQGYAKGVLTQKLGPWRRPVAYLSKKLDPVAAGWPPCLRMVAAIAVLTKDAGKLTMGQPLVILAPHAVEALVKQPPDRWLSNARMTHYQALLLDTDRVQFGPVVALNPATLLPLPEEGLQHDCLDILAEAHGTRSDLMDQPLPDADHTWYTDGSSFLQEGQRKAGAAVTTETEVIWARALPAGTSAQRAELIALTQALKMAEGKKLNVYTDSRYAFATAHIHGEIYRRRGWLTSEGKEIKNKDEILALLKALFLPKRLSIIHCPGHQKGNSAEARGNRMADQAAREVATRETPETSTLLAGKRTADGSEFEKRTADGSEFESPKKKAKVE

SEQ ID NO: 2363 - protein, 2093 aa, synthetic construct
MPAAKRVKLDGGDKKYSIGLDIGTNSVGWAVITDEYKVPSKKFKVLGNTDRHSIKKNLIGALLFDSGETAEATRLKRTARRRYTRRKNRICYLQEIFSNEMAKVDDSFFHRLEESFLVEEDKKHERHPIFGNIVDEVAYHEKYPTIYHLRKKLVDSTDKADLRLIYLALAHMIKFRGHFLIEGDLNPDNSDVDKLFIQLVQTYNQLFEENPINASGVDAKAILSARLSKSRRLENLIAQLPGEKKNGLFGNLIALSLGLTPNFKSNFDLAEDAKLQLSKDTYDDDLDNLLAQIGDQYADLFLAAKNLSDAILLSDILRVNTEITKAPLSASMIKRYDEHHQDLTLLKALVRQQLPEKYKEIFFDQSKNGYAGYIDGGASQEEFYKFIKPILEKMDGTEELLVKLNREDLLRKQRTFDNGSIPHQIHLGELHAILRRQEDFYPFLKDNREKIEKILTFRIPYYVGPLARGNSRFAWMTRKSEETITPWNFEEVVDKGASAQSFIERMTNFDKNLPNEKVLPKHSLLYEYFTVYNELTKVKYVTEGMRKPAFLSGEQKKAIVDLLFKTNRKVTVKQLKEDYFKKIECFDSVEISGVEDRFNASLGTYHDLLKIIKDKDFLDNEENEDILEDIVLTLTLFEDREMIEERLKTYAHLFDDKVMKQLKRRRYTGWGRLSRKLINGIRDKQSGKTILDFLKSDGFANRNFMQLIHDDSLTFKEDIQKAQVSGQGDSLHEHIANLAGSPAIKKGILQTVKVVDELVKVMGRHKPENIVIEMARENQTTQKGQKNSRERMKRIEEGIKELGSQILKEHPVENTQLQNEKLYLYYLQNGRDMYVDQELDINRLSDYDVDHIVPQSFLKDDSIDNKVLTRSDKARGKSDNVPSEEVVKKMKNYWRQLLNAKLITQRKFDNLTKAERGGLSELDKAGFIKRQLVETRQITKHVAQILDSRMNTKYDENDKLIREVKVITLKSKLVSDFRKDFQFYKVREINNYHHAHDAYLNAVVGTALIKKYPKLESEFVYGDYKVYDVRKMIAKSEQEIGKATAKYFFYSNIMNFFKTEITLANGEIRKRPLIETNGETGEIVWDKGRDFATVRKVLSMPQVNIVKKTEVQTGGFSKESILPKRNSDKLIARKKDWDPKKYGGFDSPTVAYSVLVVAKVEKGKSKKLKSVKELLGITIMERSSFEKNPIDFLEAKGYKEVKKDLIIKLPKYSLFELENGRKRMLASAGELQKGNELALPSKYVNFLYLASHYEKLKGSPEDNEQKQLFVEQHKHYLDEIIEQISEFSKRVILADANLDKVLSAYNKHRDKPIREQAENIIHLFTLTNLGAPAAFKYFDTTIDRKRYTSTKEVLDATLIHQSITGLYETRIDLSQLGGDGGGGSEAAAKGGTLNIEDEYRLHETSKEPDVSLGSTWLSDFPQAWAETGGMGLAVRQAPLIIPLKATSTPVSIKQYPMSQEARLGIKPHIQRLLDQGILVPCQSPWNTPLLPVKKPGTNDYRPVQDLREVNKRVEDIHPTVPNPYNLLSGLPPSHQWYTVLDLKDAFFCLRLHPTSQPLFAFEWRDPEMGISGQLTWTRLPQGFKNSPTLFNEALHRDLAGFRIQHPDLILLQYVDDLLLAATSELDCQQGTRALLQTLGDLGYRASAKKAQICQKQVKYLGYLLKEGQRWLTEARKETVMGQPIPKTPRQLREFLGKAGFCRLFIPGFAEMAAPLYPLTKPGTLFNWGPDQQKAFQEIKQALLTAPALGLPDLTKPFELFVDEKQGYAKGVLTQKLGPWRRPVAYLSKKLDPVAAGWPPCLRMVAAIAVLTKDAGKLTMGQPLVILAPHAVEALVKQPPDRWLSNARMTHYQALLLDTDRVQFGPVVALNPATLLPLPEEGLQHDCLDILAEAHGTRSDLMDQPLPDADHTWYTDGSSFLQEGQRKAGAAVTTETEVIWARALPAGTSAQRAELIALTQALKMAEGKKLNVYTDSRYAFATAHIHGEIYRRRGWLTSEGKEIKNKDEILALLKALFLPKRLSIIHCPGHQKGNSAEARGNRMADQAAREVATRETPETSTLLAGKRTADGSEFEKRTADGSEFESPKKKAKVE

SEQ ID NO: 2364 - protein, 2090 aa, synthetic construct
MPAAKRVKLDGGDKKYSIGLDIGTNSVGWAVITDEYKVPSKKFKVLGNTDRHSIKKNLIGALLFDSGETAEATRLKRTARRRYTRRKNRICYLQEIFSNEMAKVDDSFFHRLEESFLVEEDKKHERHPIFGNIVDEVAYHEKYPTIYHLRKKLVDSTDKADLRLIYLALAHMIKFRGHFLIEGDLNPDNSDVDKLFIQLVQTYNQLFEENPINASGVDAKAILSARLSKSRRLENLIAQLPGEKKNGLFGNLIALSLGLTPNFKSNFDLAEDAKLQLSKDTYDDDLDNLLAQIGDQYADLFLAAKNLSDAILLSDILRVNTEITKAPLSASMIKRYDEHHQDLTLLKALVRQQLPEKYKEIFFDQSKNGYAGYIDGGASQEEFYKFIKPILEKMDGTEELLVKLNREDLLRKQRTFDNGSIPHQIHLGELHAILRRQEDFYPFLKDNREKIEKILTFRIPYYVGPLARGNSRFAWMTRKSEETITPWNFEEVVDKGASAQSFIERMTNFDKNLPNEKVLPKHSLLYEYFTVYNELTKVKYVTEGMRKPAFLSGEQKKAIVDLLFKTNRKVTVKQLKEDYFKKIECFDSVEISGVEDRFNASLGTYHDLLKIIKDKDFLDNEENEDILEDIVLTLTLFEDREMIEERLKTYAHLFDDKVMKQLKRRRYTGWGRLSRKLINGIRDKQSGKTILDFLKSDGFANRNFMQLIHDDSLTFKEDIQKAQVSGQGDSLHEHIANLAGSPAIKKGILQTVKVVDELVKVMGRHKPENIVIEMARENQTTQKGQKNSRERMKRIEEGIKELGSQILKEHPVENTQLQNEKLYLYYLQNGRDMYVDQELDINRLSDYDVDHIVPQSFLKDDSIDNKVLTRSDKARGKSDNVPSEEVVKKMKNYWRQLLNAKLITQRKFDNLTKAERGGLSELDKAGFIKRQLVETRQITKHVAQILDSRMNTKYDENDKLIREVKVITLKSKLVSDFRKDFQFYKVREINNYHHAHDAYLNAVVGTALIKKYPKLESEFVYGDYKVYDVRKMIAKSEQEIGKATAKYFFYSNIMNFFKTEITLANGEIRKRPLIETNGETGEIVWDKGRDFATVRKVLSMPQVNIVKKTEVQTGGFSKESILPKRNSDKLIARKKDWDPKKYGGFDSPTVAYSVLVVAKVEKGKSKKLKSVKELLGITIMERSSFEKNPIDFLEAKGYKEVKKDLIIKLPKYSLFELENGRKRMLASAGELQKGNELALPSKYVNFLYLASHYEKLKGSPEDNEQKQLFVEQHKHYLDEIIEQISEFSKRVILADANLDKVLSAYNKHRDKPIREQAENIIHLFTLTNLGAPAAFKYFDTTIDRKRYTSTKEVLDATLIHQSITGLYETRIDLSQLGGDGGPAPAPGGTLNIEDEYRLHETSKEPDVSLGSTWLSDFPQAWAETGGMGLAVRQAPLIIPLKATSTPVSIKQYPMSQEARLGIKPHIQRLLDQGILVPCQSPWNTPLLPVKKPGTNDYRPVQDLREVNKRVEDIHPTVPNPYNLLSGLPPSHQWYTVLDLKDAFFCLRLHPTSQPLFAFEWRDPEMGISGQLTWTRLPQGFKNSPTLFNEALHRDLAGFRIQHPDLILLQYVDDLLLAATSELDCQQGTRALLQTLGDLGYRASAKKAQICQKQVKYLGYLLKEGQRWLTEARKETVMGQPIPKTPRQLREFLGKAGFCRLFIPGFAEMAAPLYPLTKPGTLFNWGPDQQKAFQEIKQALLTAPALGLPDLTKPFELFVDEKQGYAKGVLTQKLGPWRRPVAYLSKKLDPVAAGWPPCLRMVAAIAVLTKDAGKLTMGQPLVILAPHAVEALVKQPPDRWLSNARMTHYQALLLDTDRVQFGPVVALNPATLLPLPEEGLQHDCLDILAEAHGTRSDLMDQPLPDADHTWYTDGSSFLQEGQRKAGAAVTTETEVIWARALPAGTSAQRAELIALTQALKMAEGKKLNVYTDSRYAFATAHIHGEIYRRRGWLTSEGKEIKNKDEILALLKALFLPKRLSIIHCPGHQKGNSAEARGNRMADQAAREVATRETPETSTLLAGKRTADGSEFEKRTADGSEFESPKKKAKVE

SEQ ID NO: 2365 - protein, 2094 aa, synthetic construct
MPAAKRVKLDGGDKKYSIGLDIGTNSVGWAVITDEYKVPSKKFKVLGNTDRHSIKKNLIGALLFDSGETAEATRLKRTARRRYTRRKNRICYLQEIFSNEMAKVDDSFFHRLEESFLVEEDKKHERHPIFGNIVDEVAYHEKYPTIYHLRKKLVDSTDKADLRLIYLALAHMIKFRGHFLIEGDLNPDNSDVDKLFIQLVQTYNQLFEENPINASGVDAKAILSARLSKSRRLENLIAQLPGEKKNGLFGNLIALSLGLTPNFKSNFDLAEDAKLQLSKDTYDDDLDNLLAQIGDQYADLFLAAKNLSDAILLSDILRVNTEITKAPLSASMIKRYDEHHQDLTLLKALVRQQLPEKYKEIFFDQSKNGYAGYIDGGASQEEFYKFIKPILEKMDGTEELLVKLNREDLLRKQRTFDNGSIPHQIHLGELHAILRRQEDFYPFLKDNREKIEKILTFRIPYYVGPLARGNSRFAWMTRKSEETITPWNFEEVVDKGASAQSFIERMTNFDKNLPNEKVLPKHSLLYEYFTVYNELTKVKYVTEGMRKPAFLSGEQKKAIVDLLFKTNRKVTVKQLKEDYFKKIECFDSVEISGVEDRFNASLGTYHDLLKIIKDKDFLDNEENEDILEDIVLTLTLFEDREMIEERLKTYAHLFDDKVMKQLKRRRYTGWGRLSRKLINGIRDKQSGKTILDFLKSDGFANRNFMQLIHDDSLTFKEDIQKAQVSGQGDSLHEHIANLAGSPAIKKGILQTVKVVDELVKVMGRHKPENIVIEMARENQTTQKGQKNSRERMKRIEEGIKELGSQILKEHPVENTQLQNEKLYLYYLQNGRDMYVDQELDINRLSDYDVDHIVPQSFLKDDSIDNKVLTRSDKARGKSDNVPSEEVVKKMKNYWRQLLNAKLITQRKFDNLTKAERGGLSELDKAGFIKRQLVETRQITKHVAQILDSRMNTKYDENDKLIREVKVITLKSKLVSDFRKDFQFYKVREINNYHHAHDAYLNAVVGTALIKKYPKLESEFVYGDYKVYDVRKMIAKSEQEIGKATAKYFFYSNIMNFFKTEITLANGEIRKRPLIETNGETGEIVWDKGRDFATVRKVLSMPQVNIVKKTEVQTGGFSKESILPKRNSDKLIARKKDWDPKKYGGFDSPTVAYSVLVVAKVEKGKSKKLKSVKELLGITIMERSSFEKNPIDFLEAKGYKEVKKDLIIKLPKYSLFELENGRKRMLASAGELQKGNELALPSKYVNFLYLASHYEKLKGSPEDNEQKQLFVEQHKHYLDEIIEQISEFSKRVILADANLDKVLSAYNKHRDKPIREQAENIIHLFTLTNLGAPAAFKYFDTTIDRKRYTSTKEVLDATLIHQSITGLYETRIDLSQLGGDGGGGSPAPGGGGGTLNIEDEYRLHETSKEPDVSLGSTWLSDFPQAWAETGGMGLAVRQAPLIIPLKATSTPVSIKQYPMSQEARLGIKPHIQRLLDQGILVPCQSPWNTPLLPVKKPGTNDYRPVQDLREVNKRVEDIHPTVPNPYNLLSGLPPSHQWYTVLDLKDAFFCLRLHPTSQPLFAFEWRDPEMGISGQLTWTRLPQGFKNSPTLFNEALHRDLAGFRIQHPDLILLQYVDDLLLAATSELDCQQGTRALLQTLGDLGYRASAKKAQICQKQVKYLGYLLKEGQRWLTEARKETVMGQPIPKTPRQLREFLGKAGFCRLFIPGFAEMAAPLYPLTKPGTLFNWGPDQQKAFQEIKQALLTAPALGLPDLTKPFELFVDEKQGYAKGVLTQKLGPWRRPVAYLSKKLDPVAAGWPPCLRMVAAIAVLTKDAGKLTMGQPLVILAPHAVEALVKQPPDRWLSNARMTHYQALLLDTDRVQFGPVVALNPATLLPLPEEGLQHDCLDILAEAHGTRSDLMDQPLPDADHTWYTDGSSFLQEGQRKAGAAVTTETEVIWARALPAGTSAQRAELIALTQALKMAEGKKLNVYTDSRYAFATAHIHGEIYRRRGWLTSEGKEIKNKDEILALLKALFLPKRLSIIHCPGHQKGNSAEARGNRMADQAAREVATRETPETSTLLAGKRTADGSEFEKRTADGSEFESPKKKAKVE

SEQ ID NO: 2366 - protein, 2091 aa, synthetic construct
MPAAKRVKLDGGDKKYSIGLDIGTNSVGWAVITDEYKVPSKKFKVLGNTDRHSIKKNLIGALLFDSGETAEATRLKRTARRRYTRRKNRICYLQEIFSNEMAKVDDSFFHRLEESFLVEEDKKHERHPIFGNIVDEVAYHEKYPTIYHLRKKLVDSTDKADLRLIYLALAHMIKFRGHFLIEGDLNPDNSDVDKLFIQLVQTYNQLFEENPINASGVDAKAILSARLSKSRRLENLIAQLPGEKKNGLFGNLIALSLGLTPNFKSNFDLAEDAKLQLSKDTYDDDLDNLLAQIGDQYADLFLAAKNLSDAILLSDILRVNTEITKAPLSASMIKRYDEHHQDLTLLKALVRQQLPEKYKEIFFDQSKNGYAGYIDGGASQEEFYKFIKPILEKMDGTEELLVKLNREDLLRKQRTFDNGSIPHQIHLGELHAILRRQEDFYPFLKDNREKIEKILTFRIPYYVGPLARGNSRFAWMTRKSEETITPWNFEEVVDKGASAQSFIERMTNFDKNLPNEKVLPKHSLLYEYFTVYNELTKVKYVTEGMRKPAFLSGEQKKAIVDLLFKTNRKVTVKQLKEDYFKKIECFDSVEISGVEDRFNASLGTYHDLLKIIKDKDFLDNEENEDILEDIVLTLTLFEDREMIEERLKTYAHLFDDKVMKQLKRRRYTGWGRLSRKLINGIRDKQSGKTILDFLKSDGFANRNFMQLIHDDSLTFKEDIQKAQVSGQGDSLHEHIANLAGSPAIKKGILQTVKVVDELVKVMGRHKPENIVIEMARENQTTQKGQKNSRERMKRIEEGIKELGSQILKEHPVENTQLQNEKLYLYYLQNGRDMYVDQELDINRLSDYDVDHIVPQSFLKDDSIDNKVLTRSDKARGKSDNVPSEEVVKKMKNYWRQLLNAKLITQRKFDNLTKAERGGLSELDKAGFIKRQLVETRQITKHVAQILDSRMNTKYDENDKLIREVKVITLKSKLVSDFRKDFQFYKVREINNYHHAHDAYLNAVVGTALIKKYPKLESEFVYGDYKVYDVRKMIAKSEQEIGKATAKYFFYSNIMNFFKTEITLANGEIRKRPLIETNGETGEIVWDKGRDFATVRKVLSMPQVNIVKKTEVQTGGFSKESILPKRNSDKLIARKKDWDPKKYGGFDSPTVAYSVLVVAKVEKGKSKKLKSVKELLGITIMERSSFEKNPIDFLEAKGYKEVKKDLIIKLPKYSLFELENGRKRMLASAGELQKGNELALPSKYVNFLYLASHYEKLKGSPEDNEQKQLFVEQHKHYLDEIIEQISEFSKRVILADANLDKVLSAYNKHRDKPIREQAENIIHLFTLTNLGAPAAFKYFDTTIDRKRYTSTKEVLDATLIHQSITGLYETRIDLSQLGGDGGGSSPAPGGTLNIEDEYRLHETSKEPDVSLGSTWLSDFPQAWAETGGMGLAVRQAPLIIPLKATSTPVSIKQYPMSQEARLGIKPHIQRLLDQGILVPCQSPWNTPLLPVKKPGTNDYRPVQDLREVNKRVEDIHPTVPNPYNLLSGLPPSHQWYTVLDLKDAFFCLRLHPTSQPLFAFEWRDPEMGISGQLTWTRLPQGFKNSPTLFNEALHRDLAGFRIQHPDLILLQYVDDLLLAATSELDCQQGTRALLQTLGDLGYRASAKKAQICQKQVKYLGYLLKEGQRWLTEARKETVMGQPIPKTPRQLREFLGKAGFCRLFIPGFAEMAAPLYPLTKPGTLFNWGPDQQKAFQEIKQALLTAPALGLPDLTKPFELFVDEKQGYAKGVLTQKLGPWRRPVAYLSKKLDPVAAGWPPCLRMVAAIAVLTKDAGKLTMGQPLVILAPHAVEALVKQPPDRWLSNARMTHYQALLLDTDRVQFGPVVALNPATLLPLPEEGLQHDCLDILAEAHGTRSDLMDQPLPDADHTWYTDGSSFLQEGQRKAGAAVTTETEVIWARALPAGTSAQRAELIALTQALKMAEGKKLNVYTDSRYAFATAHIHGEIYRRRGWLTSEGKEIKNKDEILALLKALFLPKRLSIIHCPGHQKGNSAEARGNRMADQAAREVATRETPETSTLLAGKRTADGSEFEKRTADGSEFESPKKKAKVE

SEQ ID NO: 2367 - protein, 2096 aa, synthetic construct
MPAAKRVKLDGGDKKYSIGLDIGTNSVGWAVITDEYKVPSKKFKVLGNTDRHSIKKNLIGALLFDSGETAEATRLKRTARRRYTRRKNRICYLQEIFSNEMAKVDDSFFHRLEESFLVEEDKKHERHPIFGNIVDEVAYHEKYPTIYHLRKKLVDSTDKADLRLIYLALAHMIKFRGHFLIEGDLNPDNSDVDKLFIQLVQTYNQLFEENPINASGVDAKAILSARLSKSRRLENLIAQLPGEKKNGLFGNLIALSLGLTPNFKSNFDLAEDAKLQLSKDTYDDDLDNLLAQIGDQYADLFLAAKNLSDAILLSDILRVNTEITKAPLSASMIKRYDEHHQDLTLLKALVRQQLPEKYKEIFFDQSKNGYAGYIDGGASQEEFYKFIKPILEKMDGTEELLVKLNREDLLRKQRTFDNGSIPHQIHLGELHAILRRQEDFYPFLKDNREKIEKILTFRIPYYVGPLARGNSRFAWMTRKSEETITPWNFEEVVDKGASAQSFIERMTNFDKNLPNEKVLPKHSLLYEYFTVYNELTKVKYVTEGMRKPAFLSGEQKKAIVDLLFKTNRKVTVKQLKEDYFKKIECFDSVEISGVEDRFNASLGTYHDLLKIIKDKDFLDNEENEDILEDIVLTLTLFEDREMIEERLKTYAHLFDDKVMKQLKRRRYTGWGRLSRKLINGIRDKQSGKTILDFLKSDGFANRNFMQLIHDDSLTFKEDIQKAQVSGQGDSLHEHIANLAGSPAIKKGILQTVKVVDELVKVMGRHKPENIVIEMARENQTTQKGQKNSRERMKRIEEGIKELGSQILKEHPVENTQLQNEKLYLYYLQNGRDMYVDQELDINRLSDYDVDHIVPQSFLKDDSIDNKVLTRSDKARGKSDNVPSEEVVKKMKNYWRQLLNAKLITQRKFDNLTKAERGGLSELDKAGFIKRQLVETRQITKHVAQILDSRMNTKYDENDKLIREVKVITLKSKLVSDFRKDFQFYKVREINNYHHAHDAYLNAVVGTALIKKYPKLESEFVYGDYKVYDVRKMIAKSEQEIGKATAKYFFYSNIMNFFKTEITLANGEIRKRPLIETNGETGEIVWDKGRDFATVRKVLSMPQVNIVKKTEVQTGGFSKESILPKRNSDKLIARKKDWDPKKYGGFDSPTVAYSVLVVAKVEKGKSKKLKSVKELLGITIMERSSFEKNPIDFLEAKGYKEVKKDLIIKLPKYSLFELENGRKRMLASAGELQKGNELALPSKYVNFLYLASHYEKLKGSPEDNEQKQLFVEQHKHYLDEIIEQISEFSKRVILADANLDKVLSAYNKHRDKPIREQAENIIHLFTLTNLGAPAAFKYFDTTIDRKRYTSTKEVLDATLIHQSITGLYETRIDLSQLGGDGGEAAAKGSSGGGGGTLNIEDEYRLHETSKEPDVSLGSTWLSDFPQAWAETGGMGLAVRQAPLIIPLKATSTPVSIKQYPMSQEARLGIKPHIQRLLDQGILVPCQSPWNTPLLPVKKPGTNDYRPVQDLREVNKRVEDIHPTVPNPYNLLSGLPPSHQWYTVLDLKDAFFCLRLHPTSQPLFAFEWRDPEMGISGQLTWTRLPQGFKNSPTLFNEALHRDLAGFRIQHPDLILLQYVDDLLLAATSELDCQQGTRALLQTLGDLGYRASAKKAQICQKQVKYLGYLLKEGQRWLTEARKETVMGQPIPKTPRQLREFLGKAGFCRLFIPGFAEMAAPLYPLTKPGTLFNWGPDQQKAFQEIKQALLTAPALGLPDLTKPFELFVDEKQGYAKGVLTQKLGPWRRPVAYLSKKLDPVAAGWPPCLRMVAAIAVLTKDAGKLTMGQPLVILAPHAVEALVKQPPDRWLSNARMTHYQALLLDTDRVQFGPVVALNPATLLPLPEEGLQHDCLDILAEAHGTRSDLMDQPLPDADHTWYTDGSSFLQEGQRKAGAAVTTETEVIWARALPAGTSAQRAELIALTQALKMAEGKKLNVYTDSRYAFATAHIHGEIYRRRGWLTSEGKEIKNKDEILALLKALFLPKRLSIIHCPGHQKGNSAEARGNRMADQAAREVATRETPETSTLLAGKRTADGSEFEKRTADGSEFESPKKKAKVE

SEQ ID NO: 2368 - protein, 2096 aa, synthetic construct
MPAAKRVKLDGGDKKYSIGLDIGTNSVGWAVITDEYKVPSKKFKVLGNTDRHSIKKNLIGALLFDSGETAEATRLKRTARRRYTRRKNRICYLQEIFSNEMAKVDDSFFHRLEESFLVEEDKKHERHPIFGNIVDEVAYHEKYPTIYHLRKKLVDSTDKADLRLIYLALAHMIKFRGHFLIEGDLNPDNSDVDKLFIQLVQTYNQLFEENPINASGVDAKAILSARLSKSRRLENLIAQLPGEKKNGLFGNLIALSLGLTPNFKSNFDLAEDAKLQLSKDTYDDDLDNLLAQIGDQYADLFLAAKNLSDAILLSDILRVNTEITKAPLSASMIKRYDEHHQDLTLLKALVRQQLPEKYKEIFFDQSKNGYAGYIDGGASQEEFYKFIKPILEKMDGTEELLVKLNREDLLRKQRTFDNGSIPHQIHLGELHAILRRQEDFYPFLKDNREKIEKILTFRIPYYVGPLARGNSRFAWMTRKSEETITPWNFEEVVDKGASAQSFIERMTNFDKNLPNEKVLPKHSLLYEYFTVYNELTKVKYVTEGMRKPAFLSGEQKKAIVDLLFKTNRKVTVKQLKEDYFKKIECFDSVEISGVEDRFNASLGTYHDLLKIIKDKDFLDNEENEDILEDIVLTLTLFEDREMIEERLKTYAHLFDDKVMKQLKRRRYTGWGRLSRKLINGIRDKQSGKTILDFLKSDGFANRNFMQLIHDDSLTFKEDIQKAQVSGQGDSLHEHIANLAGSPAIKKGILQTVKVVDELVKVMGRHKPENIVIEMARENQTTQKGQKNSRERMKRIEEGIKELGSQILKEHPVENTQLQNEKLYLYYLQNGRDMYVDQELDINRLSDYDVDHIVPQSFLKDDSIDNKVLTRSDKARGKSDNVPSEEVVKKMKNYWRQLLNAKLITQRKFDNLTKAERGGLSELDKAGFIKRQLVETRQITKHVAQILDSRMNTKYDENDKLIREVKVITLKSKLVSDFRKDFQFYKVREINNYHHAHDAYLNAVVGTALIKKYPKLESEFVYGDYKVYDVRKMIAKSEQEIGKATAKYFFYSNIMNFFKTEITLANGEIRKRPLIETNGETGEIVWDKGRDFATVRKVLSMPQVNIVKKTEVQTGGFSKESILPKRNSDKLIARKKDWDPKKYGGFDSPTVAYSVLVVAKVEKGKSKKLKSVKELLGITIMERSSFEKNPIDFLEAKGYKEVKKDLIIKLPKYSLFELENGRKRMLASAGELQKGNELALPSKYVNFLYLASHYEKLKGSPEDNEQKQLFVEQHKHYLDEIIEQISEFSKRVILADANLDKVLSAYNKHRDKPIREQAENIIHLFTLTNLGAPAAFKYFDTTIDRKRYTSTKEVLDATLIHQSITGLYETRIDLSQLGGDGGEAAAKGSSGGSGGTLNIEDEYRLHETSKEPDVSLGSTWLSDFPQAWAETGGMGLAVRQAPLIIPLKATSTPVSIKQYPMSQEARLGIKPHIQRLLDQGILVPCQSPWNTPLLPVKKPGTNDYRPVQDLREVNKRVEDIHPTVPNPYNLLSGLPPSHQWYTVLDLKDAFFCLRLHPTSQPLFAFEWRDPEMGISGQLTWTRLPQGFKNSPTLFNEALHRDLAGFRIQHPDLILLQYVDDLLLAATSELDCQQGTRALLQTLGDLGYRASAKKAQICQKQVKYLGYLLKEGQRWLTEARKETVMGQPIPKTPRQLREFLGKAGFCRLFIPGFAEMAAPLYPLTKPGTLFNWGPDQQKAFQEIKQALLTAPALGLPDLTKPFELFVDEKQGYAKGVLTQKLGPWRRPVAYLSKKLDPVAAGWPPCLRMVAAIAVLTKDAGKLTMGQPLVILAPHAVEALVKQPPDRWLSNARMTHYQALLLDTDRVQFGPVVALNPATLLPLPEEGLQHDCLDILAEAHGTRSDLMDQPLPDADHTWYTDGSSFLQEGQRKAGAAVTTETEVIWARALPAGTSAQRAELIALTQALKMAEGKKLNVYTDSRYAFATAHIHGEIYRRRGWLTSEGKEIKNKDEILALLKALFLPKRLSIIHCPGHQKGNSAEARGNRMADQAAREVATRETPETSTLLAGKRTADGSEFEKRTADGSEFESPKKKAKVE

SEQ ID NO: 2369 - protein, 2095 aa, synthetic construct
MPAAKRVKLDGGDKKYSIGLDIGTNSVGWAVITDEYKVPSKKFKVLGNTDRHSIKKNLIGALLFDSGETAEATRLKRTARRRYTRRKNRICYLQEIFSNEMAKVDDSFFHRLEESFLVEEDKKHERHPIFGNIVDEVAYHEKYPTIYHLRKKLVDSTDKADLRLIYLALAHMIKFRGHFLIEGDLNPDNSDVDKLFIQLVQTYNQLFEENPINASGVDAKAILSARLSKSRRLENLIAQLPGEKKNGLFGNLIALSLGLTPNFKSNFDLAEDAKLQLSKDTYDDDLDNLLAQIGDQYADLFLAAKNLSDAILLSDILRVNTEITKAPLSASMIKRYDEHHQDLTLLKALVRQQLPEKYKEIFFDQSKNGYAGYIDGGASQEEFYKFIKPILEKMDGTEELLVKLNREDLLRKQRTFDNGSIPHQIHLGELHAILRRQEDFYPFLKDNREKIEKILTFRIPYYVGPLARGNSRFAWMTRKSEETITPWNFEEVVDKGASAQSFIERMTNFDKNLPNEKVLPKHSLLYEYFTVYNELTKVKYVTEGMRKPAFLSGEQKKAIVDLLFKTNRKVTVKQLKEDYFKKIECFDSVEISGVEDRFNASLGTYHDLLKIIKDKDFLDNEENEDILEDIVLTLTLFEDREMIEERLKTYAHLFDDKVMKQLKRRRYTGWGRLSRKLINGIRDKQSGKTILDFLKSDGFANRNFMQLIHDDSLTFKEDIQKAQVSGQGDSLHEHIANLAGSPAIKKGILQTVKVVDELVKVMGRHKPENIVIEMARENQTTQKGQKNSRERMKRIEEGIKELGSQILKEHPVENTQLQNEKLYLYYLQNGRDMYVDQELDINRLSDYDVDHIVPQSFLKDDSIDNKVLTRSDKARGKSDNVPSEEVVKKMKNYWRQLLNAKLITQRKFDNLTKAERGGLSELDKAGFIKRQLVETRQITKHVAQILDSRMNTKYDENDKLIREVKVITLKSKLVSDFRKDFQFYKVREINNYHHAHDAYLNAVVGTALIKKYPKLESEFVYGDYKVYDVRKMIAKSEQEIGKATAKYFFYSNIMNFFKTEITLANGEIRKRPLIETNGETGEIVWDKGRDFATVRKVLSMPQVNIVKKTEVQTGGFSKESILPKRNSDKLIARKKDWDPKKYGGFDSPTVAYSVLVVAKVEKGKSKKLKSVKELLGITIMERSSFEKNPIDFLEAKGYKEVKKDLIIKLPKYSLFELENGRKRMLASAGELQKGNELALPSKYVNFLYLASHYEKLKGSPEDNEQKQLFVEQHKHYLDEIIEQISEFSKRVILADANLDKVLSAYNKHRDKPIREQAENIIHLFTLTNLGAPAAFKYFDTTIDRKRYTSTKEVLDATLIHQSITGLYETRIDLSQLGGDGGGGGGSGGGGSGGTLNIEDEYRLHETSKEPDVSLGSTWLSDFPQAWAETGGMGLAVRQAPLIIPLKATSTPVSIKQYPMSQEARLGIKPHIQRLLDQGILVPCQSPWNTPLLPVKKPGTNDYRPVQDLREVNKRVEDIHPTVPNPYNLLSGLPPSHQWYTVLDLKDAFFCLRLHPTSQPLFAFEWRDPEMGISGQLTWTRLPQGFKNSPTLFNEALHRDLAGFRIQHPDLILLQYVDDLLLAATSELDCQQGTRALLQTLGDLGYRASAKKAQICQKQVKYLGYLLKEGQRWLTEARKETVMGQPIPKTPRQLREFLGKAGFCRLFIPGFAEMAAPLYPLTKPGTLFNWGPDQQKAFQEIKQALLTAPALGLPDLTKPFELFVDEKQGYAKGVLTQKLGPWRRPVAYLSKKLDPVAAGWPPCLRMVAAIAVLTKDAGKLTMGQPLVILAPHAVEALVKQPPDRWLSNARMTHYQALLLDTDRVQFGPVVALNPATLLPLPEEGLQHDCLDILAEAHGTRSDLMDQPLPDADHTWYTDGSSFLQEGQRKAGAAVTTETEVIWARALPAGTSAQRAELIALTQALKMAEGKKLNVYTDSRYAFATAHIHGEIYRRRGWLTSEGKEIKNKDEILALLKALFLPKRLSIIHCPGHQKGNSAEARGNRMADQAAREVATRETPETSTLLAGKRTADGSEFEKRTADGSEFESPKKKAKVE

SEQ ID NO: 2370 - protein, 2096 aa, synthetic construct
MPAAKRVKLDGGDKKYSIGLDIGTNSVGWAVITDEYKVPSKKFKVLGNTDRHSIKKNLIGALLFDSGETAEATRLKRTARRRYTRRKNRICYLQEIFSNEMAKVDDSFFHRLEESFLVEEDKKHERHPIFGNIVDEVAYHEKYPTIYHLRKKLVDSTDKADLRLIYLALAHMIKFRGHFLIEGDLNPDNSDVDKLFIQLVQTYNQLFEENPINASGVDAKAILSARLSKSRRLENLIAQLPGEKKNGLFGNLIALSLGLTPNFKSNFDLAEDAKLQLSKDTYDDDLDNLLAQIGDQYADLFLAAKNLSDAILLSDILRVNTEITKAPLSASMIKRYDEHHQDLTLLKALVRQQLPEKYKEIFFDQSKNGYAGYIDGGASQEEFYKFIKPILEKMDGTEELLVKLNREDLLRKQRTFDNGSIPHQIHLGELHAILRRQEDFYPFLKDNREKIEKILTFRIPYYVGPLARGNSRFAWMTRKSEETITPWNFEEVVDKGASAQSFIERMTNFDKNLPNEKVLPKHSLLYEYFTVYNELTKVKYVTEGMRKPAFLSGEQKKAIVDLLFKTNRKVTVKQLKEDYFKKIECFDSVEISGVEDRFNASLGTYHDLLKIIKDKDFLDNEENEDILEDIVLTLTLFEDREMIEERLKTYAHLFDDKVMKQLKRRRYTGWGRLSRKLINGIRDKQSGKTILDFLKSDGFANRNFMQLIHDDSLTFKEDIQKAQVSGQGDSLHEHIANLAGSPAIKKGILQTVKVVDELVKVMGRHKPENIVIEMARENQTTQKGQKNSRERMKRIEEGIKELGSQILKEHPVENTQLQNEKLYLYYLQNGRDMYVDQELDINRLSDYDVDHIVPQSFLKDDSIDNKVLTRSDKARGKSDNVPSEEVVKKMKNYWRQLLNAKLITQRKFDNLTKAERGGLSELDKAGFIKRQLVETRQITKHVAQILDSRMNTKYDENDKLIREVKVITLKSKLVSDFRKDFQFYKVREINNYHHAHDAYLNAVVGTALIKKYPKLESEFVYGDYKVYDVRKMIAKSEQEIGKATAKYFFYSNIMNFFKTEITLANGEIRKRPLIETNGETGEIVWDKGRDFATVRKVLSMPQVNIVKKTEVQTGGFSKESILPKRNSDKLIARKKDWDPKKYGGFDSPTVAYSVLVVAKVEKGKSKKLKSVKELLGITIMERSSFEKNPIDFLEAKGYKEVKKDLIIKLPKYSLFELENGRKRMLASAGELQKGNELALPSKYVNFLYLASHYEKLKGSPEDNEQKQLFVEQHKHYLDEIIEQISEFSKRVILADANLDKVLSAYNKHRDKPIREQAENIIHLFTLTNLGAPAAFKYFDTTIDRKRYTSTKEVLDATLIHQSITGLYETRIDLSQLGGDGGEAAAKGGSGSSGGTLNIEDEYRLHETSKEPDVSLGSTWLSDFPQAWAETGGMGLAVRQAPLIIPLKATSTPVSIKQYPMSQEARLGIKPHIQRLLDQGILVPCQSPWNTPLLPVKKPGTNDYRPVQDLREVNKRVEDIHPTVPNPYNLLSGLPPSHQWYTVLDLKDAFFCLRLHPTSQPLFAFEWRDPEMGISGQLTWTRLPQGFKNSPTLFNEALHRDLAGFRIQHPDLILLQYVDDLLLAATSELDCQQGTRALLQTLGDLGYRASAKKAQICQKQVKYLGYLLKEGQRWLTEARKETVMGQPIPKTPRQLREFLGKAGFCRLFIPGFAEMAAPLYPLTKPGTLFNWGPDQQKAFQEIKQALLTAPALGLPDLTKPFELFVDEKQGYAKGVLTQKLGPWRRPVAYLSKKLDPVAAGWPPCLRMVAAIAVLTKDAGKLTMGQPLVILAPHAVEALVKQPPDRWLSNARMTHYQALLLDTDRVQFGPVVALNPATLLPLPEEGLQHDCLDILAEAHGTRSDLMDQPLPDADHTWYTDGSSFLQEGQRKAGAAVTTETEVIWARALPAGTSAQRAELIALTQALKMAEGKKLNVYTDSRYAFATAHIHGEIYRRRGWLTSEGKEIKNKDEILALLKALFLPKRLSIIHCPGHQKGNSAEARGNRMADQAAREVATRETPETSTLLAGKRTADGSEFEKRTADGSEFESPKKKAKVE

SEQ ID NO: 2371 - protein, 2094 aa, synthetic construct
MPAAKRVKLDGGDKKYSIGLDIGTNSVGWAVITDEYKVPSKKFKVLGNTDRHSIKKNLIGALLFDSGETAEATRLKRTARRRYTRRKNRICYLQEIFSNEMAKVDDSFFHRLEESFLVEEDKKHERHPIFGNIVDEVAYHEKYPTIYHLRKKLVDSTDKADLRLIYLALAHMIKFRGHFLIEGDLNPDNSDVDKLFIQLVQTYNQLFEENPINASGVDAKAILSARLSKSRRLENLIAQLPGEKKNGLFGNLIALSLGLTPNFKSNFDLAEDAKLQLSKDTYDDDLDNLLAQIGDQYADLFLAAKNLSDAILLSDILRVNTEITKAPLSASMIKRYDEHHQDLTLLKALVRQQLPEKYKEIFFDQSKNGYAGYIDGGASQEEFYKFIKPILEKMDGTEELLVKLNREDLLRKQRTFDNGSIPHQIHLGELHAILRRQEDFYPFLKDNREKIEKILTFRIPYYVGPLARGNSRFAWMTRKSEETITPWNFEEVVDKGASAQSFIERMTNFDKNLPNEKVLPKHSLLYEYFTVYNELTKVKYVTEGMRKPAFLSGEQKKAIVDLLFKTNRKVTVKQLKEDYFKKIECFDSVEISGVEDRFNASLGTYHDLLKIIKDKDFLDNEENEDILEDIVLTLTLFEDREMIEERLKTYAHLFDDKVMKQLKRRRYTGWGRLSRKLINGIRDKQSGKTILDFLKSDGFANRNFMQLIHDDSLTFKEDIQKAQVSGQGDSLHEHIANLAGSPAIKKGILQTVKVVDELVKVMGRHKPENIVIEMARENQTTQKGQKNSRERMKRIEEGIKELGSQILKEHPVENTQLQNEKLYLYYLQNGRDMYVDQELDINRLSDYDVDHIVPQSFLKDDSIDNKVLTRSDKARGKSDNVPSEEVVKKMKNYWRQLLNAKLITQRKFDNLTKAERGGLSELDKAGFIKRQLVETRQITKHVAQILDSRMNTKYDENDKLIREVKVITLKSKLVSDFRKDFQFYKVREINNYHHAHDAYLNAVVGTALIKKYPKLESEFVYGDYKVYDVRKMIAKSEQEIGKATAKYFFYSNIMNFFKTEITLANGEIRKRPLIETNGETGEIVWDKGRDFATVRKVLSMPQVNIVKKTEVQTGGFSKESILPKRNSDKLIARKKDWDPKKYGGFDSPTVAYSVLVVAKVEKGKSKKLKSVKELLGITIMERSSFEKNPIDFLEAKGYKEVKKDLIIKLPKYSLFELENGRKRMLASAGELQKGNELALPSKYVNFLYLASHYEKLKGSPEDNEQKQLFVEQHKHYLDEIIEQISEFSKRVILADANLDKVLSAYNKHRDKPIREQAENIIHLFTLTNLGAPAAFKYFDTTIDRKRYTSTKEVLDATLIHQSITGLYETRIDLSQLGGDGGGGSGGGGSSGGTLNIEDEYRLHETSKEPDVSLGSTWLSDFPQAWAETGGMGLAVRQAPLIIPLKATSTPVSIKQYPMSQEARLGIKPHIQRLLDQGILVPCQSPWNTPLLPVKKPGTNDYRPVQDLREVNKRVEDIHPTVPNPYNLLSGLPPSHQWYTVLDLKDAFFCLRLHPTSQPLFAFEWRDPEMGISGQLTWTRLPQGFKNSPTLFNEALHRDLAGFRIQHPDLILLQYVDDLLLAATSELDCQQGTRALLQTLGDLGYRASAKKAQICQKQVKYLGYLLKEGQRWLTEARKETVMGQPIPKTPRQLREFLGKAGFCRLFIPGFAEMAAPLYPLTKPGTLFNWGPDQQKAFQEIKQALLTAPALGLPDLTKPFELFVDEKQGYAKGVLTQKLGPWRRPVAYLSKKLDPVAAGWPPCLRMVAAIAVLTKDAGKLTMGQPLVILAPHAVEALVKQPPDRWLSNARMTHYQALLLDTDRVQFGPVVALNPATLLPLPEEGLQHDCLDILAEAHGTRSDLMDQPLPDADHTWYTDGSSFLQEGQRKAGAAVTTETEVIWARALPAGTSAQRAELIALTQALKMAEGKKLNVYTDSRYAFATAHIHGEIYRRRGWLTSEGKEIKNKDEILALLKALFLPKRLSIIHCPGHQKGNSAEARGNRMADQAAREVATRETPETSTLLAGKRTADGSEFEKRTADGSEFESPKKKAKVE

SEQ ID NO: 2372 - protein, 2096 aa, synthetic construct
MPAAKRVKLDGGDKKYSIGLDIGTNSVGWAVITDEYKVPSKKFKVLGNTDRHSIKKNLIGALLFDSGETAEATRLKRTARRRYTRRKNRICYLQEIFSNEMAKVDDSFFHRLEESFLVEEDKKHERHPIFGNIVDEVAYHEKYPTIYHLRKKLVDSTDKADLRLIYLALAHMIKFRGHFLIEGDLNPDNSDVDKLFIQLVQTYNQLFEENPINASGVDAKAILSARLSKSRRLENLIAQLPGEKKNGLFGNLIALSLGLTPNFKSNFDLAEDAKLQLSKDTYDDDLDNLLAQIGDQYADLFLAAKNLSDAILLSDILRVNTEITKAPLSASMIKRYDEHHQDLTLLKALVRQQLPEKYKEIFFDQSKNGYAGYIDGGASQEEFYKFIKPILEKMDGTEELLVKLNREDLLRKQRTFDNGSIPHQIHLGELHAILRRQEDFYPFLKDNREKIEKILTFRIPYYVGPLARGNSRFAWMTRKSEETITPWNFEEVVDKGASAQSFIERMTNFDKNLPNEKVLPKHSLLYEYFTVYNELTKVKYVTEGMRKPAFLSGEQKKAIVDLLFKTNRKVTVKQLKEDYFKKIECFDSVEISGVEDRFNASLGTYHDLLKIIKDKDFLDNEENEDILEDIVLTLTLFEDREMIEERLKTYAHLFDDKVMKQLKRRRYTGWGRLSRKLINGIRDKQSGKTILDFLKSDGFANRNFMQLIHDDSLTFKEDIQKAQVSGQGDSLHEHIANLAGSPAIKKGILQTVKVVDELVKVMGRHKPENIVIEMARENQTTQKGQKNSRERMKRIEEGIKELGSQILKEHPVENTQLQNEKLYLYYLQNGRDMYVDQELDINRLSDYDVDHIVPQSFLKDDSIDNKVLTRSDKARGKSDNVPSEEVVKKMKNYWRQLLNAKLITQRKFDNLTKAERGGLSELDKAGFIKRQLVETRQITKHVAQILDSRMNTKYDENDKLIREVKVITLKSKLVSDFRKDFQFYKVREINNYHHAHDAYLNAVVGTALIKKYPKLESEFVYGDYKVYDVRKMIAKSEQEIGKATAKYFFYSNIMNFFKTEITLANGEIRKRPLIETNGETGEIVWDKGRDFATVRKVLSMPQVNIVKKTEVQTGGFSKESILPKRNSDKLIARKKDWDPKKYGGFDSPTVAYSVLVVAKVEKGKSKKLKSVKELLGITIMERSSFEKNPIDFLEAKGYKEVKKDLIIKLPKYSLFELENGRKRMLASAGELQKGNELALPSKYVNFLYLASHYEKLKGSPEDNEQKQLFVEQHKHYLDEIIEQISEFSKRVILADANLDKVLSAYNKHRDKPIREQAENIIHLFTLTNLGAPAAFKYFDTTIDRKRYTSTKEVLDATLIHQSITGLYETRIDLSQLGGDGGEAAAKGGSPAPGGTLNIEDEYRLHETSKEPDVSLGSTWLSDFPQAWAETGGMGLAVRQAPLIIPLKATSTPVSIKQYPMSQEARLGIKPHIQRLLDQGILVPCQSPWNTPLLPVKKPGTNDYRPVQDLREVNKRVEDIHPTVPNPYNLLSGLPPSHQWYTVLDLKDAFFCLRLHPTSQPLFAFEWRDPEMGISGQLTWTRLPQGFKNSPTLFNEALHRDLAGFRIQHPDLILLQYVDDLLLAATSELDCQQGTRALLQTLGDLGYRASAKKAQICQKQVKYLGYLLKEGQRWLTEARKETVMGQPIPKTPRQLREFLGKAGFCRLFIPGFAEMAAPLYPLTKPGTLFNWGPDQQKAFQEIKQALLTAPALGLPDLTKPFELFVDEKQGYAKGVLTQKLGPWRRPVAYLSKKLDPVAAGWPPCLRMVAAIAVLTKDAGKLTMGQPLVILAPHAVEALVKQPPDRWLSNARMTHYQALLLDTDRVQFGPVVALNPATLLPLPEEGLQHDCLDILAEAHGTRSDLMDQPLPDADHTWYTDGSSFLQEGQRKAGAAVTTETEVIWARALPAGTSAQRAELIALTQALKMAEGKKLNVYTDSRYAFATAHIHGEIYRRRGWLTSEGKEIKNKDEILALLKALFLPKRLSIIHCPGHQKGNSAEARGNRMADQAAREVATRETPETSTLLAGKRTADGSEFEKRTADGSEFESPKKKAKVE

SEQ ID NO: 2373 - protein, 2100 aa, synthetic construct
MPAAKRVKLDGGDKKYSIGLDIGTNSVGWAVITDEYKVPSKKFKVLGNTDRHSIKKNLIGALLFDSGETAEATRLKRTARRRYTRRKNRICYLQEIFSNEMAKVDDSFFHRLEESFLVEEDKKHERHPIFGNIVDEVAYHEKYPTIYHLRKKLVDSTDKADLRLIYLALAHMIKFRGHFLIEGDLNPDNSDVDKLFIQLVQTYNQLFEENPINASGVDAKAILSARLSKSRRLENLIAQLPGEKKNGLFGNLIALSLGLTPNFKSNFDLAEDAKLQLSKDTYDDDLDNLLAQIGDQYADLFLAAKNLSDAILLSDILRVNTEITKAPLSASMIKRYDEHHQDLTLLKALVRQQLPEKYKEIFFDQSKNGYAGYIDGGASQEEFYKFIKPILEKMDGTEELLVKLNREDLLRKQRTFDNGSIPHQIHLGELHAILRRQEDFYPFLKDNREKIEKILTFRIPYYVGPLARGNSRFAWMTRKSEETITPWNFEEVVDKGASAQSFIERMTNFDKNLPNEKVLPKHSLLYEYFTVYNELTKVKYVTEGMRKPAFLSGEQKKAIVDLLFKTNRKVTVKQLKEDYFKKIECFDSVEISGVEDRFNASLGTYHDLLKIIKDKDFLDNEENEDILEDIVLTLTLFEDREMIEERLKTYAHLFDDKVMKQLKRRRYTGWGRLSRKLINGIRDKQSGKTILDFLKSDGFANRNFMQLIHDDSLTFKEDIQKAQVSGQGDSLHEHIANLAGSPAIKKGILQTVKVVDELVKVMGRHKPENIVIEMARENQTTQKGQKNSRERMKRIEEGIKELGSQILKEHPVENTQLQNEKLYLYYLQNGRDMYVDQELDINRLSDYDVDHIVPQSFLKDDSIDNKVLTRSDKARGKSDNVPSEEVVKKMKNYWRQLLNAKLITQRKFDNLTKAERGGLSELDKAGFIKRQLVETRQITKHVAQILDSRMNTKYDENDKLIREVKVITLKSKLVSDFRKDFQFYKVREINNYHHAHDAYLNAVVGTALIKKYPKLESEFVYGDYKVYDVRKMIAKSEQEIGKATAKYFFYSNIMNFFKTEITLANGEIRKRPLIETNGETGEIVWDKGRDFATVRKVLSMPQVNIVKKTEVQTGGFSKESILPKRNSDKLIARKKDWDPKKYGGFDSPTVAYSVLVVAKVEKGKSKKLKSVKELLGITIMERSSFEKNPIDFLEAKGYKEVKKDLIIKLPKYSLFELENGRKRMLASAGELQKGNELALPSKYVNFLYLASHYEKLKGSPEDNEQKQLFVEQHKHYLDEIIEQISEFSKRVILADANLDKVLSAYNKHRDKPIREQAENIIHLFTLTNLGAPAAFKYFDTTIDRKRYTSTKEVLDATLIHQSITGLYETRIDLSQLGGDGGEAAAKEAAAKEAAAKGGTLNIEDEYRLHETSKEPDVSLGSTWLSDFPQAWAETGGMGLAVRQAPLIIPLKATSTPVSIKQYPMSQEARLGIKPHIQRLLDQGILVPCQSPWNTPLLPVKKPGTNDYRPVQDLREVNKRVEDIHPTVPNPYNLLSGLPPSHQWYTVLDLKDAFFCLRLHPTSQPLFAFEWRDPEMGISGQLTWTRLPQGFKNSPTLFNEALHRDLAGFRIQHPDLILLQYVDDLLLAATSELDCQQGTRALLQTLGDLGYRASAKKAQICQKQVKYLGYLLKEGQRWLTEARKETVMGQPIPKTPRQLREFLGKAGFCRLFIPGFAEMAAPLYPLTKPGTLFNWGPDQQKAFQEIKQALLTAPALGLPDLTKPFELFVDEKQGYAKGVLTQKLGPWRRPVAYLSKKLDPVAAGWPPCLRMVAAIAVLTKDAGKLTMGQPLVILAPHAVEALVKQPPDRWLSNARMTHYQALLLDTDRVQFGPVVALNPATLLPLPEEGLQHDCLDILAEAHGTRSDLMDQPLPDADHTWYTDGSSFLQEGQRKAGAAVTTETEVIWARALPAGTSAQRAELIALTQALKMAEGKKLNVYTDSRYAFATAHIHGEIYRRRGWLTSEGKEIKNKDEILALLKALFLPKRLSIIHCPGHQKGNSAEARGNRMADQAAREVATRETPETSTLLAGKRTADGSEFEKRTADGSEFESPKKKAKVE

SEQ ID NO: 2374 - protein, 2100 aa, synthetic construct
MPAAKRVKLDGGDKKYSIGLDIGTNSVGWAVITDEYKVPSKKFKVLGNTDRHSIKKNLIGALLFDSGETAEATRLKRTARRRYTRRKNRICYLQEIFSNEMAKVDDSFFHRLEESFLVEEDKKHERHPIFGNIVDEVAYHEKYPTIYHLRKKLVDSTDKADLRLIYLALAHMIKFRGHFLIEGDLNPDNSDVDKLFIQLVQTYNQLFEENPINASGVDAKAILSARLSKSRRLENLIAQLPGEKKNGLFGNLIALSLGLTPNFKSNFDLAEDAKLQLSKDTYDDDLDNLLAQIGDQYADLFLAAKNLSDAILLSDILRVNTEITKAPLSASMIKRYDEHHQDLTLLKALVRQQLPEKYKEIFFDQSKNGYAGYIDGGASQEEFYKFIKPILEKMDGTEELLVKLNREDLLRKQRTFDNGSIPHQIHLGELHAILRRQEDFYPFLKDNREKIEKILTFRIPYYVGPLARGNSRFAWMTRKSEETITPWNFEEVVDKGASAQSFIERMTNFDKNLPNEKVLPKHSLLYEYFTVYNELTKVKYVTEGMRKPAFLSGEQKKAIVDLLFKTNRKVTVKQLKEDYFKKIECFDSVEISGVEDRFNASLGTYHDLLKIIKDKDFLDNEENEDILEDIVLTLTLFEDREMIEERLKTYAHLFDDKVMKQLKRRRYTGWGRLSRKLINGIRDKQSGKTILDFLKSDGFANRNFMQLIHDDSLTFKEDIQKAQVSGQGDSLHEHIANLAGSPAIKKGILQTVKVVDELVKVMGRHKPENIVIEMARENQTTQKGQKNSRERMKRIEEGIKELGSQILKEHPVENTQLQNEKLYLYYLQNGRDMYVDQELDINRLSDYDVDHIVPQSFLKDDSIDNKVLTRSDKARGKSDNVPSEEVVKKMKNYWRQLLNAKLITQRKFDNLTKAERGGLSELDKAGFIKRQLVETRQITKHVAQILDSRMNTKYDENDKLIREVKVITLKSKLVSDFRKDFQFYKVREINNYHHAHDAYLNAVVGTALIKKYPKLESEFVYGDYKVYDVRKMIAKSEQEIGKATAKYFFYSNIMNFFKTEITLANGEIRKRPLIETNGETGEIVWDKGRDFATVRKVLSMPQVNIVKKTEVQTGGFSKESILPKRNSDKLIARKKDWDPKKYGGFDSPTVAYSVLVVAKVEKGKSKKLKSVKELLGITIMERSSFEKNPIDFLEAKGYKEVKKDLIIKLPKYSLFELENGRKRMLASAGELQKGNELALPSKYVNFLYLASHYEKLKGSPEDNEQKQLFVEQHKHYLDEIIEQISEFSKRVILADANLDKVLSAYNKHRDKPIREQAENIIHLFTLTNLGAPAAFKYFDTTIDRKRYTSTKEVLDATLIHQSITGLYETRIDLSQLGGDGGGGGGSEAAAKGGGGSGGTLNIEDEYRLHETSKEPDVSLGSTWLSDFPQAWAETGGMGLAVRQAPLIIPLKATSTPVSIKQYPMSQEARLGIKPHIQRLLDQGILVPCQSPWNTPLLPVKKPGTNDYRPVQDLREVNKRVEDIHPTVPNPYNLLSGLPPSHQWYTVLDLKDAFFCLRLHPTSQPLFAFEWRDPEMGISGQLTWTRLPQGFKNSPTLFNEALHRDLAGFRIQHPDLILLQYVDDLLLAATSELDCQQGTRALLQTLGDLGYRASAKKAQICQKQVKYLGYLLKEGQRWLTEARKETVMGQPIPKTPRQLREFLGKAGFCRLFIPGFAEMAAPLYPLTKPGTLFNWGPDQQKAFQEIKQALLTAPALGLPDLTKPFELFVDEKQGYAKGVLTQKLGPWRRPVAYLSKKLDPVAAGWPPCLRMVAAIAVLTKDAGKLTMGQPLVILAPHAVEALVKQPPDRWLSNARMTHYQALLLDTDRVQFGPVVALNPATLLPLPEEGLQHDCLDILAEAHGTRSDLMDQPLPDADHTWYTDGSSFLQEGQRKAGAAVTTETEVIWARALPAGTSAQRAELIALTQALKMAEGKKLNVYTDSRYAFATAHIHGEIYRRRGWLTSEGKEIKNKDEILALLKALFLPKRLSIIHCPGHQKGNSAEARGNRMADQAAREVATRETPETSTLLAGKRTADGSEFEKRTADGSEFESPKKKAKVE

SEQ ID NO: 2375 - protein, 2088 aa, synthetic construct
MPAAKRVKLDGGDKKYSIGLDIGTNSVGWAVITDEYKVPSKKFKVLGNTDRHSIKKNLIGALLFDSGETAEATRLKRTARRRYTRRKNRICYLQEIFSNEMAKVDDSFFHRLEESFLVEEDKKHERHPIFGNIVDEVAYHEKYPTIYHLRKKLVDSTDKADLRLIYLALAHMIKFRGHFLIEGDLNPDNSDVDKLFIQLVQTYNQLFEENPINASGVDAKAILSARLSKSRRLENLIAQLPGEKKNGLFGNLIALSLGLTPNFKSNFDLAEDAKLQLSKDTYDDDLDNLLAQIGDQYADLFLAAKNLSDAILLSDILRVNTEITKAPLSASMIKRYDEHHQDLTLLKALVRQQLPEKYKEIFFDQSKNGYAGYIDGGASQEEFYKFIKPILEKMDGTEELLVKLNREDLLRKQRTFDNGSIPHQIHLGELHAILRRQEDFYPFLKDNREKIEKILTFRIPYYVGPLARGNSRFAWMTRKSEETITPWNFEEVVDKGASAQSFIERMTNFDKNLPNEKVLPKHSLLYEYFTVYNELTKVKYVTEGMRKPAFLSGEQKKAIVDLLFKTNRKVTVKQLKEDYFKKIECFDSVEISGVEDRFNASLGTYHDLLKIIKDKDFLDNEENEDILEDIVLTLTLFEDREMIEERLKTYAHLFDDKVMKQLKRRRYTGWGRLSRKLINGIRDKQSGKTILDFLKSDGFANRNFMQLIHDDSLTFKEDIQKAQVSGQGDSLHEHIANLAGSPAIKKGILQTVKVVDELVKVMGRHKPENIVIEMARENQTTQKGQKNSRERMKRIEEGIKELGSQILKEHPVENTQLQNEKLYLYYLQNGRDMYVDQELDINRLSDYDVDHIVPQSFLKDDSIDNKVLTRSDKARGKSDNVPSEEVVKKMKNYWRQLLNAKLITQRKFDNLTKAERGGLSELDKAGFIKRQLVETRQITKHVAQILDSRMNTKYDENDKLIREVKVITLKSKLVSDFRKDFQFYKVREINNYHHAHDAYLNAVVGTALIKKYPKLESEFVYGDYKVYDVRKMIAKSEQEIGKATAKYFFYSNIMNFFKTEITLANGEIRKRPLIETNGETGEIVWDKGRDFATVRKVLSMPQVNIVKKTEVQTGGFSKESILPKRNSDKLIARKKDWDPKKYGGFDSPTVAYSVLVVAKVEKGKSKKLKSVKELLGITIMERSSFEKNPIDFLEAKGYKEVKKDLIIKLPKYSLFELENGRKRMLASAGELQKGNELALPSKYVNFLYLASHYEKLKGSPEDNEQKQLFVEQHKHYLDEIIEQISEFSKRVILADANLDKVLSAYNKHRDKPIREQAENIIHLFTLTNLGAPAAFKYFDTTIDRKRYTSTKEVLDATLIHQSITGLYETRIDLSQLGGDGGGGGGGTLNIEDEYRLHETSKEPDVSLGSTWLSDFPQAWAETGGMGLAVRQAPLIIPLKATSTPVSIKQYPMSQEARLGIKPHIQRLLDQGILVPCQSPWNTPLLPVKKPGTNDYRPVQDLREVNKRVEDIHPTVPNPYNLLSGLPPSHQWYTVLDLKDAFFCLRLHPTSQPLFAFEWRDPEMGISGQLTWTRLPQGFKNSPTLFNEALHRDLAGFRIQHPDLILLQYVDDLLLAATSELDCQQGTRALLQTLGDLGYRASAKKAQICQKQVKYLGYLLKEGQRWLTEARKETVMGQPIPKTPRQLREFLGKAGFCRLFIPGFAEMAAPLYPLTKPGTLFNWGPDQQKAFQEIKQALLTAPALGLPDLTKPFELFVDEKQGYAKGVLTQKLGPWRRPVAYLSKKLDPVAAGWPPCLRMVAAIAVLTKDAGKLTMGQPLVILAPHAVEALVKQPPDRWLSNARMTHYQALLLDTDRVQFGPVVALNPATLLPLPEEGLQHDCLDILAEAHGTRSDLMDQPLPDADHTWYTDGSSFLQEGQRKAGAAVTTETEVIWARALPAGTSAQRAELIALTQALKMAEGKKLNVYTDSRYAFATAHIHGEIYRRRGWLTSEGKEIKNKDEILALLKALFLPKRLSIIHCPGHQKGNSAEARGNRMADQAAREVATRETPETSTLLAGKRTADGSEFEKRTADGSEFESPKKKAKVE

SEQ ID NO: 2376 - protein, 2118 aa, synthetic construct
MPAAKRVKLDGGDKKYSIGLDIGTNSVGWAVITDEYKVPSKKFKVLGNTDRHSIKKNLIGALLFDSGETAEATRLKRTARRRYTRRKNRICYLQEIFSNEMAKVDDSFFHRLEESFLVEEDKKHERHPIFGNIVDEVAYHEKYPTIYHLRKKLVDSTDKADLRLIYLALAHMIKFRGHFLIEGDLNPDNSDVDKLFIQLVQTYNQLFEENPINASGVDAKAILSARLSKSRRLENLIAQLPGEKKNGLFGNLIALSLGLTPNFKSNFDLAEDAKLQLSKDTYDDDLDNLLAQIGDQYADLFLAAKNLSDAILLSDILRVNTEITKAPLSASMIKRYDEHHQDLTLLKALVRQQLPEKYKEIFFDQSKNGYAGYIDGGASQEEFYKFIKPILEKMDGTEELLVKLNREDLLRKQRTFDNGSIPHQIHLGELHAILRRQEDFYPFLKDNREKIEKILTFRIPYYVGPLARGNSRFAWMTRKSEETITPWNFEEVVDKGASAQSFIERMTNFDKNLPNEKVLPKHSLLYEYFTVYNELTKVKYVTEGMRKPAFLSGEQKKAIVDLLFKTNRKVTVKQLKEDYFKKIECFDSVEISGVEDRFNASLGTYHDLLKIIKDKDFLDNEENEDILEDIVLTLTLFEDREMIEERLKTYAHLFDDKVMKQLKRRRYTGWGRLSRKLINGIRDKQSGKTILDFLKSDGFANRNFMQLIHDDSLTFKEDIQKAQVSGQGDSLHEHIANLAGSPAIKKGILQTVKVVDELVKVMGRHKPENIVIEMARENQTTQKGQKNSRERMKRIEEGIKELGSQILKEHPVENTQLQNEKLYLYYLQNGRDMYVDQELDINRLSDYDVDHIVPQSFLKDDSIDNKVLTRSDKARGKSDNVPSEEVVKKMKNYWRQLLNAKLITQRKFDNLTKAERGGLSELDKAGFIKRQLVETRQITKHVAQILDSRMNTKYDENDKLIREVKVITLKSKLVSDFRKDFQFYKVREINNYHHAHDAYLNAVVGTALIKKYPKLESEFVYGDYKVYDVRKMIAKSEQEIGKATAKYFFYSNIMNFFKTEITLANGEIRKRPLIETNGETGEIVWDKGRDFATVRKVLSMPQVNIVKKTEVQTGGFSKESILPKRNSDKLIARKKDWDPKKYGGFDSPTVAYSVLVVAKVEKGKSKKLKSVKELLGITIMERSSFEKNPIDFLEAKGYKEVKKDLIIKLPKYSLFELENGRKRMLASAGELQKGNELALPSKYVNFLYLASHYEKLKGSPEDNEQKQLFVEQHKHYLDEIIEQISEFSKRVILADANLDKVLSAYNKHRDKPIREQAENIIHLFTLTNLGAPAAFKYFDTTIDRKRYTSTKEVLDATLIHQSITGLYETRIDLSQLGGDGGSGGSSGGSSGSETPGTSESATPESSGGSSGGSSGGTLNIEDEYRLHETSKEPDVSLGSTWLSDFPQAWAETGGMGLAVRQAPLIIPLKATSTPVSIKQYPMSQEARLGIKPHIQRLLDQGILVPCQSPWNTPLLPVKKPGTNDYRPVQDLREVNKRVEDIHPTVPNPYNLLSGLPPSHQWYTVLDLKDAFFCLRLHPTSQPLFAFEWRDPEMGISGQLTWTRLPQGFKNSPTLFNEALHRDLAGFRIQHPDLILLQYVDDLLLAATSELDCQQGTRALLQTLGDLGYRASAKKAQICQKQVKYLGYLLKEGQRWLTEARKETVMGQPIPKTPRQLREFLGKAGFCRLFIPGFAEMAAPLYPLTKPGTLFNWGPDQQKAFQEIKQALLTAPALGLPDLTKPFELFVDEKQGYAKGVLTQKLGPWRRPVAYLSKKLDPVAAGWPPCLRMVAAIAVLTKDAGKLTMGQPLVILAPHAVEALVKQPPDRWLSNARMTHYQALLLDTDRVQFGPVVALNPATLLPLPEEGLQHDCLDILAEAHGTRSDLMDQPLPDADHTWYTDGSSFLQEGQRKAGAAVTTETEVIWARALPAGTSAQRAELIALTQALKMAEGKKLNVYTDSRYAFATAHIHGEIYRRRGWLTSEGKEIKNKDEILALLKALFLPKRLSIIHCPGHQKGNSAEARGNRMADQAAREVATRETPETSTLLAGKRTADGSEFEKRTADGSEFESPKKKAKVE

SEQ ID NO: 2377 - protein, 2096 aa, synthetic construct
MPAAKRVKLDGGDKKYSIGLDIGTNSVGWAVITDEYKVPSKKFKVLGNTDRHSIKKNLIGALLFDSGETAEATRLKRTARRRYTRRKNRICYLQEIFSNEMAKVDDSFFHRLEESFLVEEDKKHERHPIFGNIVDEVAYHEKYPTIYHLRKKLVDSTDKADLRLIYLALAHMIKFRGHFLIEGDLNPDNSDVDKLFIQLVQTYNQLFEENPINASGVDAKAILSARLSKSRRLENLIAQLPGEKKNGLFGNLIALSLGLTPNFKSNFDLAEDAKLQLSKDTYDDDLDNLLAQIGDQYADLFLAAKNLSDAILLSDILRVNTEITKAPLSASMIKRYDEHHQDLTLLKALVRQQLPEKYKEIFFDQSKNGYAGYIDGGASQEEFYKFIKPILEKMDGTEELLVKLNREDLLRKQRTFDNGSIPHQIHLGELHAILRRQEDFYPFLKDNREKIEKILTFRIPYYVGPLARGNSRFAWMTRKSEETITPWNFEEVVDKGASAQSFIERMTNFDKNLPNEKVLPKHSLLYEYFTVYNELTKVKYVTEGMRKPAFLSGEQKKAIVDLLFKTNRKVTVKQLKEDYFKKIECFDSVEISGVEDRFNASLGTYHDLLKIIKDKDFLDNEENEDILEDIVLTLTLFEDREMIEERLKTYAHLFDDKVMKQLKRRRYTGWGRLSRKLINGIRDKQSGKTILDFLKSDGFANRNFMQLIHDDSLTFKEDIQKAQVSGQGDSLHEHIANLAGSPAIKKGILQTVKVVDELVKVMGRHKPENIVIEMARENQTTQKGQKNSRERMKRIEEGIKELGSQILKEHPVENTQLQNEKLYLYYLQNGRDMYVDQELDINRLSDYDVDHIVPQSFLKDDSIDNKVLTRSDKARGKSDNVPSEEVVKKMKNYWRQLLNAKLITQRKFDNLTKAERGGLSELDKAGFIKRQLVETRQITKHVAQILDSRMNTKYDENDKLIREVKVITLKSKLVSDFRKDFQFYKVREINNYHHAHDAYLNAVVGTALIKKYPKLESEFVYGDYKVYDVRKMIAKSEQEIGKATAKYFFYSNIMNFFKTEITLANGEIRKRPLIETNGETGEIVWDKGRDFATVRKVLSMPQVNIVKKTEVQTGGFSKESILPKRNSDKLIARKKDWDPKKYGGFDSPTVAYSVLVVAKVEKGKSKKLKSVKELLGITIMERSSFEKNPIDFLEAKGYKEVKKDLIIKLPKYSLFELENGRKRMLASAGELQKGNELALPSKYVNFLYLASHYEKLKGSPEDNEQKQLFVEQHKHYLDEIIEQISEFSKRVILADANLDKVLSAYNKHRDKPIREQAENIIHLFTLTNLGAPAAFKYFDTTIDRKRYTSTKEVLDATLIHQSITGLYETRIDLSQLGGDGGPAPGGGEAAAKGGTLNIEDEYRLHETSKEPDVSLGSTWLSDFPQAWAETGGMGLAVRQAPLIIPLKATSTPVSIKQYPMSQEARLGIKPHIQRLLDQGILVPCQSPWNTPLLPVKKPGTNDYRPVQDLREVNKRVEDIHPTVPNPYNLLSGLPPSHQWYTVLDLKDAFFCLRLHPTSQPLFAFEWRDPEMGISGQLTWTRLPQGFKNSPTLFNEALHRDLAGFRIQHPDLILLQYVDDLLLAATSELDCQQGTRALLQTLGDLGYRASAKKAQICQKQVKYLGYLLKEGQRWLTEARKETVMGQPIPKTPRQLREFLGKAGFCRLFIPGFAEMAAPLYPLTKPGTLFNWGPDQQKAFQEIKQALLTAPALGLPDLTKPFELFVDEKQGYAKGVLTQKLGPWRRPVAYLSKKLDPVAAGWPPCLRMVAAIAVLTKDAGKLTMGQPLVILAPHAVEALVKQPPDRWLSNARMTHYQALLLDTDRVQFGPVVALNPATLLPLPEEGLQHDCLDILAEAHGTRSDLMDQPLPDADHTWYTDGSSFLQEGQRKAGAAVTTETEVIWARALPAGTSAQRAELIALTQALKMAEGKKLNVYTDSRYAFATAHIHGEIYRRRGWLTSEGKEIKNKDEILALLKALFLPKRLSIIHCPGHQKGNSAEARGNRMADQAAREVATRETPETSTLLAGKRTADGSEFEKRTADGSEFESPKKKAKVE

SEQ ID NO: 2378 - protein, 2090 aa, synthetic construct
MPAAKRVKLDGGDKKYSIGLDIGTNSVGWAVITDEYKVPSKKFKVLGNTDRHSIKKNLIGALLFDSGETAEATRLKRTARRRYTRRKNRICYLQEIFSNEMAKVDDSFFHRLEESFLVEEDKKHERHPIFGNIVDEVAYHEKYPTIYHLRKKLVDSTDKADLRLIYLALAHMIKFRGHFLIEGDLNPDNSDVDKLFIQLVQTYNQLFEENPINASGVDAKAILSARLSKSRRLENLIAQLPGEKKNGLFGNLIALSLGLTPNFKSNFDLAEDAKLQLSKDTYDDDLDNLLAQIGDQYADLFLAAKNLSDAILLSDILRVNTEITKAPLSASMIKRYDEHHQDLTLLKALVRQQLPEKYKEIFFDQSKNGYAGYIDGGASQEEFYKFIKPILEKMDGTEELLVKLNREDLLRKQRTFDNGSIPHQIHLGELHAILRRQEDFYPFLKDNREKIEKILTFRIPYYVGPLARGNSRFAWMTRKSEETITPWNFEEVVDKGASAQSFIERMTNFDKNLPNEKVLPKHSLLYEYFTVYNELTKVKYVTEGMRKPAFLSGEQKKAIVDLLFKTNRKVTVKQLKEDYFKKIECFDSVEISGVEDRFNASLGTYHDLLKIIKDKDFLDNEENEDILEDIVLTLTLFEDREMIEERLKTYAHLFDDKVMKQLKRRRYTGWGRLSRKLINGIRDKQSGKTILDFLKSDGFANRNFMQLIHDDSLTFKEDIQKAQVSGQGDSLHEHIANLAGSPAIKKGILQTVKVVDELVKVMGRHKPENIVIEMARENQTTQKGQKNSRERMKRIEEGIKELGSQILKEHPVENTQLQNEKLYLYYLQNGRDMYVDQELDINRLSDYDVDHIVPQSFLKDDSIDNKVLTRSDKARGKSDNVPSEEVVKKMKNYWRQLLNAKLITQRKFDNLTKAERGGLSELDKAGFIKRQLVETRQITKHVAQILDSRMNTKYDENDKLIREVKVITLKSKLVSDFRKDFQFYKVREINNYHHAHDAYLNAVVGTALIKKYPKLESEFVYGDYKVYDVRKMIAKSEQEIGKATAKYFFYSNIMNFFKTEITLANGEIRKRPLIETNGETGEIVWDKGRDFATVRKVLSMPQVNIVKKTEVQTGGFSKESILPKRNSDKLIARKKDWDPKKYGGFDSPTVAYSVLVVAKVEKGKSKKLKSVKELLGITIMERSSFEKNPIDFLEAKGYKEVKKDLIIKLPKYSLFELENGRKRMLASAGELQKGNELALPSKYVNFLYLASHYEKLKGSPEDNEQKQLFVEQHKHYLDEIIEQISEFSKRVILADANLDKVLSAYNKHRDKPIREQAENIIHLFTLTNLGAPAAFKYFDTTIDRKRYTSTKEVLDATLIHQSITGLYETRIDLSQLGGDGGGGGGGGGTLNIEDEYRLHETSKEPDVSLGSTWLSDFPQAWAETGGMGLAVRQAPLIIPLKATSTPVSIKQYPMSQEARLGIKPHIQRLLDQGILVPCQSPWNTPLLPVKKPGTNDYRPVQDLREVNKRVEDIHPTVPNPYNLLSGLPPSHQWYTVLDLKDAFFCLRLHPTSQPLFAFEWRDPEMGISGQLTWTRLPQGFKNSPTLFNEALHRDLAGFRIQHPDLILLQYVDDLLLAATSELDCQQGTRALLQTLGDLGYRASAKKAQICQKQVKYLGYLLKEGQRWLTEARKETVMGQPIPKTPRQLREFLGKAGFCRLFIPGFAEMAAPLYPLTKPGTLFNWGPDQQKAFQEIKQALLTAPALGLPDLTKPFELFVDEKQGYAKGVLTQKLGPWRRPVAYLSKKLDPVAAGWPPCLRMVAAIAVLTKDAGKLTMGQPLVILAPHAVEALVKQPPDRWLSNARMTHYQALLLDTDRVQFGPVVALNPATLLPLPEEGLQHDCLDILAEAHGTRSDLMDQPLPDADHTWYTDGSSFLQEGQRKAGAAVTTETEVIWARALPAGTSAQRAELIALTQALKMAEGKKLNVYTDSRYAFATAHIHGEIYRRRGWLTSEGKEIKNKDEILALLKALFLPKRLSIIHCPGHQKGNSAEARGNRMADQAAREVATRETPETSTLLAGKRTADGSEFEKRTADGSEFESPKKKAKVE

SEQ ID NO: 2379 - protein, 2094 aa, synthetic construct
MPAAKRVKLDGGDKKYSIGLDIGTNSVGWAVITDEYKVPSKKFKVLGNTDRHSIKKNLIGALLFDSGETAEATRLKRTARRRYTRRKNRICYLQEIFSNEMAKVDDSFFHRLEESFLVEEDKKHERHPIFGNIVDEVAYHEKYPTIYHLRKKLVDSTDKADLRLIYLALAHMIKFRGHFLIEGDLNPDNSDVDKLFIQLVQTYNQLFEENPINASGVDAKAILSARLSKSRRLENLIAQLPGEKKNGLFGNLIALSLGLTPNFKSNFDLAEDAKLQLSKDTYDDDLDNLLAQIGDQYADLFLAAKNLSDAILLSDILRVNTEITKAPLSASMIKRYDEHHQDLTLLKALVRQQLPEKYKEIFFDQSKNGYAGYIDGGASQEEFYKFIKPILEKMDGTEELLVKLNREDLLRKQRTFDNGSIPHQIHLGELHAILRRQEDFYPFLKDNREKIEKILTFRIPYYVGPLARGNSRFAWMTRKSEETITPWNFEEVVDKGASAQSFIERMTNFDKNLPNEKVLPKHSLLYEYFTVYNELTKVKYVTEGMRKPAFLSGEQKKAIVDLLFKTNRKVTVKQLKEDYFKKIECFDSVEISGVEDRFNASLGTYHDLLKIIKDKDFLDNEENEDILEDIVLTLTLFEDREMIEERLKTYAHLFDDKVMKQLKRRRYTGWGRLSRKLINGIRDKQSGKTILDFLKSDGFANRNFMQLIHDDSLTFKEDIQKAQVSGQGDSLHEHIANLAGSPAIKKGILQTVKVVDELVKVMGRHKPENIVIEMARENQTTQKGQKNSRERMKRIEEGIKELGSQILKEHPVENTQLQNEKLYLYYLQNGRDMYVDQELDINRLSDYDVDHIVPQSFLKDDSIDNKVLTRSDKARGKSDNVPSEEVVKKMKNYWRQLLNAKLITQRKFDNLTKAERGGLSELDKAGFIKRQLVETRQITKHVAQILDSRMNTKYDENDKLIREVKVITLKSKLVSDFRKDFQFYKVREINNYHHAHDAYLNAVVGTALIKKYPKLESEFVYGDYKVYDVRKMIAKSEQEIGKATAKYFFYSNIMNFFKTEITLANGEIRKRPLIETNGETGEIVWDKGRDFATVRKVLSMPQVNIVKKTEVQTGGFSKESILPKRNSDKLIARKKDWDPKKYGGFDSPTVAYSVLVVAKVEKGKSKKLKSVKELLGITIMERSSFEKNPIDFLEAKGYKEVKKDLIIKLPKYSLFELENGRKRMLASAGELQKGNELALPSKYVNFLYLASHYEKLKGSPEDNEQKQLFVEQHKHYLDEIIEQISEFSKRVILADANLDKVLSAYNKHRDKPIREQAENIIHLFTLTNLGAPAAFKYFDTTIDRKRYTSTKEVLDATLIHQSITGLYETRIDLSQLGGDGGGSSGGSGGGGGTLNIEDEYRLHETSKEPDVSLGSTWLSDFPQAWAETGGMGLAVRQAPLIIPLKATSTPVSIKQYPMSQEARLGIKPHIQRLLDQGILVPCQSPWNTPLLPVKKPGTNDYRPVQDLREVNKRVEDIHPTVPNPYNLLSGLPPSHQWYTVLDLKDAFFCLRLHPTSQPLFAFEWRDPEMGISGQLTWTRLPQGFKNSPTLFNEALHRDLAGFRIQHPDLILLQYVDDLLLAATSELDCQQGTRALLQTLGDLGYRASAKKAQICQKQVKYLGYLLKEGQRWLTEARKETVMGQPIPKTPRQLREFLGKAGFCRLFIPGFAEMAAPLYPLTKPGTLFNWGPDQQKAFQEIKQALLTAPALGLPDLTKPFELFVDEKQGYAKGVLTQKLGPWRRPVAYLSKKLDPVAAGWPPCLRMVAAIAVLTKDAGKLTMGQPLVILAPHAVEALVKQPPDRWLSNARMTHYQALLLDTDRVQFGPVVALNPATLLPLPEEGLQHDCLDILAEAHGTRSDLMDQPLPDADHTWYTDGSSFLQEGQRKAGAAVTTETEVIWARALPAGTSAQRAELIALTQALKMAEGKKLNVYTDSRYAFATAHIHGEIYRRRGWLTSEGKEIKNKDEILALLKALFLPKRLSIIHCPGHQKGNSAEARGNRMADQAAREVATRETPETSTLLAGKRTADGSEFEKRTADGSEFESPKKKAKVE

SEQ ID NO: 2380 - protein, 2094 aa, synthetic construct
MPAAKRVKLDGGDKKYSIGLDIGTNSVGWAVITDEYKVPSKKFKVLGNTDRHSIKKNLIGALLFDSGETAEATRLKRTARRRYTRRKNRICYLQEIFSNEMAKVDDSFFHRLEESFLVEEDKKHERHPIFGNIVDEVAYHEKYPTIYHLRKKLVDSTDKADLRLIYLALAHMIKFRGHFLIEGDLNPDNSDVDKLFIQLVQTYNQLFEENPINASGVDAKAILSARLSKSRRLENLIAQLPGEKKNGLFGNLIALSLGLTPNFKSNFDLAEDAKLQLSKDTYDDDLDNLLAQIGDQYADLFLAAKNLSDAILLSDILRVNTEITKAPLSASMIKRYDEHHQDLTLLKALVRQQLPEKYKEIFFDQSKNGYAGYIDGGASQEEFYKFIKPILEKMDGTEELLVKLNREDLLRKQRTFDNGSIPHQIHLGELHAILRRQEDFYPFLKDNREKIEKILTFRIPYYVGPLARGNSRFAWMTRKSEETITPWNFEEVVDKGASAQSFIERMTNFDKNLPNEKVLPKHSLLYEYFTVYNELTKVKYVTEGMRKPAFLSGEQKKAIVDLLFKTNRKVTVKQLKEDYFKKIECFDSVEISGVEDRFNASLGTYHDLLKIIKDKDFLDNEENEDILEDIVLTLTLFEDREMIEERLKTYAHLFDDKVMKQLKRRRYTGWGRLSRKLINGIRDKQSGKTILDFLKSDGFANRNFMQLIHDDSLTFKEDIQKAQVSGQGDSLHEHIANLAGSPAIKKGILQTVKVVDELVKVMGRHKPENIVIEMARENQTTQKGQKNSRERMKRIEEGIKELGSQILKEHPVENTQLQNEKLYLYYLQNGRDMYVDQELDINRLSDYDVDHIVPQSFLKDDSIDNKVLTRSDKARGKSDNVPSEEVVKKMKNYWRQLLNAKLITQRKFDNLTKAERGGLSELDKAGFIKRQLVETRQITKHVAQILDSRMNTKYDENDKLIREVKVITLKSKLVSDFRKDFQFYKVREINNYHHAHDAYLNAVVGTALIKKYPKLESEFVYGDYKVYDVRKMIAKSEQEIGKATAKYFFYSNIMNFFKTEITLANGEIRKRPLIETNGETGEIVWDKGRDFATVRKVLSMPQVNIVKKTEVQTGGFSKESILPKRNSDKLIARKKDWDPKKYGGFDSPTVAYSVLVVAKVEKGKSKKLKSVKELLGITIMERSSFEKNPIDFLEAKGYKEVKKDLIIKLPKYSLFELENGRKRMLASAGELQKGNELALPSKYVNFLYLASHYEKLKGSPEDNEQKQLFVEQHKHYLDEIIEQISEFSKRVILADANLDKVLSAYNKHRDKPIREQAENIIHLFTLTNLGAPAAFKYFDTTIDRKRYTSTKEVLDATLIHQSITGLYETRIDLSQLGGDGGPAPGSSGGSGGTLNIEDEYRLHETSKEPDVSLGSTWLSDFPQAWAETGGMGLAVRQAPLIIPLKATSTPVSIKQYPMSQEARLGIKPHIQRLLDQGILVPCQSPWNTPLLPVKKPGTNDYRPVQDLREVNKRVEDIHPTVPNPYNLLSGLPPSHQWYTVLDLKDAFFCLRLHPTSQPLFAFEWRDPEMGISGQLTWTRLPQGFKNSPTLFNEALHRDLAGFRIQHPDLILLQYVDDLLLAATSELDCQQGTRALLQTLGDLGYRASAKKAQICQKQVKYLGYLLKEGQRWLTEARKETVMGQPIPKTPRQLREFLGKAGFCRLFIPGFAEMAAPLYPLTKPGTLFNWGPDQQKAFQEIKQALLTAPALGLPDLTKPFELFVDEKQGYAKGVLTQKLGPWRRPVAYLSKKLDPVAAGWPPCLRMVAAIAVLTKDAGKLTMGQPLVILAPHAVEALVKQPPDRWLSNARMTHYQALLLDTDRVQFGPVVALNPATLLPLPEEGLQHDCLDILAEAHGTRSDLMDQPLPDADHTWYTDGSSFLQEGQRKAGAAVTTETEVIWARALPAGTSAQRAELIALTQALKMAEGKKLNVYTDSRYAFATAHIHGEIYRRRGWLTSEGKEIKNKDEILALLKALFLPKRLSIIHCPGHQKGNSAEARGNRMADQAAREVATRETPETSTLLAGKRTADGSEFEKRTADGSEFESPKKKAKVE

SEQ ID NO: 2381 - protein, 2090 aa, synthetic construct
MPAAKRVKLDGGDKKYSIGLDIGTNSVGWAVITDEYKVPSKKFKVLGNTDRHSIKKNLIGALLFDSGETAEATRLKRTARRRYTRRKNRICYLQEIFSNEMAKVDDSFFHRLEESFLVEEDKKHERHPIFGNIVDEVAYHEKYPTIYHLRKKLVDSTDKADLRLIYLALAHMIKFRGHFLIEGDLNPDNSDVDKLFIQLVQTYNQLFEENPINASGVDAKAILSARLSKSRRLENLIAQLPGEKKNGLFGNLIALSLGLTPNFKSNFDLAEDAKLQLSKDTYDDDLDNLLAQIGDQYADLFLAAKNLSDAILLSDILRVNTEITKAPLSASMIKRYDEHHQDLTLLKALVRQQLPEKYKEIFFDQSKNGYAGYIDGGASQEEFYKFIKPILEKMDGTEELLVKLNREDLLRKQRTFDNGSIPHQIHLGELHAILRRQEDFYPFLKDNREKIEKILTFRIPYYVGPLARGNSRFAWMTRKSEETITPWNFEEVVDKGASAQSFIERMTNFDKNLPNEKVLPKHSLLYEYFTVYNELTKVKYVTEGMRKPAFLSGEQKKAIVDLLFKTNRKVTVKQLKEDYFKKIECFDSVEISGVEDRFNASLGTYHDLLKIIKDKDFLDNEENEDILEDIVLTLTLFEDREMIEERLKTYAHLFDDKVMKQLKRRRYTGWGRLSRKLINGIRDKQSGKTILDFLKSDGFANRNFMQLIHDDSLTFKEDIQKAQVSGQGDSLHEHIANLAGSPAIKKGILQTVKVVDELVKVMGRHKPENIVIEMARENQTTQKGQKNSRERMKRIEEGIKELGSQILKEHPVENTQLQNEKLYLYYLQNGRDMYVDQELDINRLSDYDVDHIVPQSFLKDDSIDNKVLTRSDKARGKSDNVPSEEVVKKMKNYWRQLLNAKLITQRKFDNLTKAERGGLSELDKAGFIKRQLVETRQITKHVAQILDSRMNTKYDENDKLIREVKVITLKSKLVSDFRKDFQFYKVREINNYHHAHDAYLNAVVGTALIKKYPKLESEFVYGDYKVYDVRKMIAKSEQEIGKATAKYFFYSNIMNFFKTEITLANGEIRKRPLIETNGETGEIVWDKGRDFATVRKVLSMPQVNIVKKTEVQTGGFSKESILPKRNSDKLIARKKDWDPKKYGGFDSPTVAYSVLVVAKVEKGKSKKLKSVKELLGITIMERSSFEKNPIDFLEAKGYKEVKKDLIIKLPKYSLFELENGRKRMLASAGELQKGNELALPSKYVNFLYLASHYEKLKGSPEDNEQKQLFVEQHKHYLDEIIEQISEFSKRVILADANLDKVLSAYNKHRDKPIREQAENIIHLFTLTNLGAPAAFKYFDTTIDRKRYTSTKEVLDATLIHQSITGLYETRIDLSQLGGDGGGGGGSGGTLNIEDEYRLHETSKEPDVSLGSTWLSDFPQAWAETGGMGLAVRQAPLIIPLKATSTPVSIKQYPMSQEARLGIKPHIQRLLDQGILVPCQSPWNTPLLPVKKPGTNDYRPVQDLREVNKRVEDIHPTVPNPYNLLSGLPPSHQWYTVLDLKDAFFCLRLHPTSQPLFAFEWRDPEMGISGQLTWTRLPQGFKNSPTLFNEALHRDLAGFRIQHPDLILLQYVDDLLLAATSELDCQQGTRALLQTLGDLGYRASAKKAQICQKQVKYLGYLLKEGQRWLTEARKETVMGQPIPKTPRQLREFLGKAGFCRLFIPGFAEMAAPLYPLTKPGTLFNWGPDQQKAFQEIKQALLTAPALGLPDLTKPFELFVDEKQGYAKGVLTQKLGPWRRPVAYLSKKLDPVAAGWPPCLRMVAAIAVLTKDAGKLTMGQPLVILAPHAVEALVKQPPDRWLSNARMTHYQALLLDTDRVQFGPVVALNPATLLPLPEEGLQHDCLDILAEAHGTRSDLMDQPLPDADHTWYTDGSSFLQEGQRKAGAAVTTETEVIWARALPAGTSAQRAELIALTQALKMAEGKKLNVYTDSRYAFATAHIHGEIYRRRGWLTSEGKEIKNKDEILALLKALFLPKRLSIIHCPGHQKGNSAEARGNRMADQAAREVATRETPETSTLLAGKRTADGSEFEKRTADGSEFESPKKKAKVE

SEQ ID NO: 2382 - protein, 2093 aa, synthetic construct
MPAAKRVKLDGGDKKYSIGLDIGTNSVGWAVITDEYKVPSKKFKVLGNTDRHSIKKNLIGALLFDSGETAEATRLKRTARRRYTRRKNRICYLQEIFSNEMAKVDDSFFHRLEESFLVEEDKKHERHPIFGNIVDEVAYHEKYPTIYHLRKKLVDSTDKADLRLIYLALAHMIKFRGHFLIEGDLNPDNSDVDKLFIQLVQTYNQLFEENPINASGVDAKAILSARLSKSRRLENLIAQLPGEKKNGLFGNLIALSLGLTPNFKSNFDLAEDAKLQLSKDTYDDDLDNLLAQIGDQYADLFLAAKNLSDAILLSDILRVNTEITKAPLSASMIKRYDEHHQDLTLLKALVRQQLPEKYKEIFFDQSKNGYAGYIDGGASQEEFYKFIKPILEKMDGTEELLVKLNREDLLRKQRTFDNGSIPHQIHLGELHAILRRQEDFYPFLKDNREKIEKILTFRIPYYVGPLARGNSRFAWMTRKSEETITPWNFEEVVDKGASAQSFIERMTNFDKNLPNEKVLPKHSLLYEYFTVYNELTKVKYVTEGMRKPAFLSGEQKKAIVDLLFKTNRKVTVKQLKEDYFKKIECFDSVEISGVEDRFNASLGTYHDLLKIIKDKDFLDNEENEDILEDIVLTLTLFEDREMIEERLKTYAHLFDDKVMKQLKRRRYTGWGRLSRKLINGIRDKQSGKTILDFLKSDGFANRNFMQLIHDDSLTFKEDIQKAQVSGQGDSLHEHIANLAGSPAIKKGILQTVKVVDELVKVMGRHKPENIVIEMARENQTTQKGQKNSRERMKRIEEGIKELGSQILKEHPVENTQLQNEKLYLYYLQNGRDMYVDQELDINRLSDYDVDHIVPQSFLKDDSIDNKVLTRSDKARGKSDNVPSEEVVKKMKNYWRQLLNAKLITQRKFDNLTKAERGGLSELDKAGFIKRQLVETRQITKHVAQILDSRMNTKYDENDKLIREVKVITLKSKLVSDFRKDFQFYKVREINNYHHAHDAYLNAVVGTALIKKYPKLESEFVYGDYKVYDVRKMIAKSEQEIGKATAKYFFYSNIMNFFKTEITLANGEIRKRPLIETNGETGEIVWDKGRDFATVRKVLSMPQVNIVKKTEVQTGGFSKESILPKRNSDKLIARKKDWDPKKYGGFDSPTVAYSVLVVAKVEKGKSKKLKSVKELLGITIMERSSFEKNPIDFLEAKGYKEVKKDLIIKLPKYSLFELENGRKRMLASAGELQKGNELALPSKYVNFLYLASHYEKLKGSPEDNEQKQLFVEQHKHYLDEIIEQISEFSKRVILADANLDKVLSAYNKHRDKPIREQAENIIHLFTLTNLGAPAAFKYFDTTIDRKRYTSTKEVLDATLIHQSITGLYETRIDLSQLGGDGGGSSEAAAKGGTLNIEDEYRLHETSKEPDVSLGSTWLSDFPQAWAETGGMGLAVRQAPLIIPLKATSTPVSIKQYPMSQEARLGIKPHIQRLLDQGILVPCQSPWNTPLLPVKKPGTNDYRPVQDLREVNKRVEDIHPTVPNPYNLLSGLPPSHQWYTVLDLKDAFFCLRLHPTSQPLFAFEWRDPEMGISGQLTWTRLPQGFKNSPTLFNEALHRDLAGFRIQHPDLILLQYVDDLLLAATSELDCQQGTRALLQTLGDLGYRASAKKAQICQKQVKYLGYLLKEGQRWLTEARKETVMGQPIPKTPRQLREFLGKAGFCRLFIPGFAEMAAPLYPLTKPGTLFNWGPDQQKAFQEIKQALLTAPALGLPDLTKPFELFVDEKQGYAKGVLTQKLGPWRRPVAYLSKKLDPVAAGWPPCLRMVAAIAVLTKDAGKLTMGQPLVILAPHAVEALVKQPPDRWLSNARMTHYQALLLDTDRVQFGPVVALNPATLLPLPEEGLQHDCLDILAEAHGTRSDLMDQPLPDADHTWYTDGSSFLQEGQRKAGAAVTTETEVIWARALPAGTSAQRAELIALTQALKMAEGKKLNVYTDSRYAFATAHIHGEIYRRRGWLTSEGKEIKNKDEILALLKALFLPKRLSIIHCPGHQKGNSAEARGNRMADQAAREVATRETPETSTLLAGKRTADGSEFEKRTADGSEFESPKKKAKVE

SEQ ID NO: 2383 - protein, 2091 aa, synthetic construct
MPAAKRVKLDGGDKKYSIGLDIGTNSVGWAVITDEYKVPSKKFKVLGNTDRHSIKKNLIGALLFDSGETAEATRLKRTARRRYTRRKNRICYLQEIFSNEMAKVDDSFFHRLEESFLVEEDKKHERHPIFGNIVDEVAYHEKYPTIYHLRKKLVDSTDKADLRLIYLALAHMIKFRGHFLIEGDLNPDNSDVDKLFIQLVQTYNQLFEENPINASGVDAKAILSARLSKSRRLENLIAQLPGEKKNGLFGNLIALSLGLTPNFKSNFDLAEDAKLQLSKDTYDDDLDNLLAQIGDQYADLFLAAKNLSDAILLSDILRVNTEITKAPLSASMIKRYDEHHQDLTLLKALVRQQLPEKYKEIFFDQSKNGYAGYIDGGASQEEFYKFIKPILEKMDGTEELLVKLNREDLLRKQRTFDNGSIPHQIHLGELHAILRRQEDFYPFLKDNREKIEKILTFRIPYYVGPLARGNSRFAWMTRKSEETITPWNFEEVVDKGASAQSFIERMTNFDKNLPNEKVLPKHSLLYEYFTVYNELTKVKYVTEGMRKPAFLSGEQKKAIVDLLFKTNRKVTVKQLKEDYFKKIECFDSVEISGVEDRFNASLGTYHDLLKIIKDKDFLDNEENEDILEDIVLTLTLFEDREMIEERLKTYAHLFDDKVMKQLKRRRYTGWGRLSRKLINGIRDKQSGKTILDFLKSDGFANRNFMQLIHDDSLTFKEDIQKAQVSGQGDSLHEHIANLAGSPAIKKGILQTVKVVDELVKVMGRHKPENIVIEMARENQTTQKGQKNSRERMKRIEEGIKELGSQILKEHPVENTQLQNEKLYLYYLQNGRDMYVDQELDINRLSDYDVDHIVPQSFLKDDSIDNKVLTRSDKARGKSDNVPSEEVVKKMKNYWRQLLNAKLITQRKFDNLTKAERGGLSELDKAGFIKRQLVETRQITKHVAQILDSRMNTKYDENDKLIREVKVITLKSKLVSDFRKDFQFYKVREINNYHHAHDAYLNAVVGTALIKKYPKLESEFVYGDYKVYDVRKMIAKSEQEIGKATAKYFFYSNIMNFFKTEITLANGEIRKRPLIETNGETGEIVWDKGRDFATVRKVLSMPQVNIVKKTEVQTGGFSKESILPKRNSDKLIARKKDWDPKKYGGFDSPTVAYSVLVVAKVEKGKSKKLKSVKELLGITIMERSSFEKNPIDFLEAKGYKEVKKDLIIKLPKYSLFELENGRKRMLASAGELQKGNELALPSKYVNFLYLASHYEKLKGSPEDNEQKQLFVEQHKHYLDEIIEQISEFSKRVILADANLDKVLSAYNKHRDKPIREQAENIIHLFTLTNLGAPAAFKYFDTTIDRKRYTSTKEVLDATLIHQSITGLYETRIDLSQLGGDGGGGGGSSGGTLNIEDEYRLHETSKEPDVSLGSTWLSDFPQAWAETGGMGLAVRQAPLIIPLKATSTPVSIKQYPMSQEARLGIKPHIQRLLDQGILVPCQSPWNTPLLPVKKPGTNDYRPVQDLREVNKRVEDIHPTVPNPYNLLSGLPPSHQWYTVLDLKDAFFCLRLHPTSQPLFAFEWRDPEMGISGQLTWTRLPQGFKNSPTLFNEALHRDLAGFRIQHPDLILLQYVDDLLLAATSELDCQQGTRALLQTLGDLGYRASAKKAQICQKQVKYLGYLLKEGQRWLTEARKETVMGQPIPKTPRQLREFLGKAGFCRLFIPGFAEMAAPLYPLTKPGTLFNWGPDQQKAFQEIKQALLTAPALGLPDLTKPFELFVDEKQGYAKGVLTQKLGPWRRPVAYLSKKLDPVAAGWPPCLRMVAAIAVLTKDAGKLTMGQPLVILAPHAVEALVKQPPDRWLSNARMTHYQALLLDTDRVQFGPVVALNPATLLPLPEEGLQHDCLDILAEAHGTRSDLMDQPLPDADHTWYTDGSSFLQEGQRKAGAAVTTETEVIWARALPAGTSAQRAELIALTQALKMAEGKKLNVYTDSRYAFATAHIHGEIYRRRGWLTSEGKEIKNKDEILALLKALFLPKRLSIIHCPGHQKGNSAEARGNRMADQAAREVATRETPETSTLLAGKRTADGSEFEKRTADGSEFESPKKKAKVE

SEQ ID NO: 2384 - protein, 2096 aa, synthetic construct
MPAAKRVKLDGGDKKYSIGLDIGTNSVGWAVITDEYKVPSKKFKVLGNTDRHSIKKNLIGALLFDSGETAEATRLKRTARRRYTRRKNRICYLQEIFSNEMAKVDDSFFHRLEESFLVEEDKKHERHPIFGNIVDEVAYHEKYPTIYHLRKKLVDSTDKADLRLIYLALAHMIKFRGHFLIEGDLNPDNSDVDKLFIQLVQTYNQLFEENPINASGVDAKAILSARLSKSRRLENLIAQLPGEKKNGLFGNLIALSLGLTPNFKSNFDLAEDAKLQLSKDTYDDDLDNLLAQIGDQYADLFLAAKNLSDAILLSDILRVNTEITKAPLSASMIKRYDEHHQDLTLLKALVRQQLPEKYKEIFFDQSKNGYAGYIDGGASQEEFYKFIKPILEKMDGTEELLVKLNREDLLRKQRTFDNGSIPHQIHLGELHAILRRQEDFYPFLKDNREKIEKILTFRIPYYVGPLARGNSRFAWMTRKSEETITPWNFEEVVDKGASAQSFIERMTNFDKNLPNEKVLPKHSLLYEYFTVYNELTKVKYVTEGMRKPAFLSGEQKKAIVDLLFKTNRKVTVKQLKEDYFKKIECFDSVEISGVEDRFNASLGTYHDLLKIIKDKDFLDNEENEDILEDIVLTLTLFEDREMIEERLKTYAHLFDDKVMKQLKRRRYTGWGRLSRKLINGIRDKQSGKTILDFLKSDGFANRNFMQLIHDDSLTFKEDIQKAQVSGQGDSLHEHIANLAGSPAIKKGILQTVKVVDELVKVMGRHKPENIVIEMARENQTTQKGQKNSRERMKRIEEGIKELGSQILKEHPVENTQLQNEKLYLYYLQNGRDMYVDQELDINRLSDYDVDHIVPQSFLKDDSIDNKVLTRSDKARGKSDNVPSEEVVKKMKNYWRQLLNAKLITQRKFDNLTKAERGGLSELDKAGFIKRQLVETRQITKHVAQILDSRMNTKYDENDKLIREVKVITLKSKLVSDFRKDFQFYKVREINNYHHAHDAYLNAVVGTALIKKYPKLESEFVYGDYKVYDVRKMIAKSEQEIGKATAKYFFYSNIMNFFKTEITLANGEIRKRPLIETNGETGEIVWDKGRDFATVRKVLSMPQVNIVKKTEVQTGGFSKESILPKRNSDKLIARKKDWDPKKYGGFDSPTVAYSVLVVAKVEKGKSKKLKSVKELLGITIMERSSFEKNPIDFLEAKGYKEVKKDLIIKLPKYSLFELENGRKRMLASAGELQKGNELALPSKYVNFLYLASHYEKLKGSPEDNEQKQLFVEQHKHYLDEIIEQISEFSKRVILADANLDKVLSAYNKHRDKPIREQAENIIHLFTLTNLGAPAAFKYFDTTIDRKRYTSTKEVLDATLIHQSITGLYETRIDLSQLGGDGGGSSEAAAKGGGGGTLNIEDEYRLHETSKEPDVSLGSTWLSDFPQAWAETGGMGLAVRQAPLIIPLKATSTPVSIKQYPMSQEARLGIKPHIQRLLDQGILVPCQSPWNTPLLPVKKPGTNDYRPVQDLREVNKRVEDIHPTVPNPYNLLSGLPPSHQWYTVLDLKDAFFCLRLHPTSQPLFAFEWRDPEMGISGQLTWTRLPQGFKNSPTLFNEALHRDLAGFRIQHPDLILLQYVDDLLLAATSELDCQQGTRALLQTLGDLGYRASAKKAQICQKQVKYLGYLLKEGQRWLTEARKETVMGQPIPKTPRQLREFLGKAGFCRLFIPGFAEMAAPLYPLTKPGTLFNWGPDQQKAFQEIKQALLTAPALGLPDLTKPFELFVDEKQGYAKGVLTQKLGPWRRPVAYLSKKLDPVAAGWPPCLRMVAAIAVLTKDAGKLTMGQPLVILAPHAVEALVKQPPDRWLSNARMTHYQALLLDTDRVQFGPVVALNPATLLPLPEEGLQHDCLDILAEAHGTRSDLMDQPLPDADHTWYTDGSSFLQEGQRKAGAAVTTETEVIWARALPAGTSAQRAELIALTQALKMAEGKKLNVYTDSRYAFATAHIHGEIYRRRGWLTSEGKEIKNKDEILALLKALFLPKRLSIIHCPGHQKGNSAEARGNRMADQAAREVATRETPETSTLLAGKRTADGSEFEKRTADGSEFESPKKKAKVE

SEQ ID NO: 2385 - protein, 2096 aa, synthetic construct
MPAAKRVKLDGGDKKYSIGLDIGTNSVGWAVITDEYKVPSKKFKVLGNTDRHSIKKNLIGALLFDSGETAEATRLKRTARRRYTRRKNRICYLQEIFSNEMAKVDDSFFHRLEESFLVEEDKKHERHPIFGNIVDEVAYHEKYPTIYHLRKKLVDSTDKADLRLIYLALAHMIKFRGHFLIEGDLNPDNSDVDKLFIQLVQTYNQLFEENPINASGVDAKAILSARLSKSRRLENLIAQLPGEKKNGLFGNLIALSLGLTPNFKSNFDLAEDAKLQLSKDTYDDDLDNLLAQIGDQYADLFLAAKNLSDAILLSDILRVNTEITKAPLSASMIKRYDEHHQDLTLLKALVRQQLPEKYKEIFFDQSKNGYAGYIDGGASQEEFYKFIKPILEKMDGTEELLVKLNREDLLRKQRTFDNGSIPHQIHLGELHAILRRQEDFYPFLKDNREKIEKILTFRIPYYVGPLARGNSRFAWMTRKSEETITPWNFEEVVDKGASAQSFIERMTNFDKNLPNEKVLPKHSLLYEYFTVYNELTKVKYVTEGMRKPAFLSGEQKKAIVDLLFKTNRKVTVKQLKEDYFKKIECFDSVEISGVEDRFNASLGTYHDLLKIIKDKDFLDNEENEDILEDIVLTLTLFEDREMIEERLKTYAHLFDDKVMKQLKRRRYTGWGRLSRKLINGIRDKQSGKTILDFLKSDGFANRNFMQLIHDDSLTFKEDIQKAQVSGQGDSLHEHIANLAGSPAIKKGILQTVKVVDELVKVMGRHKPENIVIEMARENQTTQKGQKNSRERMKRIEEGIKELGSQILKEHPVENTQLQNEKLYLYYLQNGRDMYVDQELDINRLSDYDVDHIVPQSFLKDDSIDNKVLTRSDKARGKSDNVPSEEVVKKMKNYWRQLLNAKLITQRKFDNLTKAERGGLSELDKAGFIKRQLVETRQITKHVAQILDSRMNTKYDENDKLIREVKVITLKSKLVSDFRKDFQFYKVREINNYHHAHDAYLNAVVGTALIKKYPKLESEFVYGDYKVYDVRKMIAKSEQEIGKATAKYFFYSNIMNFFKTEITLANGEIRKRPLIETNGETGEIVWDKGRDFATVRKVLSMPQVNIVKKTEVQTGGFSKESILPKRNSDKLIARKKDWDPKKYGGFDSPTVAYSVLVVAKVEKGKSKKLKSVKELLGITIMERSSFEKNPIDFLEAKGYKEVKKDLIIKLPKYSLFELENGRKRMLASAGELQKGNELALPSKYVNFLYLASHYEKLKGSPEDNEQKQLFVEQHKHYLDEIIEQISEFSKRVILADANLDKVLSAYNKHRDKPIREQAENIIHLFTLTNLGAPAAFKYFDTTIDRKRYTSTKEVLDATLIHQSITGLYETRIDLSQLGGDGGGGGEAAAKPAPGGTLNIEDEYRLHETSKEPDVSLGSTWLSDFPQAWAETGGMGLAVRQAPLIIPLKATSTPVSIKQYPMSQEARLGIKPHIQRLLDQGILVPCQSPWNTPLLPVKKPGTNDYRPVQDLREVNKRVEDIHPTVPNPYNLLSGLPPSHQWYTVLDLKDAFFCLRLHPTSQPLFAFEWRDPEMGISGQLTWTRLPQGFKNSPTLFNEALHRDLAGFRIQHPDLILLQYVDDLLLAATSELDCQQGTRALLQTLGDLGYRASAKKAQICQKQVKYLGYLLKEGQRWLTEARKETVMGQPIPKTPRQLREFLGKAGFCRLFIPGFAEMAAPLYPLTKPGTLFNWGPDQQKAFQEIKQALLTAPALGLPDLTKPFELFVDEKQGYAKGVLTQKLGPWRRPVAYLSKKLDPVAAGWPPCLRMVAAIAVLTKDAGKLTMGQPLVILAPHAVEALVKQPPDRWLSNARMTHYQALLLDTDRVQFGPVVALNPATLLPLPEEGLQHDCLDILAEAHGTRSDLMDQPLPDADHTWYTDGSSFLQEGQRKAGAAVTTETEVIWARALPAGTSAQRAELIALTQALKMAEGKKLNVYTDSRYAFATAHIHGEIYRRRGWLTSEGKEIKNKDEILALLKALFLPKRLSIIHCPGHQKGNSAEARGNRMADQAAREVATRETPETSTLLAGKRTADGSEFEKRTADGSEFESPKKKAKVE

SEQ ID NO: 2386 - protein, 2096 aa, synthetic construct
MPAAKRVKLDGGDKKYSIGLDIGTNSVGWAVITDEYKVPSKKFKVLGNTDRHSIKKNLIGALLFDSGETAEATRLKRTARRRYTRRKNRICYLQEIFSNEMAKVDDSFFHRLEESFLVEEDKKHERHPIFGNIVDEVAYHEKYPTIYHLRKKLVDSTDKADLRLIYLALAHMIKFRGHFLIEGDLNPDNSDVDKLFIQLVQTYNQLFEENPINASGVDAKAILSARLSKSRRLENLIAQLPGEKKNGLFGNLIALSLGLTPNFKSNFDLAEDAKLQLSKDTYDDDLDNLLAQIGDQYADLFLAAKNLSDAILLSDILRVNTEITKAPLSASMIKRYDEHHQDLTLLKALVRQQLPEKYKEIFFDQSKNGYAGYIDGGASQEEFYKFIKPILEKMDGTEELLVKLNREDLLRKQRTFDNGSIPHQIHLGELHAILRRQEDFYPFLKDNREKIEKILTFRIPYYVGPLARGNSRFAWMTRKSEETITPWNFEEVVDKGASAQSFIERMTNFDKNLPNEKVLPKHSLLYEYFTVYNELTKVKYVTEGMRKPAFLSGEQKKAIVDLLFKTNRKVTVKQLKEDYFKKIECFDSVEISGVEDRFNASLGTYHDLLKIIKDKDFLDNEENEDILEDIVLTLTLFEDREMIEERLKTYAHLFDDKVMKQLKRRRYTGWGRLSRKLINGIRDKQSGKTILDFLKSDGFANRNFMQLIHDDSLTFKEDIQKAQVSGQGDSLHEHIANLAGSPAIKKGILQTVKVVDELVKVMGRHKPENIVIEMARENQTTQKGQKNSRERMKRIEEGIKELGSQILKEHPVENTQLQNEKLYLYYLQNGRDMYVDQELDINRLSDYDVDHIVPQSFLKDDSIDNKVLTRSDKARGKSDNVPSEEVVKKMKNYWRQLLNAKLITQRKFDNLTKAERGGLSELDKAGFIKRQLVETRQITKHVAQILDSRMNTKYDENDKLIREVKVITLKSKLVSDFRKDFQFYKVREINNYHHAHDAYLNAVVGTALIKKYPKLESEFVYGDYKVYDVRKMIAKSEQEIGKATAKYFFYSNIMNFFKTEITLANGEIRKRPLIETNGETGEIVWDKGRDFATVRKVLSMPQVNIVKKTEVQTGGFSKESILPKRNSDKLIARKKDWDPKKYGGFDSPTVAYSVLVVAKVEKGKSKKLKSVKELLGITIMERSSFEKNPIDFLEAKGYKEVKKDLIIKLPKYSLFELENGRKRMLASAGELQKGNELALPSKYVNFLYLASHYEKLKGSPEDNEQKQLFVEQHKHYLDEIIEQISEFSKRVILADANLDKVLSAYNKHRDKPIREQAENIIHLFTLTNLGAPAAFKYFDTTIDRKRYTSTKEVLDATLIHQSITGLYETRIDLSQLGGDGGGSSGGSEAAAKGGTLNIEDEYRLHETSKEPDVSLGSTWLSDFPQAWAETGGMGLAVRQAPLIIPLKATSTPVSIKQYPMSQEARLGIKPHIQRLLDQGILVPCQSPWNTPLLPVKKPGTNDYRPVQDLREVNKRVEDIHPTVPNPYNLLSGLPPSHQWYTVLDLKDAFFCLRLHPTSQPLFAFEWRDPEMGISGQLTWTRLPQGFKNSPTLFNEALHRDLAGFRIQHPDLILLQYVDDLLLAATSELDCQQGTRALLQTLGDLGYRASAKKAQICQKQVKYLGYLLKEGQRWLTEARKETVMGQPIPKTPRQLREFLGKAGFCRLFIPGFAEMAAPLYPLTKPGTLFNWGPDQQKAFQEIKQALLTAPALGLPDLTKPFELFVDEKQGYAKGVLTQKLGPWRRPVAYLSKKLDPVAAGWPPCLRMVAAIAVLTKDAGKLTMGQPLVILAPHAVEALVKQPPDRWLSNARMTHYQALLLDTDRVQFGPVVALNPATLLPLPEEGLQHDCLDILAEAHGTRSDLMDQPLPDADHTWYTDGSSFLQEGQRKAGAAVTTETEVIWARALPAGTSAQRAELIALTQALKMAEGKKLNVYTDSRYAFATAHIHGEIYRRRGWLTSEGKEIKNKDEILALLKALFLPKRLSIIHCPGHQKGNSAEARGNRMADQAAREVATRETPETSTLLAGKRTADGSEFEKRTADGSEFESPKKKAKVE

SEQ ID NO: 2387 - protein, 2094 aa, synthetic construct
MPAAKRVKLDGGDKKYSIGLDIGTNSVGWAVITDEYKVPSKKFKVLGNTDRHSIKKNLIGALLFDSGETAEATRLKRTARRRYTRRKNRICYLQEIFSNEMAKVDDSFFHRLEESFLVEEDKKHERHPIFGNIVDEVAYHEKYPTIYHLRKKLVDSTDKADLRLIYLALAHMIKFRGHFLIEGDLNPDNSDVDKLFIQLVQTYNQLFEENPINASGVDAKAILSARLSKSRRLENLIAQLPGEKKNGLFGNLIALSLGLTPNFKSNFDLAEDAKLQLSKDTYDDDLDNLLAQIGDQYADLFLAAKNLSDAILLSDILRVNTEITKAPLSASMIKRYDEHHQDLTLLKALVRQQLPEKYKEIFFDQSKNGYAGYIDGGASQEEFYKFIKPILEKMDGTEELLVKLNREDLLRKQRTFDNGSIPHQIHLGELHAILRRQEDFYPFLKDNREKIEKILTFRIPYYVGPLARGNSRFAWMTRKSEETITPWNFEEVVDKGASAQSFIERMTNFDKNLPNEKVLPKHSLLYEYFTVYNELTKVKYVTEGMRKPAFLSGEQKKAIVDLLFKTNRKVTVKQLKEDYFKKIECFDSVEISGVEDRFNASLGTYHDLLKIIKDKDFLDNEENEDILEDIVLTLTLFEDREMIEERLKTYAHLFDDKVMKQLKRRRYTGWGRLSRKLINGIRDKQSGKTILDFLKSDGFANRNFMQLIHDDSLTFKEDIQKAQVSGQGDSLHEHIANLAGSPAIKKGILQTVKVVDELVKVMGRHKPENIVIEMARENQTTQKGQKNSRERMKRIEEGIKELGSQILKEHPVENTQLQNEKLYLYYLQNGRDMYVDQELDINRLSDYDVDHIVPQSFLKDDSIDNKVLTRSDKARGKSDNVPSEEVVKKMKNYWRQLLNAKLITQRKFDNLTKAERGGLSELDKAGFIKRQLVETRQITKHVAQILDSRMNTKYDENDKLIREVKVITLKSKLVSDFRKDFQFYKVREINNYHHAHDAYLNAVVGTALIKKYPKLESEFVYGDYKVYDVRKMIAKSEQEIGKATAKYFFYSNIMNFFKTEITLANGEIRKRPLIETNGETGEIVWDKGRDFATVRKVLSMPQVNIVKKTEVQTGGFSKESILPKRNSDKLIARKKDWDPKKYGGFDSPTVAYSVLVVAKVEKGKSKKLKSVKELLGITIMERSSFEKNPIDFLEAKGYKEVKKDLIIKLPKYSLFELENGRKRMLASAGELQKGNELALPSKYVNFLYLASHYEKLKGSPEDNEQKQLFVEQHKHYLDEIIEQISEFSKRVILADANLDKVLSAYNKHRDKPIREQAENIIHLFTLTNLGAPAAFKYFDTTIDRKRYTSTKEVLDATLIHQSITGLYETRIDLSQLGGDGGGGSPAPGSSGGTLNIEDEYRLHETSKEPDVSLGSTWLSDFPQAWAETGGMGLAVRQAPLIIPLKATSTPVSIKQYPMSQEARLGIKPHIQRLLDQGILVPCQSPWNTPLLPVKKPGTNDYRPVQDLREVNKRVEDIHPTVPNPYNLLSGLPPSHQWYTVLDLKDAFFCLRLHPTSQPLFAFEWRDPEMGISGQLTWTRLPQGFKNSPTLFNEALHRDLAGFRIQHPDLILLQYVDDLLLAATSELDCQQGTRALLQTLGDLGYRASAKKAQICQKQVKYLGYLLKEGQRWLTEARKETVMGQPIPKTPRQLREFLGKAGFCRLFIPGFAEMAAPLYPLTKPGTLFNWGPDQQKAFQEIKQALLTAPALGLPDLTKPFELFVDEKQGYAKGVLTQKLGPWRRPVAYLSKKLDPVAAGWPPCLRMVAAIAVLTKDAGKLTMGQPLVILAPHAVEALVKQPPDRWLSNARMTHYQALLLDTDRVQFGPVVALNPATLLPLPEEGLQHDCLDILAEAHGTRSDLMDQPLPDADHTWYTDGSSFLQEGQRKAGAAVTTETEVIWARALPAGTSAQRAELIALTQALKMAEGKKLNVYTDSRYAFATAHIHGEIYRRRGWLTSEGKEIKNKDEILALLKALFLPKRLSIIHCPGHQKGNSAEARGNRMADQAAREVATRETPETSTLLAGKRTADGSEFEKRTADGSEFESPKKKAKVE

SEQ ID NO: 2388 - protein, 2101 aa, synthetic construct
MPAAKRVKLDGGDKKYSIGLDIGTNSVGWAVITDEYKVPSKKFKVLGNTDRHSIKKNLIGALLFDSGETAEATRLKRTARRRYTRRKNRICYLQEIFSNEMAKVDDSFFHRLEESFLVEEDKKHERHPIFGNIVDEVAYHEKYPTIYHLRKKLVDSTDKADLRLIYLALAHMIKFRGHFLIEGDLNPDNSDVDKLFIQLVQTYNQLFEENPINASGVDAKAILSARLSKSRRLENLIAQLPGEKKNGLFGNLIALSLGLTPNFKSNFDLAEDAKLQLSKDTYDDDLDNLLAQIGDQYADLFLAAKNLSDAILLSDILRVNTEITKAPLSASMIKRYDEHHQDLTLLKALVRQQLPEKYKEIFFDQSKNGYAGYIDGGASQEEFYKFIKPILEKMDGTEELLVKLNREDLLRKQRTFDNGSIPHQIHLGELHAILRRQEDFYPFLKDNREKIEKILTFRIPYYVGPLARGNSRFAWMTRKSEETITPWNFEEVVDKGASAQSFIERMTNFDKNLPNEKVLPKHSLLYEYFTVYNELTKVKYVTEGMRKPAFLSGEQKKAIVDLLFKTNRKVTVKQLKEDYFKKIECFDSVEISGVEDRFNASLGTYHDLLKIIKDKDFLDNEENEDILEDIVLTLTLFEDREMIEERLKTYAHLFDDKVMKQLKRRRYTGWGRLSRKLINGIRDKQSGKTILDFLKSDGFANRNFMQLIHDDSLTFKEDIQKAQVSGQGDSLHEHIANLAGSPAIKKGILQTVKVVDELVKVMGRHKPENIVIEMARENQTTQKGQKNSRERMKRIEEGIKELGSQILKEHPVENTQLQNEKLYLYYLQNGRDMYVDQELDINRLSDYDVDHIVPQSFLKDDSIDNKVLTRSDKARGKSDNVPSEEVVKKMKNYWRQLLNAKLITQRKFDNLTKAERGGLSELDKAGFIKRQLVETRQITKHVAQILDSRMNTKYDENDKLIREVKVITLKSKLVSDFRKDFQFYKVREINNYHHAHDAYLNAVVGTALIKKYPKLESEFVYGDYKVYDVRKMIAKSEQEIGKATAKYFFYSNIMNFFKTEITLANGEIRKRPLIETNGETGEIVWDKGRDFATVRKVLSMPQVNIVKKTEVQTGGFSKESILPKRNSDKLIARKKDWDPKKYGGFDSPTVAYSVLVVAKVEKGKSKKLKSVKELLGITIMERSSFEKNPIDFLEAKGYKEVKKDLIIKLPKYSLFELENGRKRMLASAGELQKGNELALPSKYVNFLYLASHYEKLKGSPEDNEQKQLFVEQHKHYLDEIIEQISEFSKRVILADANLDKVLSAYNKHRDKPIREQAENIIHLFTLTNLGAPAAFKYFDTTIDRKRYTSTKEVLDATLIHQSITGLYETRIDLSQLGGDGGSGSETPGTSESATPESGGTLNIEDEYRLHETSKEPDVSLGSTWLSDFPQAWAETGGMGLAVRQAPLIIPLKATSTPVSIKQYPMSQEARLGIKPHIQRLLDQGILVPCQSPWNTPLLPVKKPGTNDYRPVQDLREVNKRVEDIHPTVPNPYNLLSGLPPSHQWYTVLDLKDAFFCLRLHPTSQPLFAFEWRDPEMGISGQLTWTRLPQGFKNSPTLFNEALHRDLAGFRIQHPDLILLQYVDDLLLAATSELDCQQGTRALLQTLGDLGYRASAKKAQICQKQVKYLGYLLKEGQRWLTEARKETVMGQPIPKTPRQLREFLGKAGFCRLFIPGFAEMAAPLYPLTKPGTLFNWGPDQQKAFQEIKQALLTAPALGLPDLTKPFELFVDEKQGYAKGVLTQKLGPWRRPVAYLSKKLDPVAAGWPPCLRMVAAIAVLTKDAGKLTMGQPLVILAPHAVEALVKQPPDRWLSNARMTHYQALLLDTDRVQFGPVVALNPATLLPLPEEGLQHDCLDILAEAHGTRSDLMDQPLPDADHTWYTDGSSFLQEGQRKAGAAVTTETEVIWARALPAGTSAQRAELIALTQALKMAEGKKLNVYTDSRYAFATAHIHGEIYRRRGWLTSEGKEIKNKDEILALLKALFLPKRLSIIHCPGHQKGNSAEARGNRMADQAAREVATRETPETSTLLAGKRTADGSEFEKRTADGSEFESPKKKAKVE

SEQ ID NO: 2389 - protein, 2091 aa, synthetic construct
MPAAKRVKLDGGDKKYSIGLDIGTNSVGWAVITDEYKVPSKKFKVLGNTDRHSIKKNLIGALLFDSGETAEATRLKRTARRRYTRRKNRICYLQEIFSNEMAKVDDSFFHRLEESFLVEEDKKHERHPIFGNIVDEVAYHEKYPTIYHLRKKLVDSTDKADLRLIYLALAHMIKFRGHFLIEGDLNPDNSDVDKLFIQLVQTYNQLFEENPINASGVDAKAILSARLSKSRRLENLIAQLPGEKKNGLFGNLIALSLGLTPNFKSNFDLAEDAKLQLSKDTYDDDLDNLLAQIGDQYADLFLAAKNLSDAILLSDILRVNTEITKAPLSASMIKRYDEHHQDLTLLKALVRQQLPEKYKEIFFDQSKNGYAGYIDGGASQEEFYKFIKPILEKMDGTEELLVKLNREDLLRKQRTFDNGSIPHQIHLGELHAILRRQEDFYPFLKDNREKIEKILTFRIPYYVGPLARGNSRFAWMTRKSEETITPWNFEEVVDKGASAQSFIERMTNFDKNLPNEKVLPKHSLLYEYFTVYNELTKVKYVTEGMRKPAFLSGEQKKAIVDLLFKTNRKVTVKQLKEDYFKKIECFDSVEISGVEDRFNASLGTYHDLLKIIKDKDFLDNEENEDILEDIVLTLTLFEDREMIEERLKTYAHLFDDKVMKQLKRRRYTGWGRLSRKLINGIRDKQSGKTILDFLKSDGFANRNFMQLIHDDSLTFKEDIQKAQVSGQGDSLHEHIANLAGSPAIKKGILQTVKVVDELVKVMGRHKPENIVIEMARENQTTQKGQKNSRERMKRIEEGIKELGSQILKEHPVENTQLQNEKLYLYYLQNGRDMYVDQELDINRLSDYDVDHIVPQSFLKDDSIDNKVLTRSDKARGKSDNVPSEEVVKKMKNYWRQLLNAKLITQRKFDNLTKAERGGLSELDKAGFIKRQLVETRQITKHVAQILDSRMNTKYDENDKLIREVKVITLKSKLVSDFRKDFQFYKVREINNYHHAHDAYLNAVVGTALIKKYPKLESEFVYGDYKVYDVRKMIAKSEQEIGKATAKYFFYSNIMNFFKTEITLANGEIRKRPLIETNGETGEIVWDKGRDFATVRKVLSMPQVNIVKKTEVQTGGFSKESILPKRNSDKLIARKKDWDPKKYGGFDSPTVAYSVLVVAKVEKGKSKKLKSVKELLGITIMERSSFEKNPIDFLEAKGYKEVKKDLIIKLPKYSLFELENGRKRMLASAGELQKGNELALPSKYVNFLYLASHYEKLKGSPEDNEQKQLFVEQHKHYLDEIIEQISEFSKRVILADANLDKVLSAYNKHRDKPIREQAENIIHLFTLTNLGAPAAFKYFDTTIDRKRYTSTKEVLDATLIHQSITGLYETRIDLSQLGGDGGGGSPAPGGTLNIEDEYRLHETSKEPDVSLGSTWLSDFPQAWAETGGMGLAVRQAPLIIPLKATSTPVSIKQYPMSQEARLGIKPHIQRLLDQGILVPCQSPWNTPLLPVKKPGTNDYRPVQDLREVNKRVEDIHPTVPNPYNLLSGLPPSHQWYTVLDLKDAFFCLRLHPTSQPLFAFEWRDPEMGISGQLTWTRLPQGFKNSPTLFNEALHRDLAGFRIQHPDLILLQYVDDLLLAATSELDCQQGTRALLQTLGDLGYRASAKKAQICQKQVKYLGYLLKEGQRWLTEARKETVMGQPIPKTPRQLREFLGKAGFCRLFIPGFAEMAAPLYPLTKPGTLFNWGPDQQKAFQEIKQALLTAPALGLPDLTKPFELFVDEKQGYAKGVLTQKLGPWRRPVAYLSKKLDPVAAGWPPCLRMVAAIAVLTKDAGKLTMGQPLVILAPHAVEALVKQPPDRWLSNARMTHYQALLLDTDRVQFGPVVALNPATLLPLPEEGLQHDCLDILAEAHGTRSDLMDQPLPDADHTWYTDGSSFLQEGQRKAGAAVTTETEVIWARALPAGTSAQRAELIALTQALKMAEGKKLNVYTDSRYAFATAHIHGEIYRRRGWLTSEGKEIKNKDEILALLKALFLPKRLSIIHCPGHQKGNSAEARGNRMADQAAREVATRETPETSTLLAGKRTADGSEFEKRTADGSEFESPKKKAKVE

SEQ ID NO: 2390 - protein, 2096 aa, synthetic construct
MPAAKRVKLDGGDKKYSIGLDIGTNSVGWAVITDEYKVPSKKFKVLGNTDRHSIKKNLIGALLFDSGETAEATRLKRTARRRYTRRKNRICYLQEIFSNEMAKVDDSFFHRLEESFLVEEDKKHERHPIFGNIVDEVAYHEKYPTIYHLRKKLVDSTDKADLRLIYLALAHMIKFRGHFLIEGDLNPDNSDVDKLFIQLVQTYNQLFEENPINASGVDAKAILSARLSKSRRLENLIAQLPGEKKNGLFGNLIALSLGLTPNFKSNFDLAEDAKLQLSKDTYDDDLDNLLAQIGDQYADLFLAAKNLSDAILLSDILRVNTEITKAPLSASMIKRYDEHHQDLTLLKALVRQQLPEKYKEIFFDQSKNGYAGYIDGGASQEEFYKFIKPILEKMDGTEELLVKLNREDLLRKQRTFDNGSIPHQIHLGELHAILRRQEDFYPFLKDNREKIEKILTFRIPYYVGPLARGNSRFAWMTRKSEETITPWNFEEVVDKGASAQSFIERMTNFDKNLPNEKVLPKHSLLYEYFTVYNELTKVKYVTEGMRKPAFLSGEQKKAIVDLLFKTNRKVTVKQLKEDYFKKIECFDSVEISGVEDRFNASLGTYHDLLKIIKDKDFLDNEENEDILEDIVLTLTLFEDREMIEERLKTYAHLFDDKVMKQLKRRRYTGWGRLSRKLINGIRDKQSGKTILDFLKSDGFANRNFMQLIHDDSLTFKEDIQKAQVSGQGDSLHEHIANLAGSPAIKKGILQTVKVVDELVKVMGRHKPENIVIEMARENQTTQKGQKNSRERMKRIEEGIKELGSQILKEHPVENTQLQNEKLYLYYLQNGRDMYVDQELDINRLSDYDVDHIVPQSFLKDDSIDNKVLTRSDKARGKSDNVPSEEVVKKMKNYWRQLLNAKLITQRKFDNLTKAERGGLSELDKAGFIKRQLVETRQITKHVAQILDSRMNTKYDENDKLIREVKVITLKSKLVSDFRKDFQFYKVREINNYHHAHDAYLNAVVGTALIKKYPKLESEFVYGDYKVYDVRKMIAKSEQEIGKATAKYFFYSNIMNFFKTEITLANGEIRKRPLIETNGETGEIVWDKGRDFATVRKVLSMPQVNIVKKTEVQTGGFSKESILPKRNSDKLIARKKDWDPKKYGGFDSPTVAYSVLVVAKVEKGKSKKLKSVKELLGITIMERSSFEKNPIDFLEAKGYKEVKKDLIIKLPKYSLFELENGRKRMLASAGELQKGNELALPSKYVNFLYLASHYEKLKGSPEDNEQKQLFVEQHKHYLDEIIEQISEFSKRVILADANLDKVLSAYNKHRDKPIREQAENIIHLFTLTNLGAPAAFKYFDTTIDRKRYTSTKEVLDATLIHQSITGLYETRIDLSQLGGDGGGSSGGGEAAAKGGTLNIEDEYRLHETSKEPDVSLGSTWLSDFPQAWAETGGMGLAVRQAPLIIPLKATSTPVSIKQYPMSQEARLGIKPHIQRLLDQGILVPCQSPWNTPLLPVKKPGTNDYRPVQDLREVNKRVEDIHPTVPNPYNLLSGLPPSHQWYTVLDLKDAFFCLRLHPTSQPLFAFEWRDPEMGISGQLTWTRLPQGFKNSPTLFNEALHRDLAGFRIQHPDLILLQYVDDLLLAATSELDCQQGTRALLQTLGDLGYRASAKKAQICQKQVKYLGYLLKEGQRWLTEARKETVMGQPIPKTPRQLREFLGKAGFCRLFIPGFAEMAAPLYPLTKPGTLFNWGPDQQKAFQEIKQALLTAPALGLPDLTKPFELFVDEKQGYAKGVLTQKLGPWRRPVAYLSKKLDPVAAGWPPCLRMVAAIAVLTKDAGKLTMGQPLVILAPHAVEALVKQPPDRWLSNARMTHYQALLLDTDRVQFGPVVALNPATLLPLPEEGLQHDCLDILAEAHGTRSDLMDQPLPDADHTWYTDGSSFLQEGQRKAGAAVTTETEVIWARALPAGTSAQRAELIALTQALKMAEGKKLNVYTDSRYAFATAHIHGEIYRRRGWLTSEGKEIKNKDEILALLKALFLPKRLSIIHCPGHQKGNSAEARGNRMADQAAREVATRETPETSTLLAGKRTADGSEFEKRTADGSEFESPKKKAKVE

SEQ ID NO: 2391 - protein, 2096 aa, synthetic construct
MPAAKRVKLDGGDKKYSIGLDIGTNSVGWAVITDEYKVPSKKFKVLGNTDRHSIKKNLIGALLFDSGETAEATRLKRTARRRYTRRKNRICYLQEIFSNEMAKVDDSFFHRLEESFLVEEDKKHERHPIFGNIVDEVAYHEKYPTIYHLRKKLVDSTDKADLRLIYLALAHMIKFRGHFLIEGDLNPDNSDVDKLFIQLVQTYNQLFEENPINASGVDAKAILSARLSKSRRLENLIAQLPGEKKNGLFGNLIALSLGLTPNFKSNFDLAEDAKLQLSKDTYDDDLDNLLAQIGDQYADLFLAAKNLSDAILLSDILRVNTEITKAPLSASMIKRYDEHHQDLTLLKALVRQQLPEKYKEIFFDQSKNGYAGYIDGGASQEEFYKFIKPILEKMDGTEELLVKLNREDLLRKQRTFDNGSIPHQIHLGELHAILRRQEDFYPFLKDNREKIEKILTFRIPYYVGPLARGNSRFAWMTRKSEETITPWNFEEVVDKGASAQSFIERMTNFDKNLPNEKVLPKHSLLYEYFTVYNELTKVKYVTEGMRKPAFLSGEQKKAIVDLLFKTNRKVTVKQLKEDYFKKIECFDSVEISGVEDRFNASLGTYHDLLKIIKDKDFLDNEENEDILEDIVLTLTLFEDREMIEERLKTYAHLFDDKVMKQLKRRRYTGWGRLSRKLINGIRDKQSGKTILDFLKSDGFANRNFMQLIHDDSLTFKEDIQKAQVSGQGDSLHEHIANLAGSPAIKKGILQTVKVVDELVKVMGRHKPENIVIEMARENQTTQKGQKNSRERMKRIEEGIKELGSQILKEHPVENTQLQNEKLYLYYLQNGRDMYVDQELDINRLSDYDVDHIVPQSFLKDDSIDNKVLTRSDKARGKSDNVPSEEVVKKMKNYWRQLLNAKLITQRKFDNLTKAERGGLSELDKAGFIKRQLVETRQITKHVAQILDSRMNTKYDENDKLIREVKVITLKSKLVSDFRKDFQFYKVREINNYHHAHDAYLNAVVGTALIKKYPKLESEFVYGDYKVYDVRKMIAKSEQEIGKATAKYFFYSNIMNFFKTEITLANGEIRKRPLIETNGETGEIVWDKGRDFATVRKVLSMPQVNIVKKTEVQTGGFSKESILPKRNSDKLIARKKDWDPKKYGGFDSPTVAYSVLVVAKVEKGKSKKLKSVKELLGITIMERSSFEKNPIDFLEAKGYKEVKKDLIIKLPKYSLFELENGRKRMLASAGELQKGNELALPSKYVNFLYLASHYEKLKGSPEDNEQKQLFVEQHKHYLDEIIEQISEFSKRVILADANLDKVLSAYNKHRDKPIREQAENIIHLFTLTNLGAPAAFKYFDTTIDRKRYTSTKEVLDATLIHQSITGLYETRIDLSQLGGDGGEAAAKGGGPAPGGTLNIEDEYRLHETSKEPDVSLGSTWLSDFPQAWAETGGMGLAVRQAPLIIPLKATSTPVSIKQYPMSQEARLGIKPHIQRLLDQGILVPCQSPWNTPLLPVKKPGTNDYRPVQDLREVNKRVEDIHPTVPNPYNLLSGLPPSHQWYTVLDLKDAFFCLRLHPTSQPLFAFEWRDPEMGISGQLTWTRLPQGFKNSPTLFNEALHRDLAGFRIQHPDLILLQYVDDLLLAATSELDCQQGTRALLQTLGDLGYRASAKKAQICQKQVKYLGYLLKEGQRWLTEARKETVMGQPIPKTPRQLREFLGKAGFCRLFIPGFAEMAAPLYPLTKPGTLFNWGPDQQKAFQEIKQALLTAPALGLPDLTKPFELFVDEKQGYAKGVLTQKLGPWRRPVAYLSKKLDPVAAGWPPCLRMVAAIAVLTKDAGKLTMGQPLVILAPHAVEALVKQPPDRWLSNARMTHYQALLLDTDRVQFGPVVALNPATLLPLPEEGLQHDCLDILAEAHGTRSDLMDQPLPDADHTWYTDGSSFLQEGQRKAGAAVTTETEVIWARALPAGTSAQRAELIALTQALKMAEGKKLNVYTDSRYAFATAHIHGEIYRRRGWLTSEGKEIKNKDEILALLKALFLPKRLSIIHCPGHQKGNSAEARGNRMADQAAREVATRETPETSTLLAGKRTADGSEFEKRTADGSEFESPKKKAKVE

SEQ ID NO: 2392 - protein, 2096 aa, synthetic construct
MPAAKRVKLDGGDKKYSIGLDIGTNSVGWAVITDEYKVPSKKFKVLGNTDRHSIKKNLIGALLFDSGETAEATRLKRTARRRYTRRKNRICYLQEIFSNEMAKVDDSFFHRLEESFLVEEDKKHERHPIFGNIVDEVAYHEKYPTIYHLRKKLVDSTDKADLRLIYLALAHMIKFRGHFLIEGDLNPDNSDVDKLFIQLVQTYNQLFEENPINASGVDAKAILSARLSKSRRLENLIAQLPGEKKNGLFGNLIALSLGLTPNFKSNFDLAEDAKLQLSKDTYDDDLDNLLAQIGDQYADLFLAAKNLSDAILLSDILRVNTEITKAPLSASMIKRYDEHHQDLTLLKALVRQQLPEKYKEIFFDQSKNGYAGYIDGGASQEEFYKFIKPILEKMDGTEELLVKLNREDLLRKQRTFDNGSIPHQIHLGELHAILRRQEDFYPFLKDNREKIEKILTFRIPYYVGPLARGNSRFAWMTRKSEETITPWNFEEVVDKGASAQSFIERMTNFDKNLPNEKVLPKHSLLYEYFTVYNELTKVKYVTEGMRKPAFLSGEQKKAIVDLLFKTNRKVTVKQLKEDYFKKIECFDSVEISGVEDRFNASLGTYHDLLKIIKDKDFLDNEENEDILEDIVLTLTLFEDREMIEERLKTYAHLFDDKVMKQLKRRRYTGWGRLSRKLINGIRDKQSGKTILDFLKSDGFANRNFMQLIHDDSLTFKEDIQKAQVSGQGDSLHEHIANLAGSPAIKKGILQTVKVVDELVKVMGRHKPENIVIEMARENQTTQKGQKNSRERMKRIEEGIKELGSQILKEHPVENTQLQNEKLYLYYLQNGRDMYVDQELDINRLSDYDVDHIVPQSFLKDDSIDNKVLTRSDKARGKSDNVPSEEVVKKMKNYWRQLLNAKLITQRKFDNLTKAERGGLSELDKAGFIKRQLVETRQITKHVAQILDSRMNTKYDENDKLIREVKVITLKSKLVSDFRKDFQFYKVREINNYHHAHDAYLNAVVGTALIKKYPKLESEFVYGDYKVYDVRKMIAKSEQEIGKATAKYFFYSNIMNFFKTEITLANGEIRKRPLIETNGETGEIVWDKGRDFATVRKVLSMPQVNIVKKTEVQTGGFSKESILPKRNSDKLIARKKDWDPKKYGGFDSPTVAYSVLVVAKVEKGKSKKLKSVKELLGITIMERSSFEKNPIDFLEAKGYKEVKKDLIIKLPKYSLFELENGRKRMLASAGELQKGNELALPSKYVNFLYLASHYEKLKGSPEDNEQKQLFVEQHKHYLDEIIEQISEFSKRVILADANLDKVLSAYNKHRDKPIREQAENIIHLFTLTNLGAPAAFKYFDTTIDRKRYTSTKEVLDATLIHQSITGLYETRIDLSQLGGDGGGGGPAPEAAAKGGTLNIEDEYRLHETSKEPDVSLGSTWLSDFPQAWAETGGMGLAVRQAPLIIPLKATSTPVSIKQYPMSQEARLGIKPHIQRLLDQGILVPCQSPWNTPLLPVKKPGTNDYRPVQDLREVNKRVEDIHPTVPNPYNLLSGLPPSHQWYTVLDLKDAFFCLRLHPTSQPLFAFEWRDPEMGISGQLTWTRLPQGFKNSPTLFNEALHRDLAGFRIQHPDLILLQYVDDLLLAATSELDCQQGTRALLQTLGDLGYRASAKKAQICQKQVKYLGYLLKEGQRWLTEARKETVMGQPIPKTPRQLREFLGKAGFCRLFIPGFAEMAAPLYPLTKPGTLFNWGPDQQKAFQEIKQALLTAPALGLPDLTKPFELFVDEKQGYAKGVLTQKLGPWRRPVAYLSKKLDPVAAGWPPCLRMVAAIAVLTKDAGKLTMGQPLVILAPHAVEALVKQPPDRWLSNARMTHYQALLLDTDRVQFGPVVALNPATLLPLPEEGLQHDCLDILAEAHGTRSDLMDQPLPDADHTWYTDGSSFLQEGQRKAGAAVTTETEVIWARALPAGTSAQRAELIALTQALKMAEGKKLNVYTDSRYAFATAHIHGEIYRRRGWLTSEGKEIKNKDEILALLKALFLPKRLSIIHCPGHQKGNSAEARGNRMADQAAREVATRETPETSTLLAGKRTADGSEFEKRTADGSEFESPKKKAKVE

SEQ ID NO: 2393 - protein, 2094 aa, synthetic construct
MPAAKRVKLDGGDKKYSIGLDIGTNSVGWAVITDEYKVPSKKFKVLGNTDRHSIKKNLIGALLFDSGETAEATRLKRTARRRYTRRKNRICYLQEIFSNEMAKVDDSFFHRLEESFLVEEDKKHERHPIFGNIVDEVAYHEKYPTIYHLRKKLVDSTDKADLRLIYLALAHMIKFRGHFLIEGDLNPDNSDVDKLFIQLVQTYNQLFEENPINASGVDAKAILSARLSKSRRLENLIAQLPGEKKNGLFGNLIALSLGLTPNFKSNFDLAEDAKLQLSKDTYDDDLDNLLAQIGDQYADLFLAAKNLSDAILLSDILRVNTEITKAPLSASMIKRYDEHHQDLTLLKALVRQQLPEKYKEIFFDQSKNGYAGYIDGGASQEEFYKFIKPILEKMDGTEELLVKLNREDLLRKQRTFDNGSIPHQIHLGELHAILRRQEDFYPFLKDNREKIEKILTFRIPYYVGPLARGNSRFAWMTRKSEETITPWNFEEVVDKGASAQSFIERMTNFDKNLPNEKVLPKHSLLYEYFTVYNELTKVKYVTEGMRKPAFLSGEQKKAIVDLLFKTNRKVTVKQLKEDYFKKIECFDSVEISGVEDRFNASLGTYHDLLKIIKDKDFLDNEENEDILEDIVLTLTLFEDREMIEERLKTYAHLFDDKVMKQLKRRRYTGWGRLSRKLINGIRDKQSGKTILDFLKSDGFANRNFMQLIHDDSLTFKEDIQKAQVSGQGDSLHEHIANLAGSPAIKKGILQTVKVVDELVKVMGRHKPENIVIEMARENQTTQKGQKNSRERMKRIEEGIKELGSQILKEHPVENTQLQNEKLYLYYLQNGRDMYVDQELDINRLSDYDVDHIVPQSFLKDDSIDNKVLTRSDKARGKSDNVPSEEVVKKMKNYWRQLLNAKLITQRKFDNLTKAERGGLSELDKAGFIKRQLVETRQITKHVAQILDSRMNTKYDENDKLIREVKVITLKSKLVSDFRKDFQFYKVREINNYHHAHDAYLNAVVGTALIKKYPKLESEFVYGDYKVYDVRKMIAKSEQEIGKATAKYFFYSNIMNFFKTEITLANGEIRKRPLIETNGETGEIVWDKGRDFATVRKVLSMPQVNIVKKTEVQTGGFSKESILPKRNSDKLIARKKDWDPKKYGGFDSPTVAYSVLVVAKVEKGKSKKLKSVKELLGITIMERSSFEKNPIDFLEAKGYKEVKKDLIIKLPKYSLFELENGRKRMLASAGELQKGNELALPSKYVNFLYLASHYEKLKGSPEDNEQKQLFVEQHKHYLDEIIEQISEFSKRVILADANLDKVLSAYNKHRDKPIREQAENIIHLFTLTNLGAPAAFKYFDTTIDRKRYTSTKEVLDATLIHQSITGLYETRIDLSQLGGDGGGSSGSSGSSGGTLNIEDEYRLHETSKEPDVSLGSTWLSDFPQAWAETGGMGLAVRQAPLIIPLKATSTPVSIKQYPMSQEARLGIKPHIQRLLDQGILVPCQSPWNTPLLPVKKPGTNDYRPVQDLREVNKRVEDIHPTVPNPYNLLSGLPPSHQWYTVLDLKDAFFCLRLHPTSQPLFAFEWRDPEMGISGQLTWTRLPQGFKNSPTLFNEALHRDLAGFRIQHPDLILLQYVDDLLLAATSELDCQQGTRALLQTLGDLGYRASAKKAQICQKQVKYLGYLLKEGQRWLTEARKETVMGQPIPKTPRQLREFLGKAGFCRLFIPGFAEMAAPLYPLTKPGTLFNWGPDQQKAFQEIKQALLTAPALGLPDLTKPFELFVDEKQGYAKGVLTQKLGPWRRPVAYLSKKLDPVAAGWPPCLRMVAAIAVLTKDAGKLTMGQPLVILAPHAVEALVKQPPDRWLSNARMTHYQALLLDTDRVQFGPVVALNPATLLPLPEEGLQHDCLDILAEAHGTRSDLMDQPLPDADHTWYTDGSSFLQEGQRKAGAAVTTETEVIWARALPAGTSAQRAELIALTQALKMAEGKKLNVYTDSRYAFATAHIHGEIYRRRGWLTSEGKEIKNKDEILALLKALFLPKRLSIIHCPGHQKGNSAEARGNRMADQAAREVATRETPETSTLLAGKRTADGSEFEKRTADGSEFESPKKKAKVE

SEQ ID NO: 2394 - protein, 2092 aa, synthetic construct
MPAAKRVKLDGGDKKYSIGLDIGTNSVGWAVITDEYKVPSKKFKVLGNTDRHSIKKNLIGALLFDSGETAEATRLKRTARRRYTRRKNRICYLQEIFSNEMAKVDDSFFHRLEESFLVEEDKKHERHPIFGNIVDEVAYHEKYPTIYHLRKKLVDSTDKADLRLIYLALAHMIKFRGHFLIEGDLNPDNSDVDKLFIQLVQTYNQLFEENPINASGVDAKAILSARLSKSRRLENLIAQLPGEKKNGLFGNLIALSLGLTPNFKSNFDLAEDAKLQLSKDTYDDDLDNLLAQIGDQYADLFLAAKNLSDAILLSDILRVNTEITKAPLSASMIKRYDEHHQDLTLLKALVRQQLPEKYKEIFFDQSKNGYAGYIDGGASQEEFYKFIKPILEKMDGTEELLVKLNREDLLRKQRTFDNGSIPHQIHLGELHAILRRQEDFYPFLKDNREKIEKILTFRIPYYVGPLARGNSRFAWMTRKSEETITPWNFEEVVDKGASAQSFIERMTNFDKNLPNEKVLPKHSLLYEYFTVYNELTKVKYVTEGMRKPAFLSGEQKKAIVDLLFKTNRKVTVKQLKEDYFKKIECFDSVEISGVEDRFNASLGTYHDLLKIIKDKDFLDNEENEDILEDIVLTLTLFEDREMIEERLKTYAHLFDDKVMKQLKRRRYTGWGRLSRKLINGIRDKQSGKTILDFLKSDGFANRNFMQLIHDDSLTFKEDIQKAQVSGQGDSLHEHIANLAGSPAIKKGILQTVKVVDELVKVMGRHKPENIVIEMARENQTTQKGQKNSRERMKRIEEGIKELGSQILKEHPVENTQLQNEKLYLYYLQNGRDMYVDQELDINRLSDYDVDHIVPQSFLKDDSIDNKVLTRSDKARGKSDNVPSEEVVKKMKNYWRQLLNAKLITQRKFDNLTKAERGGLSELDKAGFIKRQLVETRQITKHVAQILDSRMNTKYDENDKLIREVKVITLKSKLVSDFRKDFQFYKVREINNYHHAHDAYLNAVVGTALIKKYPKLESEFVYGDYKVYDVRKMIAKSEQEIGKATAKYFFYSNIMNFFKTEITLANGEIRKRPLIETNGETGEIVWDKGRDFATVRKVLSMPQVNIVKKTEVQTGGFSKESILPKRNSDKLIARKKDWDPKKYGGFDSPTVAYSVLVVAKVEKGKSKKLKSVKELLGITIMERSSFEKNPIDFLEAKGYKEVKKDLIIKLPKYSLFELENGRKRMLASAGELQKGNELALPSKYVNFLYLASHYEKLKGSPEDNEQKQLFVEQHKHYLDEIIEQISEFSKRVILADANLDKVLSAYNKHRDKPIREQAENIIHLFTLTNLGAPAAFKYFDTTIDRKRYTSTKEVLDATLIHQSITGLYETRIDLSQLGGDGGPAPAPAPGGTLNIEDEYRLHETSKEPDVSLGSTWLSDFPQAWAETGGMGLAVRQAPLIIPLKATSTPVSIKQYPMSQEARLGIKPHIQRLLDQGILVPCQSPWNTPLLPVKKPGTNDYRPVQDLREVNKRVEDIHPTVPNPYNLLSGLPPSHQWYTVLDLKDAFFCLRLHPTSQPLFAFEWRDPEMGISGQLTWTRLPQGFKNSPTLFNEALHRDLAGFRIQHPDLILLQYVDDLLLAATSELDCQQGTRALLQTLGDLGYRASAKKAQICQKQVKYLGYLLKEGQRWLTEARKETVMGQPIPKTPRQLREFLGKAGFCRLFIPGFAEMAAPLYPLTKPGTLFNWGPDQQKAFQEIKQALLTAPALGLPDLTKPFELFVDEKQGYAKGVLTQKLGPWRRPVAYLSKKLDPVAAGWPPCLRMVAAIAVLTKDAGKLTMGQPLVILAPHAVEALVKQPPDRWLSNARMTHYQALLLDTDRVQFGPVVALNPATLLPLPEEGLQHDCLDILAEAHGTRSDLMDQPLPDADHTWYTDGSSFLQEGQRKAGAAVTTETEVIWARALPAGTSAQRAELIALTQALKMAEGKKLNVYTDSRYAFATAHIHGEIYRRRGWLTSEGKEIKNKDEILALLKALFLPKRLSIIHCPGHQKGNSAEARGNRMADQAAREVATRETPETSTLLAGKRTADGSEFEKRTADGSEFESPKKKAKVE

SEQ ID NO: 2395 - protein, 2091 aa, synthetic construct
MPAAKRVKLDGGDKKYSIGLDIGTNSVGWAVITDEYKVPSKKFKVLGNTDRHSIKKNLIGALLFDSGETAEATRLKRTARRRYTRRKNRICYLQEIFSNEMAKVDDSFFHRLEESFLVEEDKKHERHPIFGNIVDEVAYHEKYPTIYHLRKKLVDSTDKADLRLIYLALAHMIKFRGHFLIEGDLNPDNSDVDKLFIQLVQTYNQLFEENPINASGVDAKAILSARLSKSRRLENLIAQLPGEKKNGLFGNLIALSLGLTPNFKSNFDLAEDAKLQLSKDTYDDDLDNLLAQIGDQYADLFLAAKNLSDAILLSDILRVNTEITKAPLSASMIKRYDEHHQDLTLLKALVRQQLPEKYKEIFFDQSKNGYAGYIDGGASQEEFYKFIKPILEKMDGTEELLVKLNREDLLRKQRTFDNGSIPHQIHLGELHAILRRQEDFYPFLKDNREKIEKILTFRIPYYVGPLARGNSRFAWMTRKSEETITPWNFEEVVDKGASAQSFIERMTNFDKNLPNEKVLPKHSLLYEYFTVYNELTKVKYVTEGMRKPAFLSGEQKKAIVDLLFKTNRKVTVKQLKEDYFKKIECFDSVEISGVEDRFNASLGTYHDLLKIIKDKDFLDNEENEDILEDIVLTLTLFEDREMIEERLKTYAHLFDDKVMKQLKRRRYTGWGRLSRKLINGIRDKQSGKTILDFLKSDGFANRNFMQLIHDDSLTFKEDIQKAQVSGQGDSLHEHIANLAGSPAIKKGILQTVKVVDELVKVMGRHKPENIVIEMARENQTTQKGQKNSRERMKRIEEGIKELGSQILKEHPVENTQLQNEKLYLYYLQNGRDMYVDQELDINRLSDYDVDHIVPQSFLKDDSIDNKVLTRSDKARGKSDNVPSEEVVKKMKNYWRQLLNAKLITQRKFDNLTKAERGGLSELDKAGFIKRQLVETRQITKHVAQILDSRMNTKYDENDKLIREVKVITLKSKLVSDFRKDFQFYKVREINNYHHAHDAYLNAVVGTALIKKYPKLESEFVYGDYKVYDVRKMIAKSEQEIGKATAKYFFYSNIMNFFKTEITLANGEIRKRPLIETNGETGEIVWDKGRDFATVRKVLSMPQVNIVKKTEVQTGGFSKESILPKRNSDKLIARKKDWDPKKYGGFDSPTVAYSVLVVAKVEKGKSKKLKSVKELLGITIMERSSFEKNPIDFLEAKGYKEVKKDLIIKLPKYSLFELENGRKRMLASAGELQKGNELALPSKYVNFLYLASHYEKLKGSPEDNEQKQLFVEQHKHYLDEIIEQISEFSKRVILADANLDKVLSAYNKHRDKPIREQAENIIHLFTLTNLGAPAAFKYFDTTIDRKRYTSTKEVLDATLIHQSITGLYETRIDLSQLGGDGGPAPGGGGGTLNIEDEYRLHETSKEPDVSLGSTWLSDFPQAWAETGGMGLAVRQAPLIIPLKATSTPVSIKQYPMSQEARLGIKPHIQRLLDQGILVPCQSPWNTPLLPVKKPGTNDYRPVQDLREVNKRVEDIHPTVPNPYNLLSGLPPSHQWYTVLDLKDAFFCLRLHPTSQPLFAFEWRDPEMGISGQLTWTRLPQGFKNSPTLFNEALHRDLAGFRIQHPDLILLQYVDDLLLAATSELDCQQGTRALLQTLGDLGYRASAKKAQICQKQVKYLGYLLKEGQRWLTEARKETVMGQPIPKTPRQLREFLGKAGFCRLFIPGFAEMAAPLYPLTKPGTLFNWGPDQQKAFQEIKQALLTAPALGLPDLTKPFELFVDEKQGYAKGVLTQKLGPWRRPVAYLSKKLDPVAAGWPPCLRMVAAIAVLTKDAGKLTMGQPLVILAPHAVEALVKQPPDRWLSNARMTHYQALLLDTDRVQFGPVVALNPATLLPLPEEGLQHDCLDILAEAHGTRSDLMDQPLPDADHTWYTDGSSFLQEGQRKAGAAVTTETEVIWARALPAGTSAQRAELIALTQALKMAEGKKLNVYTDSRYAFATAHIHGEIYRRRGWLTSEGKEIKNKDEILALLKALFLPKRLSIIHCPGHQKGNSAEARGNRMADQAAREVATRETPETSTLLAGKRTADGSEFEKRTADGSEFESPKKKAKVE

SEQ ID NO: 2396 - protein, 2097 aa, synthetic construct
MPAAKRVKLDGGDKKYSIGLDIGTNSVGWAVITDEYKVPSKKFKVLGNTDRHSIKKNLIGALLFDSGETAEATRLKRTARRRYTRRKNRICYLQEIFSNEMAKVDDSFFHRLEESFLVEEDKKHERHPIFGNIVDEVAYHEKYPTIYHLRKKLVDSTDKADLRLIYLALAHMIKFRGHFLIEGDLNPDNSDVDKLFIQLVQTYNQLFEENPINASGVDAKAILSARLSKSRRLENLIAQLPGEKKNGLFGNLIALSLGLTPNFKSNFDLAEDAKLQLSKDTYDDDLDNLLAQIGDQYADLFLAAKNLSDAILLSDILRVNTEITKAPLSASMIKRYDEHHQDLTLLKALVRQQLPEKYKEIFFDQSKNGYAGYIDGGASQEEFYKFIKPILEKMDGTEELLVKLNREDLLRKQRTFDNGSIPHQIHLGELHAILRRQEDFYPFLKDNREKIEKILTFRIPYYVGPLARGNSRFAWMTRKSEETITPWNFEEVVDKGASAQSFIERMTNFDKNLPNEKVLPKHSLLYEYFTVYNELTKVKYVTEGMRKPAFLSGEQKKAIVDLLFKTNRKVTVKQLKEDYFKKIECFDSVEISGVEDRFNASLGTYHDLLKIIKDKDFLDNEENEDILEDIVLTLTLFEDREMIEERLKTYAHLFDDKVMKQLKRRRYTGWGRLSRKLINGIRDKQSGKTILDFLKSDGFANRNFMQLIHDDSLTFKEDIQKAQVSGQGDSLHEHIANLAGSPAIKKGILQTVKVVDELVKVMGRHKPENIVIEMARENQTTQKGQKNSRERMKRIEEGIKELGSQILKEHPVENTQLQNEKLYLYYLQNGRDMYVDQELDINRLSDYDVDHIVPQSFLKDDSIDNKVLTRSDKARGKSDNVPSEEVVKKMKNYWRQLLNAKLITQRKFDNLTKAERGGLSELDKAGFIKRQLVETRQITKHVAQILDSRMNTKYDENDKLIREVKVITLKSKLVSDFRKDFQFYKVREINNYHHAHDAYLNAVVGTALIKKYPKLESEFVYGDYKVYDVRKMIAKSEQEIGKATAKYFFYSNIMNFFKTEITLANGEIRKRPLIETNGETGEIVWDKGRDFATVRKVLSMPQVNIVKKTEVQTGGFSKESILPKRNSDKLIARKKDWDPKKYGGFDSPTVAYSVLVVAKVEKGKSKKLKSVKELLGITIMERSSFEKNPIDFLEAKGYKEVKKDLIIKLPKYSLFELENGRKRMLASAGELQKGNELALPSKYVNFLYLASHYEKLKGSPEDNEQKQLFVEQHKHYLDEIIEQISEFSKRVILADANLDKVLSAYNKHRDKPIREQAENIIHLFTLTNLGAPAAFKYFDTTIDRKRYTSTKEVLDATLIHQSITGLYETRIDLSQLGGDGGGSSGSSGSSGSSGGTLNIEDEYRLHETSKEPDVSLGSTWLSDFPQAWAETGGMGLAVRQAPLIIPLKATSTPVSIKQYPMSQEARLGIKPHIQRLLDQGILVPCQSPWNTPLLPVKKPGTNDYRPVQDLREVNKRVEDIHPTVPNPYNLLSGLPPSHQWYTVLDLKDAFFCLRLHPTSQPLFAFEWRDPEMGISGQLTWTRLPQGFKNSPTLFNEALHRDLAGFRIQHPDLILLQYVDDLLLAATSELDCQQGTRALLQTLGDLGYRASAKKAQICQKQVKYLGYLLKEGQRWLTEARKETVMGQPIPKTPRQLREFLGKAGFCRLFIPGFAEMAAPLYPLTKPGTLFNWGPDQQKAFQEIKQALLTAPALGLPDLTKPFELFVDEKQGYAKGVLTQKLGPWRRPVAYLSKKLDPVAAGWPPCLRMVAAIAVLTKDAGKLTMGQPLVILAPHAVEALVKQPPDRWLSNARMTHYQALLLDTDRVQFGPVVALNPATLLPLPEEGLQHDCLDILAEAHGTRSDLMDQPLPDADHTWYTDGSSFLQEGQRKAGAAVTTETEVIWARALPAGTSAQRAELIALTQALKMAEGKKLNVYTDSRYAFATAHIHGEIYRRRGWLTSEGKEIKNKDEILALLKALFLPKRLSIIHCPGHQKGNSAEARGNRMADQAAREVATRETPETSTLLAGKRTADGSEFEKRTADGSEFESPKKKAKVE

SEQ ID NO: 2397 - protein, 2091 aa, synthetic construct
MPAAKRVKLDGGDKKYSIGLDIGTNSVGWAVITDEYKVPSKKFKVLGNTDRHSIKKNLIGALLFDSGETAEATRLKRTARRRYTRRKNRICYLQEIFSNEMAKVDDSFFHRLEESFLVEEDKKHERHPIFGNIVDEVAYHEKYPTIYHLRKKLVDSTDKADLRLIYLALAHMIKFRGHFLIEGDLNPDNSDVDKLFIQLVQTYNQLFEENPINASGVDAKAILSARLSKSRRLENLIAQLPGEKKNGLFGNLIALSLGLTPNFKSNFDLAEDAKLQLSKDTYDDDLDNLLAQIGDQYADLFLAAKNLSDAILLSDILRVNTEITKAPLSASMIKRYDEHHQDLTLLKALVRQQLPEKYKEIFFDQSKNGYAGYIDGGASQEEFYKFIKPILEKMDGTEELLVKLNREDLLRKQRTFDNGSIPHQIHLGELHAILRRQEDFYPFLKDNREKIEKILTFRIPYYVGPLARGNSRFAWMTRKSEETITPWNFEEVVDKGASAQSFIERMTNFDKNLPNEKVLPKHSLLYEYFTVYNELTKVKYVTEGMRKPAFLSGEQKKAIVDLLFKTNRKVTVKQLKEDYFKKIECFDSVEISGVEDRFNASLGTYHDLLKIIKDKDFLDNEENEDILEDIVLTLTLFEDREMIEERLKTYAHLFDDKVMKQLKRRRYTGWGRLSRKLINGIRDKQSGKTILDFLKSDGFANRNFMQLIHDDSLTFKEDIQKAQVSGQGDSLHEHIANLAGSPAIKKGILQTVKVVDELVKVMGRHKPENIVIEMARENQTTQKGQKNSRERMKRIEEGIKELGSQILKEHPVENTQLQNEKLYLYYLQNGRDMYVDQELDINRLSDYDVDHIVPQSFLKDDSIDNKVLTRSDKARGKSDNVPSEEVVKKMKNYWRQLLNAKLITQRKFDNLTKAERGGLSELDKAGFIKRQLVETRQITKHVAQILDSRMNTKYDENDKLIREVKVITLKSKLVSDFRKDFQFYKVREINNYHHAHDAYLNAVVGTALIKKYPKLESEFVYGDYKVYDVRKMIAKSEQEIGKATAKYFFYSNIMNFFKTEITLANGEIRKRPLIETNGETGEIVWDKGRDFATVRKVLSMPQVNIVKKTEVQTGGFSKESILPKRNSDKLIARKKDWDPKKYGGFDSPTVAYSVLVVAKVEKGKSKKLKSVKELLGITIMERSSFEKNPIDFLEAKGYKEVKKDLIIKLPKYSLFELENGRKRMLASAGELQKGNELALPSKYVNFLYLASHYEKLKGSPEDNEQKQLFVEQHKHYLDEIIEQISEFSKRVILADANLDKVLSAYNKHRDKPIREQAENIIHLFTLTNLGAPAAFKYFDTTIDRKRYTSTKEVLDATLIHQSITGLYETRIDLSQLGGDGGGGGGGSGGTLNIEDEYRLHETSKEPDVSLGSTWLSDFPQAWAETGGMGLAVRQAPLIIPLKATSTPVSIKQYPMSQEARLGIKPHIQRLLDQGILVPCQSPWNTPLLPVKKPGTNDYRPVQDLREVNKRVEDIHPTVPNPYNLLSGLPPSHQWYTVLDLKDAFFCLRLHPTSQPLFAFEWRDPEMGISGQLTWTRLPQGFKNSPTLFNEALHRDLAGFRIQHPDLILLQYVDDLLLAATSELDCQQGTRALLQTLGDLGYRASAKKAQICQKQVKYLGYLLKEGQRWLTEARKETVMGQPIPKTPRQLREFLGKAGFCRLFIPGFAEMAAPLYPLTKPGTLFNWGPDQQKAFQEIKQALLTAPALGLPDLTKPFELFVDEKQGYAKGVLTQKLGPWRRPVAYLSKKLDPVAAGWPPCLRMVAAIAVLTKDAGKLTMGQPLVILAPHAVEALVKQPPDRWLSNARMTHYQALLLDTDRVQFGPVVALNPATLLPLPEEGLQHDCLDILAEAHGTRSDLMDQPLPDADHTWYTDGSSFLQEGQRKAGAAVTTETEVIWARALPAGTSAQRAELIALTQALKMAEGKKLNVYTDSRYAFATAHIHGEIYRRRGWLTSEGKEIKNKDEILALLKALFLPKRLSIIHCPGHQKGNSAEARGNRMADQAAREVATRETPETSTLLAGKRTADGSEFEKRTADGSEFESPKKKAKVE

SEQ ID NO: 2398 - protein, 2091 aa, synthetic construct
MPAAKRVKLDGGDKKYSIGLDIGTNSVGWAVITDEYKVPSKKFKVLGNTDRHSIKKNLIGALLFDSGETAEATRLKRTARRRYTRRKNRICYLQEIFSNEMAKVDDSFFHRLEESFLVEEDKKHERHPIFGNIVDEVAYHEKYPTIYHLRKKLVDSTDKADLRLIYLALAHMIKFRGHFLIEGDLNPDNSDVDKLFIQLVQTYNQLFEENPINASGVDAKAILSARLSKSRRLENLIAQLPGEKKNGLFGNLIALSLGLTPNFKSNFDLAEDAKLQLSKDTYDDDLDNLLAQIGDQYADLFLAAKNLSDAILLSDILRVNTEITKAPLSASMIKRYDEHHQDLTLLKALVRQQLPEKYKEIFFDQSKNGYAGYIDGGASQEEFYKFIKPILEKMDGTEELLVKLNREDLLRKQRTFDNGSIPHQIHLGELHAILRRQEDFYPFLKDNREKIEKILTFRIPYYVGPLARGNSRFAWMTRKSEETITPWNFEEVVDKGASAQSFIERMTNFDKNLPNEKVLPKHSLLYEYFTVYNELTKVKYVTEGMRKPAFLSGEQKKAIVDLLFKTNRKVTVKQLKEDYFKKIECFDSVEISGVEDRFNASLGTYHDLLKIIKDKDFLDNEENEDILEDIVLTLTLFEDREMIEERLKTYAHLFDDKVMKQLKRRRYTGWGRLSRKLINGIRDKQSGKTILDFLKSDGFANRNFMQLIHDDSLTFKEDIQKAQVSGQGDSLHEHIANLAGSPAIKKGILQTVKVVDELVKVMGRHKPENIVIEMARENQTTQKGQKNSRERMKRIEEGIKELGSQILKEHPVENTQLQNEKLYLYYLQNGRDMYVDQELDINRLSDYDVDHIVPQSFLKDDSIDNKVLTRSDKARGKSDNVPSEEVVKKMKNYWRQLLNAKLITQRKFDNLTKAERGGLSELDKAGFIKRQLVETRQITKHVAQILDSRMNTKYDENDKLIREVKVITLKSKLVSDFRKDFQFYKVREINNYHHAHDAYLNAVVGTALIKKYPKLESEFVYGDYKVYDVRKMIAKSEQEIGKATAKYFFYSNIMNFFKTEITLANGEIRKRPLIETNGETGEIVWDKGRDFATVRKVLSMPQVNIVKKTEVQTGGFSKESILPKRNSDKLIARKKDWDPKKYGGFDSPTVAYSVLVVAKVEKGKSKKLKSVKELLGITIMERSSFEKNPIDFLEAKGYKEVKKDLIIKLPKYSLFELENGRKRMLASAGELQKGNELALPSKYVNFLYLASHYEKLKGSPEDNEQKQLFVEQHKHYLDEIIEQISEFSKRVILADANLDKVLSAYNKHRDKPIREQAENIIHLFTLTNLGAPAAFKYFDTTIDRKRYTSTKEVLDATLIHQSITGLYETRIDLSQLGGDGGGGSGGSGGTLNIEDEYRLHETSKEPDVSLGSTWLSDFPQAWAETGGMGLAVRQAPLIIPLKATSTPVSIKQYPMSQEARLGIKPHIQRLLDQGILVPCQSPWNTPLLPVKKPGTNDYRPVQDLREVNKRVEDIHPTVPNPYNLLSGLPPSHQWYTVLDLKDAFFCLRLHPTSQPLFAFEWRDPEMGISGQLTWTRLPQGFKNSPTLFNEALHRDLAGFRIQHPDLILLQYVDDLLLAATSELDCQQGTRALLQTLGDLGYRASAKKAQICQKQVKYLGYLLKEGQRWLTEARKETVMGQPIPKTPRQLREFLGKAGFCRLFIPGFAEMAAPLYPLTKPGTLFNWGPDQQKAFQEIKQALLTAPALGLPDLTKPFELFVDEKQGYAKGVLTQKLGPWRRPVAYLSKKLDPVAAGWPPCLRMVAAIAVLTKDAGKLTMGQPLVILAPHAVEALVKQPPDRWLSNARMTHYQALLLDTDRVQFGPVVALNPATLLPLPEEGLQHDCLDILAEAHGTRSDLMDQPLPDADHTWYTDGSSFLQEGQRKAGAAVTTETEVIWARALPAGTSAQRAELIALTQALKMAEGKKLNVYTDSRYAFATAHIHGEIYRRRGWLTSEGKEIKNKDEILALLKALFLPKRLSIIHCPGHQKGNSAEARGNRMADQAAREVATRETPETSTLLAGKRTADGSEFEKRTADGSEFESPKKKAKVE

SEQ ID NO: 2399 - protein, 2094 aa, synthetic construct
MPAAKRVKLDGGDKKYSIGLDIGTNSVGWAVITDEYKVPSKKFKVLGNTDRHSIKKNLIGALLFDSGETAEATRLKRTARRRYTRRKNRICYLQEIFSNEMAKVDDSFFHRLEESFLVEEDKKHERHPIFGNIVDEVAYHEKYPTIYHLRKKLVDSTDKADLRLIYLALAHMIKFRGHFLIEGDLNPDNSDVDKLFIQLVQTYNQLFEENPINASGVDAKAILSARLSKSRRLENLIAQLPGEKKNGLFGNLIALSLGLTPNFKSNFDLAEDAKLQLSKDTYDDDLDNLLAQIGDQYADLFLAAKNLSDAILLSDILRVNTEITKAPLSASMIKRYDEHHQDLTLLKALVRQQLPEKYKEIFFDQSKNGYAGYIDGGASQEEFYKFIKPILEKMDGTEELLVKLNREDLLRKQRTFDNGSIPHQIHLGELHAILRRQEDFYPFLKDNREKIEKILTFRIPYYVGPLARGNSRFAWMTRKSEETITPWNFEEVVDKGASAQSFIERMTNFDKNLPNEKVLPKHSLLYEYFTVYNELTKVKYVTEGMRKPAFLSGEQKKAIVDLLFKTNRKVTVKQLKEDYFKKIECFDSVEISGVEDRFNASLGTYHDLLKIIKDKDFLDNEENEDILEDIVLTLTLFEDREMIEERLKTYAHLFDDKVMKQLKRRRYTGWGRLSRKLINGIRDKQSGKTILDFLKSDGFANRNFMQLIHDDSLTFKEDIQKAQVSGQGDSLHEHIANLAGSPAIKKGILQTVKVVDELVKVMGRHKPENIVIEMARENQTTQKGQKNSRERMKRIEEGIKELGSQILKEHPVENTQLQNEKLYLYYLQNGRDMYVDQELDINRLSDYDVDHIVPQSFLKDDSIDNKVLTRSDKARGKSDNVPSEEVVKKMKNYWRQLLNAKLITQRKFDNLTKAERGGLSELDKAGFIKRQLVETRQITKHVAQILDSRMNTKYDENDKLIREVKVITLKSKLVSDFRKDFQFYKVREINNYHHAHDAYLNAVVGTALIKKYPKLESEFVYGDYKVYDVRKMIAKSEQEIGKATAKYFFYSNIMNFFKTEITLANGEIRKRPLIETNGETGEIVWDKGRDFATVRKVLSMPQVNIVKKTEVQTGGFSKESILPKRNSDKLIARKKDWDPKKYGGFDSPTVAYSVLVVAKVEKGKSKKLKSVKELLGITIMERSSFEKNPIDFLEAKGYKEVKKDLIIKLPKYSLFELENGRKRMLASAGELQKGNELALPSKYVNFLYLASHYEKLKGSPEDNEQKQLFVEQHKHYLDEIIEQISEFSKRVILADANLDKVLSAYNKHRDKPIREQAENIIHLFTLTNLGAPAAFKYFDTTIDRKRYTSTKEVLDATLIHQSITGLYETRIDLSQLGGDGGGSSGGSPAPGGTLNIEDEYRLHETSKEPDVSLGSTWLSDFPQAWAETGGMGLAVRQAPLIIPLKATSTPVSIKQYPMSQEARLGIKPHIQRLLDQGILVPCQSPWNTPLLPVKKPGTNDYRPVQDLREVNKRVEDIHPTVPNPYNLLSGLPPSHQWYTVLDLKDAFFCLRLHPTSQPLFAFEWRDPEMGISGQLTWTRLPQGFKNSPTLFNEALHRDLAGFRIQHPDLILLQYVDDLLLAATSELDCQQGTRALLQTLGDLGYRASAKKAQICQKQVKYLGYLLKEGQRWLTEARKETVMGQPIPKTPRQLREFLGKAGFCRLFIPGFAEMAAPLYPLTKPGTLFNWGPDQQKAFQEIKQALLTAPALGLPDLTKPFELFVDEKQGYAKGVLTQKLGPWRRPVAYLSKKLDPVAAGWPPCLRMVAAIAVLTKDAGKLTMGQPLVILAPHAVEALVKQPPDRWLSNARMTHYQALLLDTDRVQFGPVVALNPATLLPLPEEGLQHDCLDILAEAHGTRSDLMDQPLPDADHTWYTDGSSFLQEGQRKAGAAVTTETEVIWARALPAGTSAQRAELIALTQALKMAEGKKLNVYTDSRYAFATAHIHGEIYRRRGWLTSEGKEIKNKDEILALLKALFLPKRLSIIHCPGHQKGNSAEARGNRMADQAAREVATRETPETSTLLAGKRTADGSEFEKRTADGSEFESPKKKAKVE

SEQ ID NO: 2400 - protein, 2096 aa, synthetic construct
MPAAKRVKLDGGDKKYSIGLDIGTNSVGWAVITDEYKVPSKKFKVLGNTDRHSIKKNLIGALLFDSGETAEATRLKRTARRRYTRRKNRICYLQEIFSNEMAKVDDSFFHRLEESFLVEEDKKHERHPIFGNIVDEVAYHEKYPTIYHLRKKLVDSTDKADLRLIYLALAHMIKFRGHFLIEGDLNPDNSDVDKLFIQLVQTYNQLFEENPINASGVDAKAILSARLSKSRRLENLIAQLPGEKKNGLFGNLIALSLGLTPNFKSNFDLAEDAKLQLSKDTYDDDLDNLLAQIGDQYADLFLAAKNLSDAILLSDILRVNTEITKAPLSASMIKRYDEHHQDLTLLKALVRQQLPEKYKEIFFDQSKNGYAGYIDGGASQEEFYKFIKPILEKMDGTEELLVKLNREDLLRKQRTFDNGSIPHQIHLGELHAILRRQEDFYPFLKDNREKIEKILTFRIPYYVGPLARGNSRFAWMTRKSEETITPWNFEEVVDKGASAQSFIERMTNFDKNLPNEKVLPKHSLLYEYFTVYNELTKVKYVTEGMRKPAFLSGEQKKAIVDLLFKTNRKVTVKQLKEDYFKKIECFDSVEISGVEDRFNASLGTYHDLLKIIKDKDFLDNEENEDILEDIVLTLTLFEDREMIEERLKTYAHLFDDKVMKQLKRRRYTGWGRLSRKLINGIRDKQSGKTILDFLKSDGFANRNFMQLIHDDSLTFKEDIQKAQVSGQGDSLHEHIANLAGSPAIKKGILQTVKVVDELVKVMGRHKPENIVIEMARENQTTQKGQKNSRERMKRIEEGIKELGSQILKEHPVENTQLQNEKLYLYYLQNGRDMYVDQELDINRLSDYDVDHIVPQSFLKDDSIDNKVLTRSDKARGKSDNVPSEEVVKKMKNYWRQLLNAKLITQRKFDNLTKAERGGLSELDKAGFIKRQLVETRQITKHVAQILDSRMNTKYDENDKLIREVKVITLKSKLVSDFRKDFQFYKVREINNYHHAHDAYLNAVVGTALIKKYPKLESEFVYGDYKVYDVRKMIAKSEQEIGKATAKYFFYSNIMNFFKTEITLANGEIRKRPLIETNGETGEIVWDKGRDFATVRKVLSMPQVNIVKKTEVQTGGFSKESILPKRNSDKLIARKKDWDPKKYGGFDSPTVAYSVLVVAKVEKGKSKKLKSVKELLGITIMERSSFEKNPIDFLEAKGYKEVKKDLIIKLPKYSLFELENGRKRMLASAGELQKGNELALPSKYVNFLYLASHYEKLKGSPEDNEQKQLFVEQHKHYLDEIIEQISEFSKRVILADANLDKVLSAYNKHRDKPIREQAENIIHLFTLTNLGAPAAFKYFDTTIDRKRYTSTKEVLDATLIHQSITGLYETRIDLSQLGGDGGPAPEAAAKGGGGGTLNIEDEYRLHETSKEPDVSLGSTWLSDFPQAWAETGGMGLAVRQAPLIIPLKATSTPVSIKQYPMSQEARLGIKPHIQRLLDQGILVPCQSPWNTPLLPVKKPGTNDYRPVQDLREVNKRVEDIHPTVPNPYNLLSGLPPSHQWYTVLDLKDAFFCLRLHPTSQPLFAFEWRDPEMGISGQLTWTRLPQGFKNSPTLFNEALHRDLAGFRIQHPDLILLQYVDDLLLAATSELDCQQGTRALLQTLGDLGYRASAKKAQICQKQVKYLGYLLKEGQRWLTEARKETVMGQPIPKTPRQLREFLGKAGFCRLFIPGFAEMAAPLYPLTKPGTLFNWGPDQQKAFQEIKQALLTAPALGLPDLTKPFELFVDEKQGYAKGVLTQKLGPWRRPVAYLSKKLDPVAAGWPPCLRMVAAIAVLTKDAGKLTMGQPLVILAPHAVEALVKQPPDRWLSNARMTHYQALLLDTDRVQFGPVVALNPATLLPLPEEGLQHDCLDILAEAHGTRSDLMDQPLPDADHTWYTDGSSFLQEGQRKAGAAVTTETEVIWARALPAGTSAQRAELIALTQALKMAEGKKLNVYTDSRYAFATAHIHGEIYRRRGWLTSEGKEIKNKDEILALLKALFLPKRLSIIHCPGHQKGNSAEARGNRMADQAAREVATRETPETSTLLAGKRTADGSEFEKRTADGSEFESPKKKAKVE

SEQ ID NO: 2401 - protein, 2094 aa, synthetic construct
MPAAKRVKLDGGDKKYSIGLDIGTNSVGWAVITDEYKVPSKKFKVLGNTDRHSIKKNLIGALLFDSGETAEATRLKRTARRRYTRRKNRICYLQEIFSNEMAKVDDSFFHRLEESFLVEEDKKHERHPIFGNIVDEVAYHEKYPTIYHLRKKLVDSTDKADLRLIYLALAHMIKFRGHFLIEGDLNPDNSDVDKLFIQLVQTYNQLFEENPINASGVDAKAILSARLSKSRRLENLIAQLPGEKKNGLFGNLIALSLGLTPNFKSNFDLAEDAKLQLSKDTYDDDLDNLLAQIGDQYADLFLAAKNLSDAILLSDILRVNTEITKAPLSASMIKRYDEHHQDLTLLKALVRQQLPEKYKEIFFDQSKNGYAGYIDGGASQEEFYKFIKPILEKMDGTEELLVKLNREDLLRKQRTFDNGSIPHQIHLGELHAILRRQEDFYPFLKDNREKIEKILTFRIPYYVGPLARGNSRFAWMTRKSEETITPWNFEEVVDKGASAQSFIERMTNFDKNLPNEKVLPKHSLLYEYFTVYNELTKVKYVTEGMRKPAFLSGEQKKAIVDLLFKTNRKVTVKQLKEDYFKKIECFDSVEISGVEDRFNASLGTYHDLLKIIKDKDFLDNEENEDILEDIVLTLTLFEDREMIEERLKTYAHLFDDKVMKQLKRRRYTGWGRLSRKLINGIRDKQSGKTILDFLKSDGFANRNFMQLIHDDSLTFKEDIQKAQVSGQGDSLHEHIANLAGSPAIKKGILQTVKVVDELVKVMGRHKPENIVIEMARENQTTQKGQKNSRERMKRIEEGIKELGSQILKEHPVENTQLQNEKLYLYYLQNGRDMYVDQELDINRLSDYDVDHIVPQSFLKDDSIDNKVLTRSDKARGKSDNVPSEEVVKKMKNYWRQLLNAKLITQRKFDNLTKAERGGLSELDKAGFIKRQLVETRQITKHVAQILDSRMNTKYDENDKLIREVKVITLKSKLVSDFRKDFQFYKVREINNYHHAHDAYLNAVVGTALIKKYPKLESEFVYGDYKVYDVRKMIAKSEQEIGKATAKYFFYSNIMNFFKTEITLANGEIRKRPLIETNGETGEIVWDKGRDFATVRKVLSMPQVNIVKKTEVQTGGFSKESILPKRNSDKLIARKKDWDPKKYGGFDSPTVAYSVLVVAKVEKGKSKKLKSVKELLGITIMERSSFEKNPIDFLEAKGYKEVKKDLIIKLPKYSLFELENGRKRMLASAGELQKGNELALPSKYVNFLYLASHYEKLKGSPEDNEQKQLFVEQHKHYLDEIIEQISEFSKRVILADANLDKVLSAYNKHRDKPIREQAENIIHLFTLTNLGAPAAFKYFDTTIDRKRYTSTKEVLDATLIHQSITGLYETRIDLSQLGGDGGPAPGGGGGSGGTLNIEDEYRLHETSKEPDVSLGSTWLSDFPQAWAETGGMGLAVRQAPLIIPLKATSTPVSIKQYPMSQEARLGIKPHIQRLLDQGILVPCQSPWNTPLLPVKKPGTNDYRPVQDLREVNKRVEDIHPTVPNPYNLLSGLPPSHQWYTVLDLKDAFFCLRLHPTSQPLFAFEWRDPEMGISGQLTWTRLPQGFKNSPTLFNEALHRDLAGFRIQHPDLILLQYVDDLLLAATSELDCQQGTRALLQTLGDLGYRASAKKAQICQKQVKYLGYLLKEGQRWLTEARKETVMGQPIPKTPRQLREFLGKAGFCRLFIPGFAEMAAPLYPLTKPGTLFNWGPDQQKAFQEIKQALLTAPALGLPDLTKPFELFVDEKQGYAKGVLTQKLGPWRRPVAYLSKKLDPVAAGWPPCLRMVAAIAVLTKDAGKLTMGQPLVILAPHAVEALVKQPPDRWLSNARMTHYQALLLDTDRVQFGPVVALNPATLLPLPEEGLQHDCLDILAEAHGTRSDLMDQPLPDADHTWYTDGSSFLQEGQRKAGAAVTTETEVIWARALPAGTSAQRAELIALTQALKMAEGKKLNVYTDSRYAFATAHIHGEIYRRRGWLTSEGKEIKNKDEILALLKALFLPKRLSIIHCPGHQKGNSAEARGNRMADQAAREVATRETPETSTLLAGKRTADGSEFEKRTADGSEFESPKKKAKVE

SEQ ID NO: 2402 - protein, 2094 aa, synthetic construct
MPAAKRVKLDGGDKKYSIGLDIGTNSVGWAVITDEYKVPSKKFKVLGNTDRHSIKKNLIGALLFDSGETAEATRLKRTARRRYTRRKNRICYLQEIFSNEMAKVDDSFFHRLEESFLVEEDKKHERHPIFGNIVDEVAYHEKYPTIYHLRKKLVDSTDKADLRLIYLALAHMIKFRGHFLIEGDLNPDNSDVDKLFIQLVQTYNQLFEENPINASGVDAKAILSARLSKSRRLENLIAQLPGEKKNGLFGNLIALSLGLTPNFKSNFDLAEDAKLQLSKDTYDDDLDNLLAQIGDQYADLFLAAKNLSDAILLSDILRVNTEITKAPLSASMIKRYDEHHQDLTLLKALVRQQLPEKYKEIFFDQSKNGYAGYIDGGASQEEFYKFIKPILEKMDGTEELLVKLNREDLLRKQRTFDNGSIPHQIHLGELHAILRRQEDFYPFLKDNREKIEKILTFRIPYYVGPLARGNSRFAWMTRKSEETITPWNFEEVVDKGASAQSFIERMTNFDKNLPNEKVLPKHSLLYEYFTVYNELTKVKYVTEGMRKPAFLSGEQKKAIVDLLFKTNRKVTVKQLKEDYFKKIECFDSVEISGVEDRFNASLGTYHDLLKIIKDKDFLDNEENEDILEDIVLTLTLFEDREMIEERLKTYAHLFDDKVMKQLKRRRYTGWGRLSRKLINGIRDKQSGKTILDFLKSDGFANRNFMQLIHDDSLTFKEDIQKAQVSGQGDSLHEHIANLAGSPAIKKGILQTVKVVDELVKVMGRHKPENIVIEMARENQTTQKGQKNSRERMKRIEEGIKELGSQILKEHPVENTQLQNEKLYLYYLQNGRDMYVDQELDINRLSDYDVDHIVPQSFLKDDSIDNKVLTRSDKARGKSDNVPSEEVVKKMKNYWRQLLNAKLITQRKFDNLTKAERGGLSELDKAGFIKRQLVETRQITKHVAQILDSRMNTKYDENDKLIREVKVITLKSKLVSDFRKDFQFYKVREINNYHHAHDAYLNAVVGTALIKKYPKLESEFVYGDYKVYDVRKMIAKSEQEIGKATAKYFFYSNIMNFFKTEITLANGEIRKRPLIETNGETGEIVWDKGRDFATVRKVLSMPQVNIVKKTEVQTGGFSKESILPKRNSDKLIARKKDWDPKKYGGFDSPTVAYSVLVVAKVEKGKSKKLKSVKELLGITIMERSSFEKNPIDFLEAKGYKEVKKDLIIKLPKYSLFELENGRKRMLASAGELQKGNELALPSKYVNFLYLASHYEKLKGSPEDNEQKQLFVEQHKHYLDEIIEQISEFSKRVILADANLDKVLSAYNKHRDKPIREQAENIIHLFTLTNLGAPAAFKYFDTTIDRKRYTSTKEVLDATLIHQSITGLYETRIDLSQLGGDGGGSSGGGPAPGGTLNIEDEYRLHETSKEPDVSLGSTWLSDFPQAWAETGGMGLAVRQAPLIIPLKATSTPVSIKQYPMSQEARLGIKPHIQRLLDQGILVPCQSPWNTPLLPVKKPGTNDYRPVQDLREVNKRVEDIHPTVPNPYNLLSGLPPSHQWYTVLDLKDAFFCLRLHPTSQPLFAFEWRDPEMGISGQLTWTRLPQGFKNSPTLFNEALHRDLAGFRIQHPDLILLQYVDDLLLAATSELDCQQGTRALLQTLGDLGYRASAKKAQICQKQVKYLGYLLKEGQRWLTEARKETVMGQPIPKTPRQLREFLGKAGFCRLFIPGFAEMAAPLYPLTKPGTLFNWGPDQQKAFQEIKQALLTAPALGLPDLTKPFELFVDEKQGYAKGVLTQKLGPWRRPVAYLSKKLDPVAAGWPPCLRMVAAIAVLTKDAGKLTMGQPLVILAPHAVEALVKQPPDRWLSNARMTHYQALLLDTDRVQFGPVVALNPATLLPLPEEGLQHDCLDILAEAHGTRSDLMDQPLPDADHTWYTDGSSFLQEGQRKAGAAVTTETEVIWARALPAGTSAQRAELIALTQALKMAEGKKLNVYTDSRYAFATAHIHGEIYRRRGWLTSEGKEIKNKDEILALLKALFLPKRLSIIHCPGHQKGNSAEARGNRMADQAAREVATRETPETSTLLAGKRTADGSEFEKRTADGSEFESPKKKAKVE

SEQ ID NO: 2403 - protein, 2094 aa, synthetic construct
MPAAKRVKLDGGDKKYSIGLDIGTNSVGWAVITDEYKVPSKKFKVLGNTDRHSIKKNLIGALLFDSGETAEATRLKRTARRRYTRRKNRICYLQEIFSNEMAKVDDSFFHRLEESFLVEEDKKHERHPIFGNIVDEVAYHEKYPTIYHLRKKLVDSTDKADLRLIYLALAHMIKFRGHFLIEGDLNPDNSDVDKLFIQLVQTYNQLFEENPINASGVDAKAILSARLSKSRRLENLIAQLPGEKKNGLFGNLIALSLGLTPNFKSNFDLAEDAKLQLSKDTYDDDLDNLLAQIGDQYADLFLAAKNLSDAILLSDILRVNTEITKAPLSASMIKRYDEHHQDLTLLKALVRQQLPEKYKEIFFDQSKNGYAGYIDGGASQEEFYKFIKPILEKMDGTEELLVKLNREDLLRKQRTFDNGSIPHQIHLGELHAILRRQEDFYPFLKDNREKIEKILTFRIPYYVGPLARGNSRFAWMTRKSEETITPWNFEEVVDKGASAQSFIERMTNFDKNLPNEKVLPKHSLLYEYFTVYNELTKVKYVTEGMRKPAFLSGEQKKAIVDLLFKTNRKVTVKQLKEDYFKKIECFDSVEISGVEDRFNASLGTYHDLLKIIKDKDFLDNEENEDILEDIVLTLTLFEDREMIEERLKTYAHLFDDKVMKQLKRRRYTGWGRLSRKLINGIRDKQSGKTILDFLKSDGFANRNFMQLIHDDSLTFKEDIQKAQVSGQGDSLHEHIANLAGSPAIKKGILQTVKVVDELVKVMGRHKPENIVIEMARENQTTQKGQKNSRERMKRIEEGIKELGSQILKEHPVENTQLQNEKLYLYYLQNGRDMYVDQELDINRLSDYDVDHIVPQSFLKDDSIDNKVLTRSDKARGKSDNVPSEEVVKKMKNYWRQLLNAKLITQRKFDNLTKAERGGLSELDKAGFIKRQLVETRQITKHVAQILDSRMNTKYDENDKLIREVKVITLKSKLVSDFRKDFQFYKVREINNYHHAHDAYLNAVVGTALIKKYPKLESEFVYGDYKVYDVRKMIAKSEQEIGKATAKYFFYSNIMNFFKTEITLANGEIRKRPLIETNGETGEIVWDKGRDFATVRKVLSMPQVNIVKKTEVQTGGFSKESILPKRNSDKLIARKKDWDPKKYGGFDSPTVAYSVLVVAKVEKGKSKKLKSVKELLGITIMERSSFEKNPIDFLEAKGYKEVKKDLIIKLPKYSLFELENGRKRMLASAGELQKGNELALPSKYVNFLYLASHYEKLKGSPEDNEQKQLFVEQHKHYLDEIIEQISEFSKRVILADANLDKVLSAYNKHRDKPIREQAENIIHLFTLTNLGAPAAFKYFDTTIDRKRYTSTKEVLDATLIHQSITGLYETRIDLSQLGGDGGPAPGGSGGGGGTLNIEDEYRLHETSKEPDVSLGSTWLSDFPQAWAETGGMGLAVRQAPLIIPLKATSTPVSIKQYPMSQEARLGIKPHIQRLLDQGILVPCQSPWNTPLLPVKKPGTNDYRPVQDLREVNKRVEDIHPTVPNPYNLLSGLPPSHQWYTVLDLKDAFFCLRLHPTSQPLFAFEWRDPEMGISGQLTWTRLPQGFKNSPTLFNEALHRDLAGFRIQHPDLILLQYVDDLLLAATSELDCQQGTRALLQTLGDLGYRASAKKAQICQKQVKYLGYLLKEGQRWLTEARKETVMGQPIPKTPRQLREFLGKAGFCRLFIPGFAEMAAPLYPLTKPGTLFNWGPDQQKAFQEIKQALLTAPALGLPDLTKPFELFVDEKQGYAKGVLTQKLGPWRRPVAYLSKKLDPVAAGWPPCLRMVAAIAVLTKDAGKLTMGQPLVILAPHAVEALVKQPPDRWLSNARMTHYQALLLDTDRVQFGPVVALNPATLLPLPEEGLQHDCLDILAEAHGTRSDLMDQPLPDADHTWYTDGSSFLQEGQRKAGAAVTTETEVIWARALPAGTSAQRAELIALTQALKMAEGKKLNVYTDSRYAFATAHIHGEIYRRRGWLTSEGKEIKNKDEILALLKALFLPKRLSIIHCPGHQKGNSAEARGNRMADQAAREVATRETPETSTLLAGKRTADGSEFEKRTADGSEFESPKKKAKVE

SEQ ID NO: 2404 - protein, 2096 aa, synthetic construct
MPAAKRVKLDGGDKKYSIGLDIGTNSVGWAVITDEYKVPSKKFKVLGNTDRHSIKKNLIGALLFDSGETAEATRLKRTARRRYTRRKNRICYLQEIFSNEMAKVDDSFFHRLEESFLVEEDKKHERHPIFGNIVDEVAYHEKYPTIYHLRKKLVDSTDKADLRLIYLALAHMIKFRGHFLIEGDLNPDNSDVDKLFIQLVQTYNQLFEENPINASGVDAKAILSARLSKSRRLENLIAQLPGEKKNGLFGNLIALSLGLTPNFKSNFDLAEDAKLQLSKDTYDDDLDNLLAQIGDQYADLFLAAKNLSDAILLSDILRVNTEITKAPLSASMIKRYDEHHQDLTLLKALVRQQLPEKYKEIFFDQSKNGYAGYIDGGASQEEFYKFIKPILEKMDGTEELLVKLNREDLLRKQRTFDNGSIPHQIHLGELHAILRRQEDFYPFLKDNREKIEKILTFRIPYYVGPLARGNSRFAWMTRKSEETITPWNFEEVVDKGASAQSFIERMTNFDKNLPNEKVLPKHSLLYEYFTVYNELTKVKYVTEGMRKPAFLSGEQKKAIVDLLFKTNRKVTVKQLKEDYFKKIECFDSVEISGVEDRFNASLGTYHDLLKIIKDKDFLDNEENEDILEDIVLTLTLFEDREMIEERLKTYAHLFDDKVMKQLKRRRYTGWGRLSRKLINGIRDKQSGKTILDFLKSDGFANRNFMQLIHDDSLTFKEDIQKAQVSGQGDSLHEHIANLAGSPAIKKGILQTVKVVDELVKVMGRHKPENIVIEMARENQTTQKGQKNSRERMKRIEEGIKELGSQILKEHPVENTQLQNEKLYLYYLQNGRDMYVDQELDINRLSDYDVDHIVPQSFLKDDSIDNKVLTRSDKARGKSDNVPSEEVVKKMKNYWRQLLNAKLITQRKFDNLTKAERGGLSELDKAGFIKRQLVETRQITKHVAQILDSRMNTKYDENDKLIREVKVITLKSKLVSDFRKDFQFYKVREINNYHHAHDAYLNAVVGTALIKKYPKLESEFVYGDYKVYDVRKMIAKSEQEIGKATAKYFFYSNIMNFFKTEITLANGEIRKRPLIETNGETGEIVWDKGRDFATVRKVLSMPQVNIVKKTEVQTGGFSKESILPKRNSDKLIARKKDWDPKKYGGFDSPTVAYSVLVVAKVEKGKSKKLKSVKELLGITIMERSSFEKNPIDFLEAKGYKEVKKDLIIKLPKYSLFELENGRKRMLASAGELQKGNELALPSKYVNFLYLASHYEKLKGSPEDNEQKQLFVEQHKHYLDEIIEQISEFSKRVILADANLDKVLSAYNKHRDKPIREQAENIIHLFTLTNLGAPAAFKYFDTTIDRKRYTSTKEVLDATLIHQSITGLYETRIDLSQLGGDGGGGSGSSEAAAKGGTLNIEDEYRLHETSKEPDVSLGSTWLSDFPQAWAETGGMGLAVRQAPLIIPLKATSTPVSIKQYPMSQEARLGIKPHIQRLLDQGILVPCQSPWNTPLLPVKKPGTNDYRPVQDLREVNKRVEDIHPTVPNPYNLLSGLPPSHQWYTVLDLKDAFFCLRLHPTSQPLFAFEWRDPEMGISGQLTWTRLPQGFKNSPTLFNEALHRDLAGFRIQHPDLILLQYVDDLLLAATSELDCQQGTRALLQTLGDLGYRASAKKAQICQKQVKYLGYLLKEGQRWLTEARKETVMGQPIPKTPRQLREFLGKAGFCRLFIPGFAEMAAPLYPLTKPGTLFNWGPDQQKAFQEIKQALLTAPALGLPDLTKPFELFVDEKQGYAKGVLTQKLGPWRRPVAYLSKKLDPVAAGWPPCLRMVAAIAVLTKDAGKLTMGQPLVILAPHAVEALVKQPPDRWLSNARMTHYQALLLDTDRVQFGPVVALNPATLLPLPEEGLQHDCLDILAEAHGTRSDLMDQPLPDADHTWYTDGSSFLQEGQRKAGAAVTTETEVIWARALPAGTSAQRAELIALTQALKMAEGKKLNVYTDSRYAFATAHIHGEIYRRRGWLTSEGKEIKNKDEILALLKALFLPKRLSIIHCPGHQKGNSAEARGNRMADQAAREVATRETPETSTLLAGKRTADGSEFEKRTADGSEFESPKKKAKVE

SEQ ID NO: 2405 - protein, 2100 aa, synthetic construct
MPAAKRVKLDGGDKKYSIGLDIGTNSVGWAVITDEYKVPSKKFKVLGNTDRHSIKKNLIGALLFDSGETAEATRLKRTARRRYTRRKNRICYLQEIFSNEMAKVDDSFFHRLEESFLVEEDKKHERHPIFGNIVDEVAYHEKYPTIYHLRKKLVDSTDKADLRLIYLALAHMIKFRGHFLIEGDLNPDNSDVDKLFIQLVQTYNQLFEENPINASGVDAKAILSARLSKSRRLENLIAQLPGEKKNGLFGNLIALSLGLTPNFKSNFDLAEDAKLQLSKDTYDDDLDNLLAQIGDQYADLFLAAKNLSDAILLSDILRVNTEITKAPLSASMIKRYDEHHQDLTLLKALVRQQLPEKYKEIFFDQSKNGYAGYIDGGASQEEFYKFIKPILEKMDGTEELLVKLNREDLLRKQRTFDNGSIPHQIHLGELHAILRRQEDFYPFLKDNREKIEKILTFRIPYYVGPLARGNSRFAWMTRKSEETITPWNFEEVVDKGASAQSFIERMTNFDKNLPNEKVLPKHSLLYEYFTVYNELTKVKYVTEGMRKPAFLSGEQKKAIVDLLFKTNRKVTVKQLKEDYFKKIECFDSVEISGVEDRFNASLGTYHDLLKIIKDKDFLDNEENEDILEDIVLTLTLFEDREMIEERLKTYAHLFDDKVMKQLKRRRYTGWGRLSRKLINGIRDKQSGKTILDFLKSDGFANRNFMQLIHDDSLTFKEDIQKAQVSGQGDSLHEHIANLAGSPAIKKGILQTVKVVDELVKVMGRHKPENIVIEMARENQTTQKGQKNSRERMKRIEEGIKELGSQILKEHPVENTQLQNEKLYLYYLQNGRDMYVDQELDINRLSDYDVDHIVPQSFLKDDSIDNKVLTRSDKARGKSDNVPSEEVVKKMKNYWRQLLNAKLITQRKFDNLTKAERGGLSELDKAGFIKRQLVETRQITKHVAQILDSRMNTKYDENDKLIREVKVITLKSKLVSDFRKDFQFYKVREINNYHHAHDAYLNAVVGTALIKKYPKLESEFVYGDYKVYDVRKMIAKSEQEIGKATAKYFFYSNIMNFFKTEITLANGEIRKRPLIETNGETGEIVWDKGRDFATVRKVLSMPQVNIVKKTEVQTGGFSKESILPKRNSDKLIARKKDWDPKKYGGFDSPTVAYSVLVVAKVEKGKSKKLKSVKELLGITIMERSSFEKNPIDFLEAKGYKEVKKDLIIKLPKYSLFELENGRKRMLASAGELQKGNELALPSKYVNFLYLASHYEKLKGSPEDNEQKQLFVEQHKHYLDEIIEQISEFSKRVILADANLDKVLSAYNKHRDKPIREQAENIIHLFTLTNLGAPAAFKYFDTTIDRKRYTSTKEVLDATLIHQSITGLYETRIDLSQLGGDGGGSSGSSGSSGSSGSSGGTLNIEDEYRLHETSKEPDVSLGSTWLSDFPQAWAETGGMGLAVRQAPLIIPLKATSTPVSIKQYPMSQEARLGIKPHIQRLLDQGILVPCQSPWNTPLLPVKKPGTNDYRPVQDLREVNKRVEDIHPTVPNPYNLLSGLPPSHQWYTVLDLKDAFFCLRLHPTSQPLFAFEWRDPEMGISGQLTWTRLPQGFKNSPTLFNEALHRDLAGFRIQHPDLILLQYVDDLLLAATSELDCQQGTRALLQTLGDLGYRASAKKAQICQKQVKYLGYLLKEGQRWLTEARKETVMGQPIPKTPRQLREFLGKAGFCRLFIPGFAEMAAPLYPLTKPGTLFNWGPDQQKAFQEIKQALLTAPALGLPDLTKPFELFVDEKQGYAKGVLTQKLGPWRRPVAYLSKKLDPVAAGWPPCLRMVAAIAVLTKDAGKLTMGQPLVILAPHAVEALVKQPPDRWLSNARMTHYQALLLDTDRVQFGPVVALNPATLLPLPEEGLQHDCLDILAEAHGTRSDLMDQPLPDADHTWYTDGSSFLQEGQRKAGAAVTTETEVIWARALPAGTSAQRAELIALTQALKMAEGKKLNVYTDSRYAFATAHIHGEIYRRRGWLTSEGKEIKNKDEILALLKALFLPKRLSIIHCPGHQKGNSAEARGNRMADQAAREVATRETPETSTLLAGKRTADGSEFEKRTADGSEFESPKKKAKVE

SEQ ID NO: 2406 - protein, 2091 aa, synthetic construct
MPAAKRVKLDGGDKKYSIGLDIGTNSVGWAVITDEYKVPSKKFKVLGNTDRHSIKKNLIGALLFDSGETAEATRLKRTARRRYTRRKNRICYLQEIFSNEMAKVDDSFFHRLEESFLVEEDKKHERHPIFGNIVDEVAYHEKYPTIYHLRKKLVDSTDKADLRLIYLALAHMIKFRGHFLIEGDLNPDNSDVDKLFIQLVQTYNQLFEENPINASGVDAKAILSARLSKSRRLENLIAQLPGEKKNGLFGNLIALSLGLTPNFKSNFDLAEDAKLQLSKDTYDDDLDNLLAQIGDQYADLFLAAKNLSDAILLSDILRVNTEITKAPLSASMIKRYDEHHQDLTLLKALVRQQLPEKYKEIFFDQSKNGYAGYIDGGASQEEFYKFIKPILEKMDGTEELLVKLNREDLLRKQRTFDNGSIPHQIHLGELHAILRRQEDFYPFLKDNREKIEKILTFRIPYYVGPLARGNSRFAWMTRKSEETITPWNFEEVVDKGASAQSFIERMTNFDKNLPNEKVLPKHSLLYEYFTVYNELTKVKYVTEGMRKPAFLSGEQKKAIVDLLFKTNRKVTVKQLKEDYFKKIECFDSVEISGVEDRFNASLGTYHDLLKIIKDKDFLDNEENEDILEDIVLTLTLFEDREMIEERLKTYAHLFDDKVMKQLKRRRYTGWGRLSRKLINGIRDKQSGKTILDFLKSDGFANRNFMQLIHDDSLTFKEDIQKAQVSGQGDSLHEHIANLAGSPAIKKGILQTVKVVDELVKVMGRHKPENIVIEMARENQTTQKGQKNSRERMKRIEEGIKELGSQILKEHPVENTQLQNEKLYLYYLQNGRDMYVDQELDINRLSDYDVDHIVPQSFLKDDSIDNKVLTRSDKARGKSDNVPSEEVVKKMKNYWRQLLNAKLITQRKFDNLTKAERGGLSELDKAGFIKRQLVETRQITKHVAQILDSRMNTKYDENDKLIREVKVITLKSKLVSDFRKDFQFYKVREINNYHHAHDAYLNAVVGTALIKKYPKLESEFVYGDYKVYDVRKMIAKSEQEIGKATAKYFFYSNIMNFFKTEITLANGEIRKRPLIETNGETGEIVWDKGRDFATVRKVLSMPQVNIVKKTEVQTGGFSKESILPKRNSDKLIARKKDWDPKKYGGFDSPTVAYSVLVVAKVEKGKSKKLKSVKELLGITIMERSSFEKNPIDFLEAKGYKEVKKDLIIKLPKYSLFELENGRKRMLASAGELQKGNELALPSKYVNFLYLASHYEKLKGSPEDNEQKQLFVEQHKHYLDEIIEQISEFSKRVILADANLDKVLSAYNKHRDKPIREQAENIIHLFTLTNLGAPAAFKYFDTTIDRKRYTSTKEVLDATLIHQSITGLYETRIDLSQLGGDGGGSSGGSGGTLNIEDEYRLHETSKEPDVSLGSTWLSDFPQAWAETGGMGLAVRQAPLIIPLKATSTPVSIKQYPMSQEARLGIKPHIQRLLDQGILVPCQSPWNTPLLPVKKPGTNDYRPVQDLREVNKRVEDIHPTVPNPYNLLSGLPPSHQWYTVLDLKDAFFCLRLHPTSQPLFAFEWRDPEMGISGQLTWTRLPQGFKNSPTLFNEALHRDLAGFRIQHPDLILLQYVDDLLLAATSELDCQQGTRALLQTLGDLGYRASAKKAQICQKQVKYLGYLLKEGQRWLTEARKETVMGQPIPKTPRQLREFLGKAGFCRLFIPGFAEMAAPLYPLTKPGTLFNWGPDQQKAFQEIKQALLTAPALGLPDLTKPFELFVDEKQGYAKGVLTQKLGPWRRPVAYLSKKLDPVAAGWPPCLRMVAAIAVLTKDAGKLTMGQPLVILAPHAVEALVKQPPDRWLSNARMTHYQALLLDTDRVQFGPVVALNPATLLPLPEEGLQHDCLDILAEAHGTRSDLMDQPLPDADHTWYTDGSSFLQEGQRKAGAAVTTETEVIWARALPAGTSAQRAELIALTQALKMAEGKKLNVYTDSRYAFATAHIHGEIYRRRGWLTSEGKEIKNKDEILALLKALFLPKRLSIIHCPGHQKGNSAEARGNRMADQAAREVATRETPETSTLLAGKRTADGSEFEKRTADGSEFESPKKKAKVE

SEQ ID NO: 2407 - protein, 2094 aa, synthetic construct
MPAAKRVKLDGGDKKYSIGLDIGTNSVGWAVITDEYKVPSKKFKVLGNTDRHSIKKNLIGALLFDSGETAEATRLKRTARRRYTRRKNRICYLQEIFSNEMAKVDDSFFHRLEESFLVEEDKKHERHPIFGNIVDEVAYHEKYPTIYHLRKKLVDSTDKADLRLIYLALAHMIKFRGHFLIEGDLNPDNSDVDKLFIQLVQTYNQLFEENPINASGVDAKAILSARLSKSRRLENLIAQLPGEKKNGLFGNLIALSLGLTPNFKSNFDLAEDAKLQLSKDTYDDDLDNLLAQIGDQYADLFLAAKNLSDAILLSDILRVNTEITKAPLSASMIKRYDEHHQDLTLLKALVRQQLPEKYKEIFFDQSKNGYAGYIDGGASQEEFYKFIKPILEKMDGTEELLVKLNREDLLRKQRTFDNGSIPHQIHLGELHAILRRQEDFYPFLKDNREKIEKILTFRIPYYVGPLARGNSRFAWMTRKSEETITPWNFEEVVDKGASAQSFIERMTNFDKNLPNEKVLPKHSLLYEYFTVYNELTKVKYVTEGMRKPAFLSGEQKKAIVDLLFKTNRKVTVKQLKEDYFKKIECFDSVEISGVEDRFNASLGTYHDLLKIIKDKDFLDNEENEDILEDIVLTLTLFEDREMIEERLKTYAHLFDDKVMKQLKRRRYTGWGRLSRKLINGIRDKQSGKTILDFLKSDGFANRNFMQLIHDDSLTFKEDIQKAQVSGQGDSLHEHIANLAGSPAIKKGILQTVKVVDELVKVMGRHKPENIVIEMARENQTTQKGQKNSRERMKRIEEGIKELGSQILKEHPVENTQLQNEKLYLYYLQNGRDMYVDQELDINRLSDYDVDHIVPQSFLKDDSIDNKVLTRSDKARGKSDNVPSEEVVKKMKNYWRQLLNAKLITQRKFDNLTKAERGGLSELDKAGFIKRQLVETRQITKHVAQILDSRMNTKYDENDKLIREVKVITLKSKLVSDFRKDFQFYKVREINNYHHAHDAYLNAVVGTALIKKYPKLESEFVYGDYKVYDVRKMIAKSEQEIGKATAKYFFYSNIMNFFKTEITLANGEIRKRPLIETNGETGEIVWDKGRDFATVRKVLSMPQVNIVKKTEVQTGGFSKESILPKRNSDKLIARKKDWDPKKYGGFDSPTVAYSVLVVAKVEKGKSKKLKSVKELLGITIMERSSFEKNPIDFLEAKGYKEVKKDLIIKLPKYSLFELENGRKRMLASAGELQKGNELALPSKYVNFLYLASHYEKLKGSPEDNEQKQLFVEQHKHYLDEIIEQISEFSKRVILADANLDKVLSAYNKHRDKPIREQAENIIHLFTLTNLGAPAAFKYFDTTIDRKRYTSTKEVLDATLIHQSITGLYETRIDLSQLGGDGGGSSPAPGGSGGTLNIEDEYRLHETSKEPDVSLGSTWLSDFPQAWAETGGMGLAVRQAPLIIPLKATSTPVSIKQYPMSQEARLGIKPHIQRLLDQGILVPCQSPWNTPLLPVKKPGTNDYRPVQDLREVNKRVEDIHPTVPNPYNLLSGLPPSHQWYTVLDLKDAFFCLRLHPTSQPLFAFEWRDPEMGISGQLTWTRLPQGFKNSPTLFNEALHRDLAGFRIQHPDLILLQYVDDLLLAATSELDCQQGTRALLQTLGDLGYRASAKKAQICQKQVKYLGYLLKEGQRWLTEARKETVMGQPIPKTPRQLREFLGKAGFCRLFIPGFAEMAAPLYPLTKPGTLFNWGPDQQKAFQEIKQALLTAPALGLPDLTKPFELFVDEKQGYAKGVLTQKLGPWRRPVAYLSKKLDPVAAGWPPCLRMVAAIAVLTKDAGKLTMGQPLVILAPHAVEALVKQPPDRWLSNARMTHYQALLLDTDRVQFGPVVALNPATLLPLPEEGLQHDCLDILAEAHGTRSDLMDQPLPDADHTWYTDGSSFLQEGQRKAGAAVTTETEVIWARALPAGTSAQRAELIALTQALKMAEGKKLNVYTDSRYAFATAHIHGEIYRRRGWLTSEGKEIKNKDEILALLKALFLPKRLSIIHCPGHQKGNSAEARGNRMADQAAREVATRETPETSTLLAGKRTADGSEFEKRTADGSEFESPKKKAKVE

SEQ ID NO: 2408 - protein, 2096 aa, synthetic construct
MPAAKRVKLDGGDKKYSIGLDIGTNSVGWAVITDEYKVPSKKFKVLGNTDRHSIKKNLIGALLFDSGETAEATRLKRTARRRYTRRKNRICYLQEIFSNEMAKVDDSFFHRLEESFLVEEDKKHERHPIFGNIVDEVAYHEKYPTIYHLRKKLVDSTDKADLRLIYLALAHMIKFRGHFLIEGDLNPDNSDVDKLFIQLVQTYNQLFEENPINASGVDAKAILSARLSKSRRLENLIAQLPGEKKNGLFGNLIALSLGLTPNFKSNFDLAEDAKLQLSKDTYDDDLDNLLAQIGDQYADLFLAAKNLSDAILLSDILRVNTEITKAPLSASMIKRYDEHHQDLTLLKALVRQQLPEKYKEIFFDQSKNGYAGYIDGGASQEEFYKFIKPILEKMDGTEELLVKLNREDLLRKQRTFDNGSIPHQIHLGELHAILRRQEDFYPFLKDNREKIEKILTFRIPYYVGPLARGNSRFAWMTRKSEETITPWNFEEVVDKGASAQSFIERMTNFDKNLPNEKVLPKHSLLYEYFTVYNELTKVKYVTEGMRKPAFLSGEQKKAIVDLLFKTNRKVTVKQLKEDYFKKIECFDSVEISGVEDRFNASLGTYHDLLKIIKDKDFLDNEENEDILEDIVLTLTLFEDREMIEERLKTYAHLFDDKVMKQLKRRRYTGWGRLSRKLINGIRDKQSGKTILDFLKSDGFANRNFMQLIHDDSLTFKEDIQKAQVSGQGDSLHEHIANLAGSPAIKKGILQTVKVVDELVKVMGRHKPENIVIEMARENQTTQKGQKNSRERMKRIEEGIKELGSQILKEHPVENTQLQNEKLYLYYLQNGRDMYVDQELDINRLSDYDVDHIVPQSFLKDDSIDNKVLTRSDKARGKSDNVPSEEVVKKMKNYWRQLLNAKLITQRKFDNLTKAERGGLSELDKAGFIKRQLVETRQITKHVAQILDSRMNTKYDENDKLIREVKVITLKSKLVSDFRKDFQFYKVREINNYHHAHDAYLNAVVGTALIKKYPKLESEFVYGDYKVYDVRKMIAKSEQEIGKATAKYFFYSNIMNFFKTEITLANGEIRKRPLIETNGETGEIVWDKGRDFATVRKVLSMPQVNIVKKTEVQTGGFSKESILPKRNSDKLIARKKDWDPKKYGGFDSPTVAYSVLVVAKVEKGKSKKLKSVKELLGITIMERSSFEKNPIDFLEAKGYKEVKKDLIIKLPKYSLFELENGRKRMLASAGELQKGNELALPSKYVNFLYLASHYEKLKGSPEDNEQKQLFVEQHKHYLDEIIEQISEFSKRVILADANLDKVLSAYNKHRDKPIREQAENIIHLFTLTNLGAPAAFKYFDTTIDRKRYTSTKEVLDATLIHQSITGLYETRIDLSQLGGDGGGGSEAAAKGSSGGTLNIEDEYRLHETSKEPDVSLGSTWLSDFPQAWAETGGMGLAVRQAPLIIPLKATSTPVSIKQYPMSQEARLGIKPHIQRLLDQGILVPCQSPWNTPLLPVKKPGTNDYRPVQDLREVNKRVEDIHPTVPNPYNLLSGLPPSHQWYTVLDLKDAFFCLRLHPTSQPLFAFEWRDPEMGISGQLTWTRLPQGFKNSPTLFNEALHRDLAGFRIQHPDLILLQYVDDLLLAATSELDCQQGTRALLQTLGDLGYRASAKKAQICQKQVKYLGYLLKEGQRWLTEARKETVMGQPIPKTPRQLREFLGKAGFCRLFIPGFAEMAAPLYPLTKPGTLFNWGPDQQKAFQEIKQALLTAPALGLPDLTKPFELFVDEKQGYAKGVLTQKLGPWRRPVAYLSKKLDPVAAGWPPCLRMVAAIAVLTKDAGKLTMGQPLVILAPHAVEALVKQPPDRWLSNARMTHYQALLLDTDRVQFGPVVALNPATLLPLPEEGLQHDCLDILAEAHGTRSDLMDQPLPDADHTWYTDGSSFLQEGQRKAGAAVTTETEVIWARALPAGTSAQRAELIALTQALKMAEGKKLNVYTDSRYAFATAHIHGEIYRRRGWLTSEGKEIKNKDEILALLKALFLPKRLSIIHCPGHQKGNSAEARGNRMADQAAREVATRETPETSTLLAGKRTADGSEFEKRTADGSEFESPKKKAKVE

SEQ ID NO: 2409 - protein, 2094 aa, synthetic construct
MPAAKRVKLDGGDKKYSIGLDIGTNSVGWAVITDEYKVPSKKFKVLGNTDRHSIKKNLIGALLFDSGETAEATRLKRTARRRYTRRKNRICYLQEIFSNEMAKVDDSFFHRLEESFLVEEDKKHERHPIFGNIVDEVAYHEKYPTIYHLRKKLVDSTDKADLRLIYLALAHMIKFRGHFLIEGDLNPDNSDVDKLFIQLVQTYNQLFEENPINASGVDAKAILSARLSKSRRLENLIAQLPGEKKNGLFGNLIALSLGLTPNFKSNFDLAEDAKLQLSKDTYDDDLDNLLAQIGDQYADLFLAAKNLSDAILLSDILRVNTEITKAPLSASMIKRYDEHHQDLTLLKALVRQQLPEKYKEIFFDQSKNGYAGYIDGGASQEEFYKFIKPILEKMDGTEELLVKLNREDLLRKQRTFDNGSIPHQIHLGELHAILRRQEDFYPFLKDNREKIEKILTFRIPYYVGPLARGNSRFAWMTRKSEETITPWNFEEVVDKGASAQSFIERMTNFDKNLPNEKVLPKHSLLYEYFTVYNELTKVKYVTEGMRKPAFLSGEQKKAIVDLLFKTNRKVTVKQLKEDYFKKIECFDSVEISGVEDRFNASLGTYHDLLKIIKDKDFLDNEENEDILEDIVLTLTLFEDREMIEERLKTYAHLFDDKVMKQLKRRRYTGWGRLSRKLINGIRDKQSGKTILDFLKSDGFANRNFMQLIHDDSLTFKEDIQKAQVSGQGDSLHEHIANLAGSPAIKKGILQTVKVVDELVKVMGRHKPENIVIEMARENQTTQKGQKNSRERMKRIEEGIKELGSQILKEHPVENTQLQNEKLYLYYLQNGRDMYVDQELDINRLSDYDVDHIVPQSFLKDDSIDNKVLTRSDKARGKSDNVPSEEVVKKMKNYWRQLLNAKLITQRKFDNLTKAERGGLSELDKAGFIKRQLVETRQITKHVAQILDSRMNTKYDENDKLIREVKVITLKSKLVSDFRKDFQFYKVREINNYHHAHDAYLNAVVGTALIKKYPKLESEFVYGDYKVYDVRKMIAKSEQEIGKATAKYFFYSNIMNFFKTEITLANGEIRKRPLIETNGETGEIVWDKGRDFATVRKVLSMPQVNIVKKTEVQTGGFSKESILPKRNSDKLIARKKDWDPKKYGGFDSPTVAYSVLVVAKVEKGKSKKLKSVKELLGITIMERSSFEKNPIDFLEAKGYKEVKKDLIIKLPKYSLFELENGRKRMLASAGELQKGNELALPSKYVNFLYLASHYEKLKGSPEDNEQKQLFVEQHKHYLDEIIEQISEFSKRVILADANLDKVLSAYNKHRDKPIREQAENIIHLFTLTNLGAPAAFKYFDTTIDRKRYTSTKEVLDATLIHQSITGLYETRIDLSQLGGDGGGGGGSSGGSGGTLNIEDEYRLHETSKEPDVSLGSTWLSDFPQAWAETGGMGLAVRQAPLIIPLKATSTPVSIKQYPMSQEARLGIKPHIQRLLDQGILVPCQSPWNTPLLPVKKPGTNDYRPVQDLREVNKRVEDIHPTVPNPYNLLSGLPPSHQWYTVLDLKDAFFCLRLHPTSQPLFAFEWRDPEMGISGQLTWTRLPQGFKNSPTLFNEALHRDLAGFRIQHPDLILLQYVDDLLLAATSELDCQQGTRALLQTLGDLGYRASAKKAQICQKQVKYLGYLLKEGQRWLTEARKETVMGQPIPKTPRQLREFLGKAGFCRLFIPGFAEMAAPLYPLTKPGTLFNWGPDQQKAFQEIKQALLTAPALGLPDLTKPFELFVDEKQGYAKGVLTQKLGPWRRPVAYLSKKLDPVAAGWPPCLRMVAAIAVLTKDAGKLTMGQPLVILAPHAVEALVKQPPDRWLSNARMTHYQALLLDTDRVQFGPVVALNPATLLPLPEEGLQHDCLDILAEAHGTRSDLMDQPLPDADHTWYTDGSSFLQEGQRKAGAAVTTETEVIWARALPAGTSAQRAELIALTQALKMAEGKKLNVYTDSRYAFATAHIHGEIYRRRGWLTSEGKEIKNKDEILALLKALFLPKRLSIIHCPGHQKGNSAEARGNRMADQAAREVATRETPETSTLLAGKRTADGSEFEKRTADGSEFESPKKKAKVE

SEQ ID NO: 2410 - protein, 2110 aa, synthetic construct
MPAAKRVKLDGGDKKYSIGLDIGTNSVGWAVITDEYKVPSKKFKVLGNTDRHSIKKNLIGALLFDSGETAEATRLKRTARRRYTRRKNRICYLQEIFSNEMAKVDDSFFHRLEESFLVEEDKKHERHPIFGNIVDEVAYHEKYPTIYHLRKKLVDSTDKADLRLIYLALAHMIKFRGHFLIEGDLNPDNSDVDKLFIQLVQTYNQLFEENPINASGVDAKAILSARLSKSRRLENLIAQLPGEKKNGLFGNLIALSLGLTPNFKSNFDLAEDAKLQLSKDTYDDDLDNLLAQIGDQYADLFLAAKNLSDAILLSDILRVNTEITKAPLSASMIKRYDEHHQDLTLLKALVRQQLPEKYKEIFFDQSKNGYAGYIDGGASQEEFYKFIKPILEKMDGTEELLVKLNREDLLRKQRTFDNGSIPHQIHLGELHAILRRQEDFYPFLKDNREKIEKILTFRIPYYVGPLARGNSRFAWMTRKSEETITPWNFEEVVDKGASAQSFIERMTNFDKNLPNEKVLPKHSLLYEYFTVYNELTKVKYVTEGMRKPAFLSGEQKKAIVDLLFKTNRKVTVKQLKEDYFKKIECFDSVEISGVEDRFNASLGTYHDLLKIIKDKDFLDNEENEDILEDIVLTLTLFEDREMIEERLKTYAHLFDDKVMKQLKRRRYTGWGRLSRKLINGIRDKQSGKTILDFLKSDGFANRNFMQLIHDDSLTFKEDIQKAQVSGQGDSLHEHIANLAGSPAIKKGILQTVKVVDELVKVMGRHKPENIVIEMARENQTTQKGQKNSRERMKRIEEGIKELGSQILKEHPVENTQLQNEKLYLYYLQNGRDMYVDQELDINRLSDYDVDHIVPQSFLKDDSIDNKVLTRSDKARGKSDNVPSEEVVKKMKNYWRQLLNAKLITQRKFDNLTKAERGGLSELDKAGFIKRQLVETRQITKHVAQILDSRMNTKYDENDKLIREVKVITLKSKLVSDFRKDFQFYKVREINNYHHAHDAYLNAVVGTALIKKYPKLESEFVYGDYKVYDVRKMIAKSEQEIGKATAKYFFYSNIMNFFKTEITLANGEIRKRPLIETNGETGEIVWDKGRDFATVRKVLSMPQVNIVKKTEVQTGGFSKESILPKRNSDKLIARKKDWDPKKYGGFDSPTVAYSVLVVAKVEKGKSKKLKSVKELLGITIMERSSFEKNPIDFLEAKGYKEVKKDLIIKLPKYSLFELENGRKRMLASAGELQKGNELALPSKYVNFLYLASHYEKLKGSPEDNEQKQLFVEQHKHYLDEIIEQISEFSKRVILADANLDKVLSAYNKHRDKPIREQAENIIHLFTLTNLGAPAAFKYFDTTIDRKRYTSTKEVLDATLIHQSITGLYETRIDLSQLGGDGGGGGGSGGGGSGGGGSGGGGSGGGGSGGTLNIEDEYRLHETSKEPDVSLGSTWLSDFPQAWAETGGMGLAVRQAPLIIPLKATSTPVSIKQYPMSQEARLGIKPHIQRLLDQGILVPCQSPWNTPLLPVKKPGTNDYRPVQDLREVNKRVEDIHPTVPNPYNLLSGLPPSHQWYTVLDLKDAFFCLRLHPTSQPLFAFEWRDPEMGISGQLTWTRLPQGFKNSPTLFNEALHRDLAGFRIQHPDLILLQYVDDLLLAATSELDCQQGTRALLQTLGDLGYRASAKKAQICQKQVKYLGYLLKEGQRWLTEARKETVMGQPIPKTPRQLREFLGKAGFCRLFIPGFAEMAAPLYPLTKPGTLFNWGPDQQKAFQEIKQALLTAPALGLPDLTKPFELFVDEKQGYAKGVLTQKLGPWRRPVAYLSKKLDPVAAGWPPCLRMVAAIAVLTKDAGKLTMGQPLVILAPHAVEALVKQPPDRWLSNARMTHYQALLLDTDRVQFGPVVALNPATLLPLPEEGLQHDCLDILAEAHGTRSDLMDQPLPDADHTWYTDGSSFLQEGQRKAGAAVTTETEVIWARALPAGTSAQRAELIALTQALKMAEGKKLNVYTDSRYAFATAHIHGEIYRRRGWLTSEGKEIKNKDEILALLKALFLPKRLSIIHCPGHQKGNSAEARGNRMADQAAREVATRETPETSTLLAGKRTADGSEFEKRTADGSEFESPKKKAKVE

SEQ ID NO: 2411 - protein, 2091 aa, synthetic construct
MPAAKRVKLDGGDKKYSIGLDIGTNSVGWAVITDEYKVPSKKFKVLGNTDRHSIKKNLIGALLFDSGETAEATRLKRTARRRYTRRKNRICYLQEIFSNEMAKVDDSFFHRLEESFLVEEDKKHERHPIFGNIVDEVAYHEKYPTIYHLRKKLVDSTDKADLRLIYLALAHMIKFRGHFLIEGDLNPDNSDVDKLFIQLVQTYNQLFEENPINASGVDAKAILSARLSKSRRLENLIAQLPGEKKNGLFGNLIALSLGLTPNFKSNFDLAEDAKLQLSKDTYDDDLDNLLAQIGDQYADLFLAAKNLSDAILLSDILRVNTEITKAPLSASMIKRYDEHHQDLTLLKALVRQQLPEKYKEIFFDQSKNGYAGYIDGGASQEEFYKFIKPILEKMDGTEELLVKLNREDLLRKQRTFDNGSIPHQIHLGELHAILRRQEDFYPFLKDNREKIEKILTFRIPYYVGPLARGNSRFAWMTRKSEETITPWNFEEVVDKGASAQSFIERMTNFDKNLPNEKVLPKHSLLYEYFTVYNELTKVKYVTEGMRKPAFLSGEQKKAIVDLLFKTNRKVTVKQLKEDYFKKIECFDSVEISGVEDRFNASLGTYHDLLKIIKDKDFLDNEENEDILEDIVLTLTLFEDREMIEERLKTYAHLFDDKVMKQLKRRRYTGWGRLSRKLINGIRDKQSGKTILDFLKSDGFANRNFMQLIHDDSLTFKEDIQKAQVSGQGDSLHEHIANLAGSPAIKKGILQTVKVVDELVKVMGRHKPENIVIEMARENQTTQKGQKNSRERMKRIEEGIKELGSQILKEHPVENTQLQNEKLYLYYLQNGRDMYVDQELDINRLSDYDVDHIVPQSFLKDDSIDNKVLTRSDKARGKSDNVPSEEVVKKMKNYWRQLLNAKLITQRKFDNLTKAERGGLSELDKAGFIKRQLVETRQITKHVAQILDSRMNTKYDENDKLIREVKVITLKSKLVSDFRKDFQFYKVREINNYHHAHDAYLNAVVGTALIKKYPKLESEFVYGDYKVYDVRKMIAKSEQEIGKATAKYFFYSNIMNFFKTEITLANGEIRKRPLIETNGETGEIVWDKGRDFATVRKVLSMPQVNIVKKTEVQTGGFSKESILPKRNSDKLIARKKDWDPKKYGGFDSPTVAYSVLVVAKVEKGKSKKLKSVKELLGITIMERSSFEKNPIDFLEAKGYKEVKKDLIIKLPKYSLFELENGRKRMLASAGELQKGNELALPSKYVNFLYLASHYEKLKGSPEDNEQKQLFVEQHKHYLDEIIEQISEFSKRVILADANLDKVLSAYNKHRDKPIREQAENIIHLFTLTNLGAPAAFKYFDTTIDRKRYTSTKEVLDATLIHQSITGLYETRIDLSQLGGDGGGSSGSSGGTLNIEDEYRLHETSKEPDVSLGSTWLSDFPQAWAETGGMGLAVRQAPLIIPLKATSTPVSIKQYPMSQEARLGIKPHIQRLLDQGILVPCQSPWNTPLLPVKKPGTNDYRPVQDLREVNKRVEDIHPTVPNPYNLLSGLPPSHQWYTVLDLKDAFFCLRLHPTSQPLFAFEWRDPEMGISGQLTWTRLPQGFKNSPTLFNEALHRDLAGFRIQHPDLILLQYVDDLLLAATSELDCQQGTRALLQTLGDLGYRASAKKAQICQKQVKYLGYLLKEGQRWLTEARKETVMGQPIPKTPRQLREFLGKAGFCRLFIPGFAEMAAPLYPLTKPGTLFNWGPDQQKAFQEIKQALLTAPALGLPDLTKPFELFVDEKQGYAKGVLTQKLGPWRRPVAYLSKKLDPVAAGWPPCLRMVAAIAVLTKDAGKLTMGQPLVILAPHAVEALVKQPPDRWLSNARMTHYQALLLDTDRVQFGPVVALNPATLLPLPEEGLQHDCLDILAEAHGTRSDLMDQPLPDADHTWYTDGSSFLQEGQRKAGAAVTTETEVIWARALPAGTSAQRAELIALTQALKMAEGKKLNVYTDSRYAFATAHIHGEIYRRRGWLTSEGKEIKNKDEILALLKALFLPKRLSIIHCPGHQKGNSAEARGNRMADQAAREVATRETPETSTLLAGKRTADGSEFEKRTADGSEFESPKKKAKVE

SEQ ID NO: 2412 - protein, 2096 aa, synthetic construct
MPAAKRVKLDGGDKKYSIGLDIGTNSVGWAVITDEYKVPSKKFKVLGNTDRHSIKKNLIGALLFDSGETAEATRLKRTARRRYTRRKNRICYLQEIFSNEMAKVDDSFFHRLEESFLVEEDKKHERHPIFGNIVDEVAYHEKYPTIYHLRKKLVDSTDKADLRLIYLALAHMIKFRGHFLIEGDLNPDNSDVDKLFIQLVQTYNQLFEENPINASGVDAKAILSARLSKSRRLENLIAQLPGEKKNGLFGNLIALSLGLTPNFKSNFDLAEDAKLQLSKDTYDDDLDNLLAQIGDQYADLFLAAKNLSDAILLSDILRVNTEITKAPLSASMIKRYDEHHQDLTLLKALVRQQLPEKYKEIFFDQSKNGYAGYIDGGASQEEFYKFIKPILEKMDGTEELLVKLNREDLLRKQRTFDNGSIPHQIHLGELHAILRRQEDFYPFLKDNREKIEKILTFRIPYYVGPLARGNSRFAWMTRKSEETITPWNFEEVVDKGASAQSFIERMTNFDKNLPNEKVLPKHSLLYEYFTVYNELTKVKYVTEGMRKPAFLSGEQKKAIVDLLFKTNRKVTVKQLKEDYFKKIECFDSVEISGVEDRFNASLGTYHDLLKIIKDKDFLDNEENEDILEDIVLTLTLFEDREMIEERLKTYAHLFDDKVMKQLKRRRYTGWGRLSRKLINGIRDKQSGKTILDFLKSDGFANRNFMQLIHDDSLTFKEDIQKAQVSGQGDSLHEHIANLAGSPAIKKGILQTVKVVDELVKVMGRHKPENIVIEMARENQTTQKGQKNSRERMKRIEEGIKELGSQILKEHPVENTQLQNEKLYLYYLQNGRDMYVDQELDINRLSDYDVDHIVPQSFLKDDSIDNKVLTRSDKARGKSDNVPSEEVVKKMKNYWRQLLNAKLITQRKFDNLTKAERGGLSELDKAGFIKRQLVETRQITKHVAQILDSRMNTKYDENDKLIREVKVITLKSKLVSDFRKDFQFYKVREINNYHHAHDAYLNAVVGTALIKKYPKLESEFVYGDYKVYDVRKMIAKSEQEIGKATAKYFFYSNIMNFFKTEITLANGEIRKRPLIETNGETGEIVWDKGRDFATVRKVLSMPQVNIVKKTEVQTGGFSKESILPKRNSDKLIARKKDWDPKKYGGFDSPTVAYSVLVVAKVEKGKSKKLKSVKELLGITIMERSSFEKNPIDFLEAKGYKEVKKDLIIKLPKYSLFELENGRKRMLASAGELQKGNELALPSKYVNFLYLASHYEKLKGSPEDNEQKQLFVEQHKHYLDEIIEQISEFSKRVILADANLDKVLSAYNKHRDKPIREQAENIIHLFTLTNLGAPAAFKYFDTTIDRKRYTSTKEVLDATLIHQSITGLYETRIDLSQLGGDGGEAAAKGGGGSSGGTLNIEDEYRLHETSKEPDVSLGSTWLSDFPQAWAETGGMGLAVRQAPLIIPLKATSTPVSIKQYPMSQEARLGIKPHIQRLLDQGILVPCQSPWNTPLLPVKKPGTNDYRPVQDLREVNKRVEDIHPTVPNPYNLLSGLPPSHQWYTVLDLKDAFFCLRLHPTSQPLFAFEWRDPEMGISGQLTWTRLPQGFKNSPTLFNEALHRDLAGFRIQHPDLILLQYVDDLLLAATSELDCQQGTRALLQTLGDLGYRASAKKAQICQKQVKYLGYLLKEGQRWLTEARKETVMGQPIPKTPRQLREFLGKAGFCRLFIPGFAEMAAPLYPLTKPGTLFNWGPDQQKAFQEIKQALLTAPALGLPDLTKPFELFVDEKQGYAKGVLTQKLGPWRRPVAYLSKKLDPVAAGWPPCLRMVAAIAVLTKDAGKLTMGQPLVILAPHAVEALVKQPPDRWLSNARMTHYQALLLDTDRVQFGPVVALNPATLLPLPEEGLQHDCLDILAEAHGTRSDLMDQPLPDADHTWYTDGSSFLQEGQRKAGAAVTTETEVIWARALPAGTSAQRAELIALTQALKMAEGKKLNVYTDSRYAFATAHIHGEIYRRRGWLTSEGKEIKNKDEILALLKALFLPKRLSIIHCPGHQKGNSAEARGNRMADQAAREVATRETPETSTLLAGKRTADGSEFEKRTADGSEFESPKKKAKVE

SEQ ID NO: 2413 - protein, 2096 aa, synthetic construct
MPAAKRVKLDGGDKKYSIGLDIGTNSVGWAVITDEYKVPSKKFKVLGNTDRHSIKKNLIGALLFDSGETAEATRLKRTARRRYTRRKNRICYLQEIFSNEMAKVDDSFFHRLEESFLVEEDKKHERHPIFGNIVDEVAYHEKYPTIYHLRKKLVDSTDKADLRLIYLALAHMIKFRGHFLIEGDLNPDNSDVDKLFIQLVQTYNQLFEENPINASGVDAKAILSARLSKSRRLENLIAQLPGEKKNGLFGNLIALSLGLTPNFKSNFDLAEDAKLQLSKDTYDDDLDNLLAQIGDQYADLFLAAKNLSDAILLSDILRVNTEITKAPLSASMIKRYDEHHQDLTLLKALVRQQLPEKYKEIFFDQSKNGYAGYIDGGASQEEFYKFIKPILEKMDGTEELLVKLNREDLLRKQRTFDNGSIPHQIHLGELHAILRRQEDFYPFLKDNREKIEKILTFRIPYYVGPLARGNSRFAWMTRKSEETITPWNFEEVVDKGASAQSFIERMTNFDKNLPNEKVLPKHSLLYEYFTVYNELTKVKYVTEGMRKPAFLSGEQKKAIVDLLFKTNRKVTVKQLKEDYFKKIECFDSVEISGVEDRFNASLGTYHDLLKIIKDKDFLDNEENEDILEDIVLTLTLFEDREMIEERLKTYAHLFDDKVMKQLKRRRYTGWGRLSRKLINGIRDKQSGKTILDFLKSDGFANRNFMQLIHDDSLTFKEDIQKAQVSGQGDSLHEHIANLAGSPAIKKGILQTVKVVDELVKVMGRHKPENIVIEMARENQTTQKGQKNSRERMKRIEEGIKELGSQILKEHPVENTQLQNEKLYLYYLQNGRDMYVDQELDINRLSDYDVDHIVPQSFLKDDSIDNKVLTRSDKARGKSDNVPSEEVVKKMKNYWRQLLNAKLITQRKFDNLTKAERGGLSELDKAGFIKRQLVETRQITKHVAQILDSRMNTKYDENDKLIREVKVITLKSKLVSDFRKDFQFYKVREINNYHHAHDAYLNAVVGTALIKKYPKLESEFVYGDYKVYDVRKMIAKSEQEIGKATAKYFFYSNIMNFFKTEITLANGEIRKRPLIETNGETGEIVWDKGRDFATVRKVLSMPQVNIVKKTEVQTGGFSKESILPKRNSDKLIARKKDWDPKKYGGFDSPTVAYSVLVVAKVEKGKSKKLKSVKELLGITIMERSSFEKNPIDFLEAKGYKEVKKDLIIKLPKYSLFELENGRKRMLASAGELQKGNELALPSKYVNFLYLASHYEKLKGSPEDNEQKQLFVEQHKHYLDEIIEQISEFSKRVILADANLDKVLSAYNKHRDKPIREQAENIIHLFTLTNLGAPAAFKYFDTTIDRKRYTSTKEVLDATLIHQSITGLYETRIDLSQLGGDGGGGSGGGEAAAKGGTLNIEDEYRLHETSKEPDVSLGSTWLSDFPQAWAETGGMGLAVRQAPLIIPLKATSTPVSIKQYPMSQEARLGIKPHIQRLLDQGILVPCQSPWNTPLLPVKKPGTNDYRPVQDLREVNKRVEDIHPTVPNPYNLLSGLPPSHQWYTVLDLKDAFFCLRLHPTSQPLFAFEWRDPEMGISGQLTWTRLPQGFKNSPTLFNEALHRDLAGFRIQHPDLILLQYVDDLLLAATSELDCQQGTRALLQTLGDLGYRASAKKAQICQKQVKYLGYLLKEGQRWLTEARKETVMGQPIPKTPRQLREFLGKAGFCRLFIPGFAEMAAPLYPLTKPGTLFNWGPDQQKAFQEIKQALLTAPALGLPDLTKPFELFVDEKQGYAKGVLTQKLGPWRRPVAYLSKKLDPVAAGWPPCLRMVAAIAVLTKDAGKLTMGQPLVILAPHAVEALVKQPPDRWLSNARMTHYQALLLDTDRVQFGPVVALNPATLLPLPEEGLQHDCLDILAEAHGTRSDLMDQPLPDADHTWYTDGSSFLQEGQRKAGAAVTTETEVIWARALPAGTSAQRAELIALTQALKMAEGKKLNVYTDSRYAFATAHIHGEIYRRRGWLTSEGKEIKNKDEILALLKALFLPKRLSIIHCPGHQKGNSAEARGNRMADQAAREVATRETPETSTLLAGKRTADGSEFEKRTADGSEFESPKKKAKVE

SEQ ID NO: 2414 - protein, 2094 aa, synthetic construct
MPAAKRVKLDGGDKKYSIGLDIGTNSVGWAVITDEYKVPSKKFKVLGNTDRHSIKKNLIGALLFDSGETAEATRLKRTARRRYTRRKNRICYLQEIFSNEMAKVDDSFFHRLEESFLVEEDKKHERHPIFGNIVDEVAYHEKYPTIYHLRKKLVDSTDKADLRLIYLALAHMIKFRGHFLIEGDLNPDNSDVDKLFIQLVQTYNQLFEENPINASGVDAKAILSARLSKSRRLENLIAQLPGEKKNGLFGNLIALSLGLTPNFKSNFDLAEDAKLQLSKDTYDDDLDNLLAQIGDQYADLFLAAKNLSDAILLSDILRVNTEITKAPLSASMIKRYDEHHQDLTLLKALVRQQLPEKYKEIFFDQSKNGYAGYIDGGASQEEFYKFIKPILEKMDGTEELLVKLNREDLLRKQRTFDNGSIPHQIHLGELHAILRRQEDFYPFLKDNREKIEKILTFRIPYYVGPLARGNSRFAWMTRKSEETITPWNFEEVVDKGASAQSFIERMTNFDKNLPNEKVLPKHSLLYEYFTVYNELTKVKYVTEGMRKPAFLSGEQKKAIVDLLFKTNRKVTVKQLKEDYFKKIECFDSVEISGVEDRFNASLGTYHDLLKIIKDKDFLDNEENEDILEDIVLTLTLFEDREMIEERLKTYAHLFDDKVMKQLKRRRYTGWGRLSRKLINGIRDKQSGKTILDFLKSDGFANRNFMQLIHDDSLTFKEDIQKAQVSGQGDSLHEHIANLAGSPAIKKGILQTVKVVDELVKVMGRHKPENIVIEMARENQTTQKGQKNSRERMKRIEEGIKELGSQILKEHPVENTQLQNEKLYLYYLQNGRDMYVDQELDINRLSDYDVDHIVPQSFLKDDSIDNKVLTRSDKARGKSDNVPSEEVVKKMKNYWRQLLNAKLITQRKFDNLTKAERGGLSELDKAGFIKRQLVETRQITKHVAQILDSRMNTKYDENDKLIREVKVITLKSKLVSDFRKDFQFYKVREINNYHHAHDAYLNAVVGTALIKKYPKLESEFVYGDYKVYDVRKMIAKSEQEIGKATAKYFFYSNIMNFFKTEITLANGEIRKRPLIETNGETGEIVWDKGRDFATVRKVLSMPQVNIVKKTEVQTGGFSKESILPKRNSDKLIARKKDWDPKKYGGFDSPTVAYSVLVVAKVEKGKSKKLKSVKELLGITIMERSSFEKNPIDFLEAKGYKEVKKDLIIKLPKYSLFELENGRKRMLASAGELQKGNELALPSKYVNFLYLASHYEKLKGSPEDNEQKQLFVEQHKHYLDEIIEQISEFSKRVILADANLDKVLSAYNKHRDKPIREQAENIIHLFTLTNLGAPAAFKYFDTTIDRKRYTSTKEVLDATLIHQSITGLYETRIDLSQLGGDGGPAPGSSGGGGGTLNIEDEYRLHETSKEPDVSLGSTWLSDFPQAWAETGGMGLAVRQAPLIIPLKATSTPVSIKQYPMSQEARLGIKPHIQRLLDQGILVPCQSPWNTPLLPVKKPGTNDYRPVQDLREVNKRVEDIHPTVPNPYNLLSGLPPSHQWYTVLDLKDAFFCLRLHPTSQPLFAFEWRDPEMGISGQLTWTRLPQGFKNSPTLFNEALHRDLAGFRIQHPDLILLQYVDDLLLAATSELDCQQGTRALLQTLGDLGYRASAKKAQICQKQVKYLGYLLKEGQRWLTEARKETVMGQPIPKTPRQLREFLGKAGFCRLFIPGFAEMAAPLYPLTKPGTLFNWGPDQQKAFQEIKQALLTAPALGLPDLTKPFELFVDEKQGYAKGVLTQKLGPWRRPVAYLSKKLDPVAAGWPPCLRMVAAIAVLTKDAGKLTMGQPLVILAPHAVEALVKQPPDRWLSNARMTHYQALLLDTDRVQFGPVVALNPATLLPLPEEGLQHDCLDILAEAHGTRSDLMDQPLPDADHTWYTDGSSFLQEGQRKAGAAVTTETEVIWARALPAGTSAQRAELIALTQALKMAEGKKLNVYTDSRYAFATAHIHGEIYRRRGWLTSEGKEIKNKDEILALLKALFLPKRLSIIHCPGHQKGNSAEARGNRMADQAAREVATRETPETSTLLAGKRTADGSEFEKRTADGSEFESPKKKAKVE

SEQ ID NO: 2415 - protein, 2089 aa, synthetic construct
MPAAKRVKLDGGDKKYSIGLDIGTNSVGWAVITDEYKVPSKKFKVLGNTDRHSIKKNLIGALLFDSGETAEATRLKRTARRRYTRRKNRICYLQEIFSNEMAKVDDSFFHRLEESFLVEEDKKHERHPIFGNIVDEVAYHEKYPTIYHLRKKLVDSTDKADLRLIYLALAHMIKFRGHFLIEGDLNPDNSDVDKLFIQLVQTYNQLFEENPINASGVDAKAILSARLSKSRRLENLIAQLPGEKKNGLFGNLIALSLGLTPNFKSNFDLAEDAKLQLSKDTYDDDLDNLLAQIGDQYADLFLAAKNLSDAILLSDILRVNTEITKAPLSASMIKRYDEHHQDLTLLKALVRQQLPEKYKEIFFDQSKNGYAGYIDGGASQEEFYKFIKPILEKMDGTEELLVKLNREDLLRKQRTFDNGSIPHQIHLGELHAILRRQEDFYPFLKDNREKIEKILTFRIPYYVGPLARGNSRFAWMTRKSEETITPWNFEEVVDKGASAQSFIERMTNFDKNLPNEKVLPKHSLLYEYFTVYNELTKVKYVTEGMRKPAFLSGEQKKAIVDLLFKTNRKVTVKQLKEDYFKKIECFDSVEISGVEDRFNASLGTYHDLLKIIKDKDFLDNEENEDILEDIVLTLTLFEDREMIEERLKTYAHLFDDKVMKQLKRRRYTGWGRLSRKLINGIRDKQSGKTILDFLKSDGFANRNFMQLIHDDSLTFKEDIQKAQVSGQGDSLHEHIANLAGSPAIKKGILQTVKVVDELVKVMGRHKPENIVIEMARENQTTQKGQKNSRERMKRIEEGIKELGSQILKEHPVENTQLQNEKLYLYYLQNGRDMYVDQELDINRLSDYDVDHIVPQSFLKDDSIDNKVLTRSDKARGKSDNVPSEEVVKKMKNYWRQLLNAKLITQRKFDNLTKAERGGLSELDKAGFIKRQLVETRQITKHVAQILDSRMNTKYDENDKLIREVKVITLKSKLVSDFRKDFQFYKVREINNYHHAHDAYLNAVVGTALIKKYPKLESEFVYGDYKVYDVRKMIAKSEQEIGKATAKYFFYSNIMNFFKTEITLANGEIRKRPLIETNGETGEIVWDKGRDFATVRKVLSMPQVNIVKKTEVQTGGFSKESILPKRNSDKLIARKKDWDPKKYGGFDSPTVAYSVLVVAKVEKGKSKKLKSVKELLGITIMERSSFEKNPIDFLEAKGYKEVKKDLIIKLPKYSLFELENGRKRMLASAGELQKGNELALPSKYVNFLYLASHYEKLKGSPEDNEQKQLFVEQHKHYLDEIIEQISEFSKRVILADANLDKVLSAYNKHRDKPIREQAENIIHLFTLTNLGAPAAFKYFDTTIDRKRYTSTKEVLDATLIHQSITGLYETRIDLSQLGGDGGGGGGGGTLNIEDEYRLHETSKEPDVSLGSTWLSDFPQAWAETGGMGLAVRQAPLIIPLKATSTPVSIKQYPMSQEARLGIKPHIQRLLDQGILVPCQSPWNTPLLPVKKPGTNDYRPVQDLREVNKRVEDIHPTVPNPYNLLSGLPPSHQWYTVLDLKDAFFCLRLHPTSQPLFAFEWRDPEMGISGQLTWTRLPQGFKNSPTLFNEALHRDLAGFRIQHPDLILLQYVDDLLLAATSELDCQQGTRALLQTLGDLGYRASAKKAQICQKQVKYLGYLLKEGQRWLTEARKETVMGQPIPKTPRQLREFLGKAGFCRLFIPGFAEMAAPLYPLTKPGTLFNWGPDQQKAFQEIKQALLTAPALGLPDLTKPFELFVDEKQGYAKGVLTQKLGPWRRPVAYLSKKLDPVAAGWPPCLRMVAAIAVLTKDAGKLTMGQPLVILAPHAVEALVKQPPDRWLSNARMTHYQALLLDTDRVQFGPVVALNPATLLPLPEEGLQHDCLDILAEAHGTRSDLMDQPLPDADHTWYTDGSSFLQEGQRKAGAAVTTETEVIWARALPAGTSAQRAELIALTQALKMAEGKKLNVYTDSRYAFATAHIHGEIYRRRGWLTSEGKEIKNKDEILALLKALFLPKRLSIIHCPGHQKGNSAEARGNRMADQAAREVATRETPETSTLLAGKRTADGSEFEKRTADGSEFESPKKKAKVE

SEQ ID NO: 2416 - protein, 2094 aa, synthetic construct
MPAAKRVKLDGGDKKYSIGLDIGTNSVGWAVITDEYKVPSKKFKVLGNTDRHSIKKNLIGALLFDSGETAEATRLKRTARRRYTRRKNRICYLQEIFSNEMAKVDDSFFHRLEESFLVEEDKKHERHPIFGNIVDEVAYHEKYPTIYHLRKKLVDSTDKADLRLIYLALAHMIKFRGHFLIEGDLNPDNSDVDKLFIQLVQTYNQLFEENPINASGVDAKAILSARLSKSRRLENLIAQLPGEKKNGLFGNLIALSLGLTPNFKSNFDLAEDAKLQLSKDTYDDDLDNLLAQIGDQYADLFLAAKNLSDAILLSDILRVNTEITKAPLSASMIKRYDEHHQDLTLLKALVRQQLPEKYKEIFFDQSKNGYAGYIDGGASQEEFYKFIKPILEKMDGTEELLVKLNREDLLRKQRTFDNGSIPHQIHLGELHAILRRQEDFYPFLKDNREKIEKILTFRIPYYVGPLARGNSRFAWMTRKSEETITPWNFEEVVDKGASAQSFIERMTNFDKNLPNEKVLPKHSLLYEYFTVYNELTKVKYVTEGMRKPAFLSGEQKKAIVDLLFKTNRKVTVKQLKEDYFKKIECFDSVEISGVEDRFNASLGTYHDLLKIIKDKDFLDNEENEDILEDIVLTLTLFEDREMIEERLKTYAHLFDDKVMKQLKRRRYTGWGRLSRKLINGIRDKQSGKTILDFLKSDGFANRNFMQLIHDDSLTFKEDIQKAQVSGQGDSLHEHIANLAGSPAIKKGILQTVKVVDELVKVMGRHKPENIVIEMARENQTTQKGQKNSRERMKRIEEGIKELGSQILKEHPVENTQLQNEKLYLYYLQNGRDMYVDQELDINRLSDYDVDHIVPQSFLKDDSIDNKVLTRSDKARGKSDNVPSEEVVKKMKNYWRQLLNAKLITQRKFDNLTKAERGGLSELDKAGFIKRQLVETRQITKHVAQILDSRMNTKYDENDKLIREVKVITLKSKLVSDFRKDFQFYKVREINNYHHAHDAYLNAVVGTALIKKYPKLESEFVYGDYKVYDVRKMIAKSEQEIGKATAKYFFYSNIMNFFKTEITLANGEIRKRPLIETNGETGEIVWDKGRDFATVRKVLSMPQVNIVKKTEVQTGGFSKESILPKRNSDKLIARKKDWDPKKYGGFDSPTVAYSVLVVAKVEKGKSKKLKSVKELLGITIMERSSFEKNPIDFLEAKGYKEVKKDLIIKLPKYSLFELENGRKRMLASAGELQKGNELALPSKYVNFLYLASHYEKLKGSPEDNEQKQLFVEQHKHYLDEIIEQISEFSKRVILADANLDKVLSAYNKHRDKPIREQAENIIHLFTLTNLGAPAAFKYFDTTIDRKRYTSTKEVLDATLIHQSITGLYETRIDLSQLGGDGGGGGGGSPAPGGTLNIEDEYRLHETSKEPDVSLGSTWLSDFPQAWAETGGMGLAVRQAPLIIPLKATSTPVSIKQYPMSQEARLGIKPHIQRLLDQGILVPCQSPWNTPLLPVKKPGTNDYRPVQDLREVNKRVEDIHPTVPNPYNLLSGLPPSHQWYTVLDLKDAFFCLRLHPTSQPLFAFEWRDPEMGISGQLTWTRLPQGFKNSPTLFNEALHRDLAGFRIQHPDLILLQYVDDLLLAATSELDCQQGTRALLQTLGDLGYRASAKKAQICQKQVKYLGYLLKEGQRWLTEARKETVMGQPIPKTPRQLREFLGKAGFCRLFIPGFAEMAAPLYPLTKPGTLFNWGPDQQKAFQEIKQALLTAPALGLPDLTKPFELFVDEKQGYAKGVLTQKLGPWRRPVAYLSKKLDPVAAGWPPCLRMVAAIAVLTKDAGKLTMGQPLVILAPHAVEALVKQPPDRWLSNARMTHYQALLLDTDRVQFGPVVALNPATLLPLPEEGLQHDCLDILAEAHGTRSDLMDQPLPDADHTWYTDGSSFLQEGQRKAGAAVTTETEVIWARALPAGTSAQRAELIALTQALKMAEGKKLNVYTDSRYAFATAHIHGEIYRRRGWLTSEGKEIKNKDEILALLKALFLPKRLSIIHCPGHQKGNSAEARGNRMADQAAREVATRETPETSTLLAGKRTADGSEFEKRTADGSEFESPKKKAKVE

SEQ ID NO: 2417 - protein, 2100 aa, synthetic construct
MPAAKRVKLDGGDKKYSIGLDIGTNSVGWAVITDEYKVPSKKFKVLGNTDRHSIKKNLIGALLFDSGETAEATRLKRTARRRYTRRKNRICYLQEIFSNEMAKVDDSFFHRLEESFLVEEDKKHERHPIFGNIVDEVAYHEKYPTIYHLRKKLVDSTDKADLRLIYLALAHMIKFRGHFLIEGDLNPDNSDVDKLFIQLVQTYNQLFEENPINASGVDAKAILSARLSKSRRLENLIAQLPGEKKNGLFGNLIALSLGLTPNFKSNFDLAEDAKLQLSKDTYDDDLDNLLAQIGDQYADLFLAAKNLSDAILLSDILRVNTEITKAPLSASMIKRYDEHHQDLTLLKALVRQQLPEKYKEIFFDQSKNGYAGYIDGGASQEEFYKFIKPILEKMDGTEELLVKLNREDLLRKQRTFDNGSIPHQIHLGELHAILRRQEDFYPFLKDNREKIEKILTFRIPYYVGPLARGNSRFAWMTRKSEETITPWNFEEVVDKGASAQSFIERMTNFDKNLPNEKVLPKHSLLYEYFTVYNELTKVKYVTEGMRKPAFLSGEQKKAIVDLLFKTNRKVTVKQLKEDYFKKIECFDSVEISGVEDRFNASLGTYHDLLKIIKDKDFLDNEENEDILEDIVLTLTLFEDREMIEERLKTYAHLFDDKVMKQLKRRRYTGWGRLSRKLINGIRDKQSGKTILDFLKSDGFANRNFMQLIHDDSLTFKEDIQKAQVSGQGDSLHEHIANLAGSPAIKKGILQTVKVVDELVKVMGRHKPENIVIEMARENQTTQKGQKNSRERMKRIEEGIKELGSQILKEHPVENTQLQNEKLYLYYLQNGRDMYVDQELDINRLSDYDVDHIVPQSFLKDDSIDNKVLTRSDKARGKSDNVPSEEVVKKMKNYWRQLLNAKLITQRKFDNLTKAERGGLSELDKAGFIKRQLVETRQITKHVAQILDSRMNTKYDENDKLIREVKVITLKSKLVSDFRKDFQFYKVREINNYHHAHDAYLNAVVGTALIKKYPKLESEFVYGDYKVYDVRKMIAKSEQEIGKATAKYFFYSNIMNFFKTEITLANGEIRKRPLIETNGETGEIVWDKGRDFATVRKVLSMPQVNIVKKTEVQTGGFSKESILPKRNSDKLIARKKDWDPKKYGGFDSPTVAYSVLVVAKVEKGKSKKLKSVKELLGITIMERSSFEKNPIDFLEAKGYKEVKKDLIIKLPKYSLFELENGRKRMLASAGELQKGNELALPSKYVNFLYLASHYEKLKGSPEDNEQKQLFVEQHKHYLDEIIEQISEFSKRVILADANLDKVLSAYNKHRDKPIREQAENIIHLFTLTNLGAPAAFKYFDTTIDRKRYTSTKEVLDATLIHQSITGLYETRIDLSQLGGDGGGGSGGSGGSGGSGGSGGTLNIEDEYRLHETSKGPDVPLGSTWLSDFPQAWAETGGMGLAFRQAPLIISLKATSTPVSIKQYPMSQEARLGIKPHIQRLLDQGILVPCQSPWNTPLLPVKKPGTNDYRPVQDLREVNKRVEDIHPTVPNPYNLLSGLPPSHQWYTVLDLKDAFFCLRLHPTSQSLFAFEWKDPEMGISGQLTWTRLPQGFKNSPTLFDEALHRDLADFRIQHPDLILLQYVDDLLLAATSELDCQQGTRALLQTLGDLGYRASAKKAQICQKQVKYLGYLLKEGQRWLTEARKETVMGQPTPKTPRQLREFLGTAGLCRLWIPGFAEMAAPLYPLTKTGTLFKWGPDQQKAYQEIKQALLTAPALGLPDLTKPFELFVDEKQGYAKGVLTQKLGPWRRPVAYLSKKLDPVAAGWPPCLRMVAAIAVLTKDVGKLTMGQPLVILAPHAVEALVKQPPDRWLSNARMTHYQALLLDTDRVQFGPIVALNPATLLPLPEEGLQHDCLDILAEAHGTRPDLTDQPLPDADHTWYTDGSSFLQEGQRRAGAAVTTETEVIWAKALPAGTSAQRAELIALTQALKMAAGKKLNVYTDSRYAFATAHIHGEIYRRRGLLTSEGKEIKNKDEILALLKALFLPKRLSIIHCPGHQKGNHAEARGNRMADQAAREVATRETPETSTLLAGKRTADGSEFEKRTADGSEFESPKKKAKVE

SEQ ID NO: 2418 - protein, 2096 aa, synthetic construct
MPAAKRVKLDGGDKKYSIGLDIGTNSVGWAVITDEYKVPSKKFKVLGNTDRHSIKKNLIGALLFDSGETAEATRLKRTARRRYTRRKNRICYLQEIFSNEMAKVDDSFFHRLEESFLVEEDKKHERHPIFGNIVDEVAYHEKYPTIYHLRKKLVDSTDKADLRLIYLALAHMIKFRGHFLIEGDLNPDNSDVDKLFIQLVQTYNQLFEENPINASGVDAKAILSARLSKSRRLENLIAQLPGEKKNGLFGNLIALSLGLTPNFKSNFDLAEDAKLQLSKDTYDDDLDNLLAQIGDQYADLFLAAKNLSDAILLSDILRVNTEITKAPLSASMIKRYDEHHQDLTLLKALVRQQLPEKYKEIFFDQSKNGYAGYIDGGASQEEFYKFIKPILEKMDGTEELLVKLNREDLLRKQRTFDNGSIPHQIHLGELHAILRRQEDFYPFLKDNREKIEKILTFRIPYYVGPLARGNSRFAWMTRKSEETITPWNFEEVVDKGASAQSFIERMTNFDKNLPNEKVLPKHSLLYEYFTVYNELTKVKYVTEGMRKPAFLSGEQKKAIVDLLFKTNRKVTVKQLKEDYFKKIECFDSVEISGVEDRFNASLGTYHDLLKIIKDKDFLDNEENEDILEDIVLTLTLFEDREMIEERLKTYAHLFDDKVMKQLKRRRYTGWGRLSRKLINGIRDKQSGKTILDFLKSDGFANRNFMQLIHDDSLTFKEDIQKAQVSGQGDSLHEHIANLAGSPAIKKGILQTVKVVDELVKVMGRHKPENIVIEMARENQTTQKGQKNSRERMKRIEEGIKELGSQILKEHPVENTQLQNEKLYLYYLQNGRDMYVDQELDINRLSDYDVDHIVPQSFLKDDSIDNKVLTRSDKARGKSDNVPSEEVVKKMKNYWRQLLNAKLITQRKFDNLTKAERGGLSELDKAGFIKRQLVETRQITKHVAQILDSRMNTKYDENDKLIREVKVITLKSKLVSDFRKDFQFYKVREINNYHHAHDAYLNAVVGTALIKKYPKLESEFVYGDYKVYDVRKMIAKSEQEIGKATAKYFFYSNIMNFFKTEITLANGEIRKRPLIETNGETGEIVWDKGRDFATVRKVLSMPQVNIVKKTEVQTGGFSKESILPKRNSDKLIARKKDWDPKKYGGFDSPTVAYSVLVVAKVEKGKSKKLKSVKELLGITIMERSSFEKNPIDFLEAKGYKEVKKDLIIKLPKYSLFELENGRKRMLASAGELQKGNELALPSKYVNFLYLASHYEKLKGSPEDNEQKQLFVEQHKHYLDEIIEQISEFSKRVILADANLDKVLSAYNKHRDKPIREQAENIIHLFTLTNLGAPAAFKYFDTTIDRKRYTSTKEVLDATLIHQSITGLYETRIDLSQLGGDGGEAAAKGGGPAPGGTLNIEDEYRLHETSKGPDVPLGSTWLSDFPQAWAETGGMGLAFRQAPLIISLKATSTPVSIKQYPMSQEARLGIKPHIQRLLDQGILVPCQSPWNTPLLPVKKPGTNDYRPVQDLREVNKRVEDIHPTVPNPYNLLSGLPPSHQWYTVLDLKDAFFCLRLHPTSQSLFAFEWKDPEMGISGQLTWTRLPQGFKNSPTLFDEALHRDLADFRIQHPDLILLQYVDDLLLAATSELDCQQGTRALLQTLGDLGYRASAKKAQICQKQVKYLGYLLKEGQRWLTEARKETVMGQPTPKTPRQLREFLGTAGLCRLWIPGFAEMAAPLYPLTKTGTLFKWGPDQQKAYQEIKQALLTAPALGLPDLTKPFELFVDEKQGYAKGVLTQKLGPWRRPVAYLSKKLDPVAAGWPPCLRMVAAIAVLTKDVGKLTMGQPLVILAPHAVEALVKQPPDRWLSNARMTHYQALLLDTDRVQFGPIVALNPATLLPLPEEGLQHDCLDILAEAHGTRPDLTDQPLPDADHTWYTDGSSFLQEGQRRAGAAVTTETEVIWAKALPAGTSAQRAELIALTQALKMAAGKKLNVYTDSRYAFATAHIHGEIYRRRGLLTSEGKEIKNKDEILALLKALFLPKRLSIIHCPGHQKGNHAEARGNRMADQAAREVATRETPETSTLLAGKRTADGSEFEKRTADGSEFESPKKKAKVE

SEQ ID NO: 2419 - protein, 2094 aa, synthetic construct
MPAAKRVKLDGGDKKYSIGLDIGTNSVGWAVITDEYKVPSKKFKVLGNTDRHSIKKNLIGALLFDSGETAEATRLKRTARRRYTRRKNRICYLQEIFSNEMAKVDDSFFHRLEESFLVEEDKKHERHPIFGNIVDEVAYHEKYPTIYHLRKKLVDSTDKADLRLIYLALAHMIKFRGHFLIEGDLNPDNSDVDKLFIQLVQTYNQLFEENPINASGVDAKAILSARLSKSRRLENLIAQLPGEKKNGLFGNLIALSLGLTPNFKSNFDLAEDAKLQLSKDTYDDDLDNLLAQIGDQYADLFLAAKNLSDAILLSDILRVNTEITKAPLSASMIKRYDEHHQDLTLLKALVRQQLPEKYKEIFFDQSKNGYAGYIDGGASQEEFYKFIKPILEKMDGTEELLVKLNREDLLRKQRTFDNGSIPHQIHLGELHAILRRQEDFYPFLKDNREKIEKILTFRIPYYVGPLARGNSRFAWMTRKSEETITPWNFEEVVDKGASAQSFIERMTNFDKNLPNEKVLPKHSLLYEYFTVYNELTKVKYVTEGMRKPAFLSGEQKKAIVDLLFKTNRKVTVKQLKEDYFKKIECFDSVEISGVEDRFNASLGTYHDLLKIIKDKDFLDNEENEDILEDIVLTLTLFEDREMIEERLKTYAHLFDDKVMKQLKRRRYTGWGRLSRKLINGIRDKQSGKTILDFLKSDGFANRNFMQLIHDDSLTFKEDIQKAQVSGQGDSLHEHIANLAGSPAIKKGILQTVKVVDELVKVMGRHKPENIVIEMARENQTTQKGQKNSRERMKRIEEGIKELGSQILKEHPVENTQLQNEKLYLYYLQNGRDMYVDQELDINRLSDYDVDHIVPQSFLKDDSIDNKVLTRSDKARGKSDNVPSEEVVKKMKNYWRQLLNAKLITQRKFDNLTKAERGGLSELDKAGFIKRQLVETRQITKHVAQILDSRMNTKYDENDKLIREVKVITLKSKLVSDFRKDFQFYKVREINNYHHAHDAYLNAVVGTALIKKYPKLESEFVYGDYKVYDVRKMIAKSEQEIGKATAKYFFYSNIMNFFKTEITLANGEIRKRPLIETNGETGEIVWDKGRDFATVRKVLSMPQVNIVKKTEVQTGGFSKESILPKRNSDKLIARKKDWDPKKYGGFDSPTVAYSVLVVAKVEKGKSKKLKSVKELLGITIMERSSFEKNPIDFLEAKGYKEVKKDLIIKLPKYSLFELENGRKRMLASAGELQKGNELALPSKYVNFLYLASHYEKLKGSPEDNEQKQLFVEQHKHYLDEIIEQISEFSKRVILADANLDKVLSAYNKHRDKPIREQAENIIHLFTLTNLGAPAAFKYFDTTIDRKRYTSTKEVLDATLIHQSITGLYETRIDLSQLGGDGGGSSGGSGGGGGTLNIEDEYRLHETSKGPDVPLGSTWLSDFPQAWAETGGMGLAFRQAPLIISLKATSTPVSIKQYPMSQEARLGIKPHIQRLLDQGILVPCQSPWNTPLLPVKKPGTNDYRPVQDLREVNKRVEDIHPTVPNPYNLLSGLPPSHQWYTVLDLKDAFFCLRLHPTSQSLFAFEWKDPEMGISGQLTWTRLPQGFKNSPTLFDEALHRDLADFRIQHPDLILLQYVDDLLLAATSELDCQQGTRALLQTLGDLGYRASAKKAQICQKQVKYLGYLLKEGQRWLTEARKETVMGQPTPKTPRQLREFLGTAGLCRLWIPGFAEMAAPLYPLTKTGTLFKWGPDQQKAYQEIKQALLTAPALGLPDLTKPFELFVDEKQGYAKGVLTQKLGPWRRPVAYLSKKLDPVAAGWPPCLRMVAAIAVLTKDVGKLTMGQPLVILAPHAVEALVKQPPDRWLSNARMTHYQALLLDTDRVQFGPIVALNPATLLPLPEEGLQHDCLDILAEAHGTRPDLTDQPLPDADHTWYTDGSSFLQEGQRRAGAAVTTETEVIWAKALPAGTSAQRAELIALTQALKMAAGKKLNVYTDSRYAFATAHIHGEIYRRRGLLTSEGKEIKNKDEILALLKALFLPKRLSIIHCPGHQKGNHAEARGNRMADQAAREVATRETPETSTLLAGKRTADGSEFEKRTADGSEFESPKKKAKVE

SEQ ID NO: 2420 - protein, 2096 aa, synthetic construct
MPAAKRVKLDGGDKKYSIGLDIGTNSVGWAVITDEYKVPSKKFKVLGNTDRHSIKKNLIGALLFDSGETAEATRLKRTARRRYTRRKNRICYLQEIFSNEMAKVDDSFFHRLEESFLVEEDKKHERHPIFGNIVDEVAYHEKYPTIYHLRKKLVDSTDKADLRLIYLALAHMIKFRGHFLIEGDLNPDNSDVDKLFIQLVQTYNQLFEENPINASGVDAKAILSARLSKSRRLENLIAQLPGEKKNGLFGNLIALSLGLTPNFKSNFDLAEDAKLQLSKDTYDDDLDNLLAQIGDQYADLFLAAKNLSDAILLSDILRVNTEITKAPLSASMIKRYDEHHQDLTLLKALVRQQLPEKYKEIFFDQSKNGYAGYIDGGASQEEFYKFIKPILEKMDGTEELLVKLNREDLLRKQRTFDNGSIPHQIHLGELHAILRRQEDFYPFLKDNREKIEKILTFRIPYYVGPLARGNSRFAWMTRKSEETITPWNFEEVVDKGASAQSFIERMTNFDKNLPNEKVLPKHSLLYEYFTVYNELTKVKYVTEGMRKPAFLSGEQKKAIVDLLFKTNRKVTVKQLKEDYFKKIECFDSVEISGVEDRFNASLGTYHDLLKIIKDKDFLDNEENEDILEDIVLTLTLFEDREMIEERLKTYAHLFDDKVMKQLKRRRYTGWGRLSRKLINGIRDKQSGKTILDFLKSDGFANRNFMQLIHDDSLTFKEDIQKAQVSGQGDSLHEHIANLAGSPAIKKGILQTVKVVDELVKVMGRHKPENIVIEMARENQTTQKGQKNSRERMKRIEEGIKELGSQILKEHPVENTQLQNEKLYLYYLQNGRDMYVDQELDINRLSDYDVDHIVPQSFLKDDSIDNKVLTRSDKARGKSDNVPSEEVVKKMKNYWRQLLNAKLITQRKFDNLTKAERGGLSELDKAGFIKRQLVETRQITKHVAQILDSRMNTKYDENDKLIREVKVITLKSKLVSDFRKDFQFYKVREINNYHHAHDAYLNAVVGTALIKKYPKLESEFVYGDYKVYDVRKMIAKSEQEIGKATAKYFFYSNIMNFFKTEITLANGEIRKRPLIETNGETGEIVWDKGRDFATVRKVLSMPQVNIVKKTEVQTGGFSKESILPKRNSDKLIARKKDWDPKKYGGFDSPTVAYSVLVVAKVEKGKSKKLKSVKELLGITIMERSSFEKNPIDFLEAKGYKEVKKDLIIKLPKYSLFELENGRKRMLASAGELQKGNELALPSKYVNFLYLASHYEKLKGSPEDNEQKQLFVEQHKHYLDEIIEQISEFSKRVILADANLDKVLSAYNKHRDKPIREQAENIIHLFTLTNLGAPAAFKYFDTTIDRKRYTSTKEVLDATLIHQSITGLYETRIDLSQLGGDGGPAPEAAAKGGGGGTLNIEDEYRLHETSKGPDVPLGSTWLSDFPQAWAETGGMGLAFRQAPLIISLKATSTPVSIKQYPMSQEARLGIKPHIQRLLDQGILVPCQSPWNTPLLPVKKPGTNDYRPVQDLREVNKRVEDIHPTVPNPYNLLSGLPPSHQWYTVLDLKDAFFCLRLHPTSQSLFAFEWKDPEMGISGQLTWTRLPQGFKNSPTLFDEALHRDLADFRIQHPDLILLQYVDDLLLAATSELDCQQGTRALLQTLGDLGYRASAKKAQICQKQVKYLGYLLKEGQRWLTEARKETVMGQPTPKTPRQLREFLGTAGLCRLWIPGFAEMAAPLYPLTKTGTLFKWGPDQQKAYQEIKQALLTAPALGLPDLTKPFELFVDEKQGYAKGVLTQKLGPWRRPVAYLSKKLDPVAAGWPPCLRMVAAIAVLTKDVGKLTMGQPLVILAPHAVEALVKQPPDRWLSNARMTHYQALLLDTDRVQFGPIVALNPATLLPLPEEGLQHDCLDILAEAHGTRPDLTDQPLPDADHTWYTDGSSFLQEGQRRAGAAVTTETEVIWAKALPAGTSAQRAELIALTQALKMAAGKKLNVYTDSRYAFATAHIHGEIYRRRGLLTSEGKEIKNKDEILALLKALFLPKRLSIIHCPGHQKGNHAEARGNRMADQAAREVATRETPETSTLLAGKRTADGSEFEKRTADGSEFESPKKKAKVE

SEQ ID NO: 2421 - protein, 2008 aa, synthetic construct
MPAAKRVKLDGGDKKYSIGLDIGTNSVGWAVITDEYKVPSKKFKVLGNTDRHSIKKNLIGALLFDSGETAEATRLKRTARRRYTRRKNRICYLQEIFSNEMAKVDDSFFHRLEESFLVEEDKKHERHPIFGNIVDEVAYHEKYPTIYHLRKKLVDSTDKADLRLIYLALAHMIKFRGHFLIEGDLNPDNSDVDKLFIQLVQTYNQLFEENPINASGVDAKAILSARLSKSRRLENLIAQLPGEKKNGLFGNLIALSLGLTPNFKSNFDLAEDAKLQLSKDTYDDDLDNLLAQIGDQYADLFLAAKNLSDAILLSDILRVNTEITKAPLSASMIKRYDEHHQDLTLLKALVRQQLPEKYKEIFFDQSKNGYAGYIDGGASQEEFYKFIKPILEKMDGTEELLVKLNREDLLRKQRTFDNGSIPHQIHLGELHAILRRQEDFYPFLKDNREKIEKILTFRIPYYVGPLARGNSRFAWMTRKSEETITPWNFEEVVDKGASAQSFIERMTNFDKNLPNEKVLPKHSLLYEYFTVYNELTKVKYVTEGMRKPAFLSGEQKKAIVDLLFKTNRKVTVKQLKEDYFKKIECFDSVEISGVEDRFNASLGTYHDLLKIIKDKDFLDNEENEDILEDIVLTLTLFEDREMIEERLKTYAHLFDDKVMKQLKRRRYTGWGRLSRKLINGIRDKQSGKTILDFLKSDGFANRNFMQLIHDDSLTFKEDIQKAQVSGQGDSLHEHIANLAGSPAIKKGILQTVKVVDELVKVMGRHKPENIVIEMARENQTTQKGQKNSRERMKRIEEGIKELGSQILKEHPVENTQLQNEKLYLYYLQNGRDMYVDQELDINRLSDYDVDHIVPQSFLKDDSIDNKVLTRSDKARGKSDNVPSEEVVKKMKNYWRQLLNAKLITQRKFDNLTKAERGGLSELDKAGFIKRQLVETRQITKHVAQILDSRMNTKYDENDKLIREVKVITLKSKLVSDFRKDFQFYKVREINNYHHAHDAYLNAVVGTALIKKYPKLESEFVYGDYKVYDVRKMIAKSEQEIGKATAKYFFYSNIMNFFKTEITLANGEIRKRPLIETNGETGEIVWDKGRDFATVRKVLSMPQVNIVKKTEVQTGGFSKESILPKRNSDKLIARKKDWDPKKYGGFDSPTVAYSVLVVAKVEKGKSKKLKSVKELLGITIMERSSFEKNPIDFLEAKGYKEVKKDLIIKLPKYSLFELENGRKRMLASAGELQKGNELALPSKYVNFLYLASHYEKLKGSPEDNEQKQLFVEQHKHYLDEIIEQISEFSKRVILADANLDKVLSAYNKHRDKPIREQAENIIHLFTLTNLGAPAAFKYFDTTIDRKRYTSTKEVLDATLIHQSITGLYETRIDLSQLGGDGGGGSGGSGGSGGSGGSGGSGGGVLDAPPSHIGLEHLPPPPEVPQFPLNLERLQALQDLVHRSLEAGYISPWDGPGNNPVFPVRKPNGAWRFVHDLRVTNALTKPIPALSPGPPDLTAIPTHLPHIICLDLKDAFFQIPVEDRFRSYFAFTLPTPGGLQPHRRFAWRVLPQGFINSPALFERALQEPLRQVSAAFSQSLLVSYMDDILYVSPTEEQRLQCYQTMAAHLRDLGFQVASEKTRQTPSPVPFLGQMVHERMVTYQSLPTLQISSPISLHQLQTVLGDLQWVSRGTPTTRRPLQLLYSSLKGIDDPRAIIHLSPEQQQGIAELRQALSHNARSRYNEQEPLLAYVHLTRAGSTLVLFQKGAQFPLAYFQTPLTDNQASPWGLLLLLGCQYLQAQALSSYAKTILKYYHNLPKTSLDNWIQSSEDPRVQELLQLWPQISSQGIQPPGPWKTLVTRAEVFLTPQFSPEPIPAALCLFSDGAARRGAYCLWKDHLLDFQAVPAPESAQKGELAGLLAGLAAAPPEPLNIWVDSKYLYSLLRTLVLGAWLQPDPVPSYALLYKSLLRHPAIFVGHVRSHSSASHPIASLNNYVDQLAGKRTADGSEFEKRTADGSEFESPKKKAKVE

SEQ ID NO: 2422 - protein, 2093 aa, synthetic construct
MPAAKRVKLDGGDKKYSIGLDIGTNSVGWAVITDEYKVPSKKFKVLGNTDRHSIKKNLIGALLFDSGETAEATRLKRTARRRYTRRKNRICYLQEIFSNEMAKVDDSFFHRLEESFLVEEDKKHERHPIFGNIVDEVAYHEKYPTIYHLRKKLVDSTDKADLRLIYLALAHMIKFRGHFLIEGDLNPDNSDVDKLFIQLVQTYNQLFEENPINASGVDAKAILSARLSKSRRLENLIAQLPGEKKNGLFGNLIALSLGLTPNFKSNFDLAEDAKLQLSKDTYDDDLDNLLAQIGDQYADLFLAAKNLSDAILLSDILRVNTEITKAPLSASMIKRYDEHHQDLTLLKALVRQQLPEKYKEIFFDQSKNGYAGYIDGGASQEEFYKFIKPILEKMDGTEELLVKLNREDLLRKQRTFDNGSIPHQIHLGELHAILRRQEDFYPFLKDNREKIEKILTFRIPYYVGPLARGNSRFAWMTRKSEETITPWNFEEVVDKGASAQSFIERMTNFDKNLPNEKVLPKHSLLYEYFTVYNELTKVKYVTEGMRKPAFLSGEQKKAIVDLLFKTNRKVTVKQLKEDYFKKIECFDSVEISGVEDRFNASLGTYHDLLKIIKDKDFLDNEENEDILEDIVLTLTLFEDREMIEERLKTYAHLFDDKVMKQLKRRRYTGWGRLSRKLINGIRDKQSGKTILDFLKSDGFANRNFMQLIHDDSLTFKEDIQKAQVSGQGDSLHEHIANLAGSPAIKKGILQTVKVVDELVKVMGRHKPENIVIEMARENQTTQKGQKNSRERMKRIEEGIKELGSQILKEHPVENTQLQNEKLYLYYLQNGRDMYVDQELDINRLSDYDVDHIVPQSFLKDDSIDNKVLTRSDKARGKSDNVPSEEVVKKMKNYWRQLLNAKLITQRKFDNLTKAERGGLSELDKAGFIKRQLVETRQITKHVAQILDSRMNTKYDENDKLIREVKVITLKSKLVSDFRKDFQFYKVREINNYHHAHDAYLNAVVGTALIKKYPKLESEFVYGDYKVYDVRKMIAKSEQEIGKATAKYFFYSNIMNFFKTEITLANGEIRKRPLIETNGETGEIVWDKGRDFATVRKVLSMPQVNIVKKTEVQTGGFSKESILPKRNSDKLIARKKDWDPKKYGGFDSPTVAYSVLVVAKVEKGKSKKLKSVKELLGITIMERSSFEKNPIDFLEAKGYKEVKKDLIIKLPKYSLFELENGRKRMLASAGELQKGNELALPSKYVNFLYLASHYEKLKGSPEDNEQKQLFVEQHKHYLDEIIEQISEFSKRVILADANLDKVLSAYNKHRDKPIREQAENIIHLFTLTNLGAPAAFKYFDTTIDRKRYTSTKEVLDATLIHQSITGLYETRIDLSQLGGDGGEAAAKPAPGGTLNIEDEYRLHETSKGPDVPLGSTWLSDFPQAWAETGGMGLAFRQAPLIISLKATSTPVSIKQYPMSQEARLGIKPHIQRLLDQGILVPCQSPWNTPLLPVKKPGTNDYRPVQDLREVNKRVEDIHPTVPNPYNLLSGLPPSHQWYTVLDLKDAFFCLRLHPTSQSLFAFEWKDPEMGISGQLTWTRLPQGFKNSPTLFNEALHRDLADFRIQHPDLILLQYVDDLLLAATSELDCQQGTRALLQTLGDLGYRASAKKAQICQKQVKYLGYLLKEGQRWLTEARKETVMGQPTPKTPRQLREFLGTAGLCRLWIPGFAEMAAPLYPLTKPGTLFKWGPDQQKAYQEIKQALLTAPALGLPDLTKPFELFVDEKQGYAKGVLTQKLGPWRRPVAYLSKKLDPVAAGWPPCLRMVAAIAVLTKDVGKLTMGQPLVILAPHAVEALVKQPPDRWLSNARMTHYQALLLDTDRVQFGPIVALNPATLLPLPEEGLQHDCLDILAEAHGTRPDLTDQPLPDADHTWYTDGSSFLQEGQRRAGAAVTTETEVIWAKALPAGTSAQRAELIALTQALKMAAGKKLNVYTDSRYAFATAHIHGEIYRRRGWLTSEGKEIKNKDEILALLKALFLPKRLSIIHCPGHQKGNHAEARGNRMADQAAREVATRETPETSTLLAGKRTADGSEFEKRTADGSEFESPKKKAKVE

SEQ ID NO: 2423 - protein, 2096 aa, synthetic construct
MPAAKRVKLDGGDKKYSIGLDIGTNSVGWAVITDEYKVPSKKFKVLGNTDRHSIKKNLIGALLFDSGETAEATRLKRTARRRYTRRKNRICYLQEIFSNEMAKVDDSFFHRLEESFLVEEDKKHERHPIFGNIVDEVAYHEKYPTIYHLRKKLVDSTDKADLRLIYLALAHMIKFRGHFLIEGDLNPDNSDVDKLFIQLVQTYNQLFEENPINASGVDAKAILSARLSKSRRLENLIAQLPGEKKNGLFGNLIALSLGLTPNFKSNFDLAEDAKLQLSKDTYDDDLDNLLAQIGDQYADLFLAAKNLSDAILLSDILRVNTEITKAPLSASMIKRYDEHHQDLTLLKALVRQQLPEKYKEIFFDQSKNGYAGYIDGGASQEEFYKFIKPILEKMDGTEELLVKLNREDLLRKQRTFDNGSIPHQIHLGELHAILRRQEDFYPFLKDNREKIEKILTFRIPYYVGPLARGNSRFAWMTRKSEETITPWNFEEVVDKGASAQSFIERMTNFDKNLPNEKVLPKHSLLYEYFTVYNELTKVKYVTEGMRKPAFLSGEQKKAIVDLLFKTNRKVTVKQLKEDYFKKIECFDSVEISGVEDRFNASLGTYHDLLKIIKDKDFLDNEENEDILEDIVLTLTLFEDREMIEERLKTYAHLFDDKVMKQLKRRRYTGWGRLSRKLINGIRDKQSGKTILDFLKSDGFANRNFMQLIHDDSLTFKEDIQKAQVSGQGDSLHEHIANLAGSPAIKKGILQTVKVVDELVKVMGRHKPENIVIEMARENQTTQKGQKNSRERMKRIEEGIKELGSQILKEHPVENTQLQNEKLYLYYLQNGRDMYVDQELDINRLSDYDVDHIVPQSFLKDDSIDNKVLTRSDKARGKSDNVPSEEVVKKMKNYWRQLLNAKLITQRKFDNLTKAERGGLSELDKAGFIKRQLVETRQITKHVAQILDSRMNTKYDENDKLIREVKVITLKSKLVSDFRKDFQFYKVREINNYHHAHDAYLNAVVGTALIKKYPKLESEFVYGDYKVYDVRKMIAKSEQEIGKATAKYFFYSNIMNFFKTEITLANGEIRKRPLIETNGETGEIVWDKGRDFATVRKVLSMPQVNIVKKTEVQTGGFSKESILPKRNSDKLIARKKDWDPKKYGGFDSPTVAYSVLVVAKVEKGKSKKLKSVKELLGITIMERSSFEKNPIDFLEAKGYKEVKKDLIIKLPKYSLFELENGRKRMLASAGELQKGNELALPSKYVNFLYLASHYEKLKGSPEDNEQKQLFVEQHKHYLDEIIEQISEFSKRVILADANLDKVLSAYNKHRDKPIREQAENIIHLFTLTNLGAPAAFKYFDTTIDRKRYTSTKEVLDATLIHQSITGLYETRIDLSQLGGDGGPAPAPAPAPAPGGTLNIEDEYRLHETSKGPDVPLGSTWLSDFPQAWAETGGMGLAFRQAPLIISLKATSTPVSIKQYPMSQEARLGIKPHIQRLLDQGILVPCQSPWNTPLLPVKKPGTNDYRPVQDLREVNKRVEDIHPTVPNPYNLLSGLPPSHQWYTVLDLKDAFFCLRLHPTSQSLFAFEWKDPEMGISGQLTWTRLPQGFKNSPTLFNEALHRDLADFRIQHPDLILLQYVDDLLLAATSELDCQQGTRALLQTLGDLGYRASAKKAQICQKQVKYLGYLLKEGQRWLTEARKETVMGQPTPKTPRQLREFLGTAGLCRLWIPGFAEMAAPLYPLTKPGTLFKWGPDQQKAYQEIKQALLTAPALGLPDLTKPFELFVDEKQGYAKGVLTQKLGPWRRPVAYLSKKLDPVAAGWPPCLRMVAAIAVLTKDVGKLTMGQPLVILAPHAVEALVKQPPDRWLSNARMTHYQALLLDTDRVQFGPIVALNPATLLPLPEEGLQHDCLDILAEAHGTRPDLTDQPLPDADHTWYTDGSSFLQEGQRRAGAAVTTETEVIWAKALPAGTSAQRAELIALTQALKMAAGKKLNVYTDSRYAFATAHIHGEIYRRRGWLTSEGKEIKNKDEILALLKALFLPKRLSIIHCPGHQKGNHAEARGNRMADQAAREVATRETPETSTLLAGKRTADGSEFEKRTADGSEFESPKKKAKVE

SEQ ID NO: 2424 - protein, 2089 aa, synthetic construct
MPAAKRVKLDGGDKKYSIGLDIGTNSVGWAVITDEYKVPSKKFKVLGNTDRHSIKKNLIGALLFDSGETAEATRLKRTARRRYTRRKNRICYLQEIFSNEMAKVDDSFFHRLEESFLVEEDKKHERHPIFGNIVDEVAYHEKYPTIYHLRKKLVDSTDKADLRLIYLALAHMIKFRGHFLIEGDLNPDNSDVDKLFIQLVQTYNQLFEENPINASGVDAKAILSARLSKSRRLENLIAQLPGEKKNGLFGNLIALSLGLTPNFKSNFDLAEDAKLQLSKDTYDDDLDNLLAQIGDQYADLFLAAKNLSDAILLSDILRVNTEITKAPLSASMIKRYDEHHQDLTLLKALVRQQLPEKYKEIFFDQSKNGYAGYIDGGASQEEFYKFIKPILEKMDGTEELLVKLNREDLLRKQRTFDNGSIPHQIHLGELHAILRRQEDFYPFLKDNREKIEKILTFRIPYYVGPLARGNSRFAWMTRKSEETITPWNFEEVVDKGASAQSFIERMTNFDKNLPNEKVLPKHSLLYEYFTVYNELTKVKYVTEGMRKPAFLSGEQKKAIVDLLFKTNRKVTVKQLKEDYFKKIECFDSVEISGVEDRFNASLGTYHDLLKIIKDKDFLDNEENEDILEDIVLTLTLFEDREMIEERLKTYAHLFDDKVMKQLKRRRYTGWGRLSRKLINGIRDKQSGKTILDFLKSDGFANRNFMQLIHDDSLTFKEDIQKAQVSGQGDSLHEHIANLAGSPAIKKGILQTVKVVDELVKVMGRHKPENIVIEMARENQTTQKGQKNSRERMKRIEEGIKELGSQILKEHPVENTQLQNEKLYLYYLQNGRDMYVDQELDINRLSDYDVDHIVPQSFLKDDSIDNKVLTRSDKARGKSDNVPSEEVVKKMKNYWRQLLNAKLITQRKFDNLTKAERGGLSELDKAGFIKRQLVETRQITKHVAQILDSRMNTKYDENDKLIREVKVITLKSKLVSDFRKDFQFYKVREINNYHHAHDAYLNAVVGTALIKKYPKLESEFVYGDYKVYDVRKMIAKSEQEIGKATAKYFFYSNIMNFFKTEITLANGEIRKRPLIETNGETGEIVWDKGRDFATVRKVLSMPQVNIVKKTEVQTGGFSKESILPKRNSDKLIARKKDWDPKKYGGFDSPTVAYSVLVVAKVEKGKSKKLKSVKELLGITIMERSSFEKNPIDFLEAKGYKEVKKDLIIKLPKYSLFELENGRKRMLASAGELQKGNELALPSKYVNFLYLASHYEKLKGSPEDNEQKQLFVEQHKHYLDEIIEQISEFSKRVILADANLDKVLSAYNKHRDKPIREQAENIIHLFTLTNLGAPAAFKYFDTTIDRKRYTSTKEVLDATLIHQSITGLYETRIDLSQLGGDGGGGGGGGTLNIEDEYRLHETSKGPDVPLGSTWLSDFPQAWAETGGMGLAFRQAPLIISLKATSTPVSIKQYPMSQEARLGIKPHIQRLLDQGILVPCQSPWNTPLLPVKKPGTNDYRPVQDLREVNKRVEDIHPTVPNPYNLLSGLPPSHQWYTVLDLKDAFFCLRLHPTSQSLFAFEWKDPEMGISGQLTWTRLPQGFKNSPTLFNEALHRDLADFRIQHPDLILLQYVDDLLLAATSELDCQQGTRALLQTLGDLGYRASAKKAQICQKQVKYLGYLLKEGQRWLTEARKETVMGQPTPKTPRQLREFLGTAGLCRLWIPGFAEMAAPLYPLTKPGTLFKWGPDQQKAYQEIKQALLTAPALGLPDLTKPFELFVDEKQGYAKGVLTQKLGPWRRPVAYLSKKLDPVAAGWPPCLRMVAAIAVLTKDVGKLTMGQPLVILAPHAVEALVKQPPDRWLSNARMTHYQALLLDTDRVQFGPIVALNPATLLPLPEEGLQHDCLDILAEAHGTRPDLTDQPLPDADHTWYTDGSSFLQEGQRRAGAAVTTETEVIWAKALPAGTSAQRAELIALTQALKMAAGKKLNVYTDSRYAFATAHIHGEIYRRRGWLTSEGKEIKNKDEILALLKALFLPKRLSIIHCPGHQKGNHAEARGNRMADQAAREVATRETPETSTLLAGKRTADGSEFEKRTADGSEFESPKKKAKVE

SEQ ID NO: 2425 - protein, 2094 aa, synthetic construct
MPAAKRVKLDGGDKKYSIGLDIGTNSVGWAVITDEYKVPSKKFKVLGNTDRHSIKKNLIGALLFDSGETAEATRLKRTARRRYTRRKNRICYLQEIFSNEMAKVDDSFFHRLEESFLVEEDKKHERHPIFGNIVDEVAYHEKYPTIYHLRKKLVDSTDKADLRLIYLALAHMIKFRGHFLIEGDLNPDNSDVDKLFIQLVQTYNQLFEENPINASGVDAKAILSARLSKSRRLENLIAQLPGEKKNGLFGNLIALSLGLTPNFKSNFDLAEDAKLQLSKDTYDDDLDNLLAQIGDQYADLFLAAKNLSDAILLSDILRVNTEITKAPLSASMIKRYDEHHQDLTLLKALVRQQLPEKYKEIFFDQSKNGYAGYIDGGASQEEFYKFIKPILEKMDGTEELLVKLNREDLLRKQRTFDNGSIPHQIHLGELHAILRRQEDFYPFLKDNREKIEKILTFRIPYYVGPLARGNSRFAWMTRKSEETITPWNFEEVVDKGASAQSFIERMTNFDKNLPNEKVLPKHSLLYEYFTVYNELTKVKYVTEGMRKPAFLSGEQKKAIVDLLFKTNRKVTVKQLKEDYFKKIECFDSVEISGVEDRFNASLGTYHDLLKIIKDKDFLDNEENEDILEDIVLTLTLFEDREMIEERLKTYAHLFDDKVMKQLKRRRYTGWGRLSRKLINGIRDKQSGKTILDFLKSDGFANRNFMQLIHDDSLTFKEDIQKAQVSGQGDSLHEHIANLAGSPAIKKGILQTVKVVDELVKVMGRHKPENIVIEMARENQTTQKGQKNSRERMKRIEEGIKELGSQILKEHPVENTQLQNEKLYLYYLQNGRDMYVDQELDINRLSDYDVDHIVPQSFLKDDSIDNKVLTRSDKARGKSDNVPSEEVVKKMKNYWRQLLNAKLITQRKFDNLTKAERGGLSELDKAGFIKRQLVETRQITKHVAQILDSRMNTKYDENDKLIREVKVITLKSKLVSDFRKDFQFYKVREINNYHHAHDAYLNAVVGTALIKKYPKLESEFVYGDYKVYDVRKMIAKSEQEIGKATAKYFFYSNIMNFFKTEITLANGEIRKRPLIETNGETGEIVWDKGRDFATVRKVLSMPQVNIVKKTEVQTGGFSKESILPKRNSDKLIARKKDWDPKKYGGFDSPTVAYSVLVVAKVEKGKSKKLKSVKELLGITIMERSSFEKNPIDFLEAKGYKEVKKDLIIKLPKYSLFELENGRKRMLASAGELQKGNELALPSKYVNFLYLASHYEKLKGSPEDNEQKQLFVEQHKHYLDEIIEQISEFSKRVILADANLDKVLSAYNKHRDKPIREQAENIIHLFTLTNLGAPAAFKYFDTTIDRKRYTSTKEVLDATLIHQSITGLYETRIDLSQLGGDGGGSSGGGGGSGGTLNIEDEYRLHETSKGPDVPLGSTWLSDFPQAWAETGGMGLAFRQAPLIISLKATSTPVSIKQYPMSQEARLGIKPHIQRLLDQGILVPCQSPWNTPLLPVKKPGTNDYRPVQDLREVNKRVEDIHPTVPNPYNLLSGLPPSHQWYTVLDLKDAFFCLRLHPTSQSLFAFEWKDPEMGISGQLTWTRLPQGFKNSPTLFNEALHRDLADFRIQHPDLILLQYVDDLLLAATSELDCQQGTRALLQTLGDLGYRASAKKAQICQKQVKYLGYLLKEGQRWLTEARKETVMGQPTPKTPRQLREFLGTAGLCRLWIPGFAEMAAPLYPLTKPGTLFKWGPDQQKAYQEIKQALLTAPALGLPDLTKPFELFVDEKQGYAKGVLTQKLGPWRRPVAYLSKKLDPVAAGWPPCLRMVAAIAVLTKDVGKLTMGQPLVILAPHAVEALVKQPPDRWLSNARMTHYQALLLDTDRVQFGPIVALNPATLLPLPEEGLQHDCLDILAEAHGTRPDLTDQPLPDADHTWYTDGSSFLQEGQRRAGAAVTTETEVIWAKALPAGTSAQRAELIALTQALKMAAGKKLNVYTDSRYAFATAHIHGEIYRRRGWLTSEGKEIKNKDEILALLKALFLPKRLSIIHCPGHQKGNHAEARGNRMADQAAREVATRETPETSTLLAGKRTADGSEFEKRTADGSEFESPKKKAKVE

SEQ ID NO: 2426 - protein, 2093 aa, synthetic construct
MPAAKRVKLDGGDKKYSIGLDIGTNSVGWAVITDEYKVPSKKFKVLGNTDRHSIKKNLIGALLFDSGETAEATRLKRTARRRYTRRKNRICYLQEIFSNEMAKVDDSFFHRLEESFLVEEDKKHERHPIFGNIVDEVAYHEKYPTIYHLRKKLVDSTDKADLRLIYLALAHMIKFRGHFLIEGDLNPDNSDVDKLFIQLVQTYNQLFEENPINASGVDAKAILSARLSKSRRLENLIAQLPGEKKNGLFGNLIALSLGLTPNFKSNFDLAEDAKLQLSKDTYDDDLDNLLAQIGDQYADLFLAAKNLSDAILLSDILRVNTEITKAPLSASMIKRYDEHHQDLTLLKALVRQQLPEKYKEIFFDQSKNGYAGYIDGGASQEEFYKFIKPILEKMDGTEELLVKLNREDLLRKQRTFDNGSIPHQIHLGELHAILRRQEDFYPFLKDNREKIEKILTFRIPYYVGPLARGNSRFAWMTRKSEETITPWNFEEVVDKGASAQSFIERMTNFDKNLPNEKVLPKHSLLYEYFTVYNELTKVKYVTEGMRKPAFLSGEQKKAIVDLLFKTNRKVTVKQLKEDYFKKIECFDSVEISGVEDRFNASLGTYHDLLKIIKDKDFLDNEENEDILEDIVLTLTLFEDREMIEERLKTYAHLFDDKVMKQLKRRRYTGWGRLSRKLINGIRDKQSGKTILDFLKSDGFANRNFMQLIHDDSLTFKEDIQKAQVSGQGDSLHEHIANLAGSPAIKKGILQTVKVVDELVKVMGRHKPENIVIEMARENQTTQKGQKNSRERMKRIEEGIKELGSQILKEHPVENTQLQNEKLYLYYLQNGRDMYVDQELDINRLSDYDVDHIVPQSFLKDDSIDNKVLTRSDKARGKSDNVPSEEVVKKMKNYWRQLLNAKLITQRKFDNLTKAERGGLSELDKAGFIKRQLVETRQITKHVAQILDSRMNTKYDENDKLIREVKVITLKSKLVSDFRKDFQFYKVREINNYHHAHDAYLNAVVGTALIKKYPKLESEFVYGDYKVYDVRKMIAKSEQEIGKATAKYFFYSNIMNFFKTEITLANGEIRKRPLIETNGETGEIVWDKGRDFATVRKVLSMPQVNIVKKTEVQTGGFSKESILPKRNSDKLIARKKDWDPKKYGGFDSPTVAYSVLVVAKVEKGKSKKLKSVKELLGITIMERSSFEKNPIDFLEAKGYKEVKKDLIIKLPKYSLFELENGRKRMLASAGELQKGNELALPSKYVNFLYLASHYEKLKGSPEDNEQKQLFVEQHKHYLDEIIEQISEFSKRVILADANLDKVLSAYNKHRDKPIREQAENIIHLFTLTNLGAPAAFKYFDTTIDRKRYTSTKEVLDATLIHQSITGLYETRIDLSQLGGDGGEAAAKGGSGGTLNIEDEYRLHETSKGPDVPLGSTWLSDFPQAWAETGGMGLAFRQAPLIISLKATSTPVSIKQYPMSQEARLGIKPHIQRLLDQGILVPCQSPWNTPLLPVKKPGTNDYRPVQDLREVNKRVEDIHPTVPNPYNLLSGLPPSHQWYTVLDLKDAFFCLRLHPTSQSLFAFEWKDPEMGISGQLTWTRLPQGFKNSPTLFNEALHRDLADFRIQHPDLILLQYVDDLLLAATSELDCQQGTRALLQTLGDLGYRASAKKAQICQKQVKYLGYLLKEGQRWLTEARKETVMGQPTPKTPRQLREFLGTAGLCRLWIPGFAEMAAPLYPLTKPGTLFKWGPDQQKAYQEIKQALLTAPALGLPDLTKPFELFVDEKQGYAKGVLTQKLGPWRRPVAYLSKKLDPVAAGWPPCLRMVAAIAVLTKDVGKLTMGQPLVILAPHAVEALVKQPPDRWLSNARMTHYQALLLDTDRVQFGPIVALNPATLLPLPEEGLQHDCLDILAEAHGTRPDLTDQPLPDADHTWYTDGSSFLQEGQRRAGAAVTTETEVIWAKALPAGTSAQRAELIALTQALKMAAGKKLNVYTDSRYAFATAHIHGEIYRRRGWLTSEGKEIKNKDEILALLKALFLPKRLSIIHCPGHQKGNHAEARGNRMADQAAREVATRETPETSTLLAGKRTADGSEFEKRTADGSEFESPKKKAKVE

SEQ ID NO: 2427 - protein, 2088 aa, synthetic construct
MPAAKRVKLDGGDKKYSIGLDIGTNSVGWAVITDEYKVPSKKFKVLGNTDRHSIKKNLIGALLFDSGETAEATRLKRTARRRYTRRKNRICYLQEIFSNEMAKVDDSFFHRLEESFLVEEDKKHERHPIFGNIVDEVAYHEKYPTIYHLRKKLVDSTDKADLRLIYLALAHMIKFRGHFLIEGDLNPDNSDVDKLFIQLVQTYNQLFEENPINASGVDAKAILSARLSKSRRLENLIAQLPGEKKNGLFGNLIALSLGLTPNFKSNFDLAEDAKLQLSKDTYDDDLDNLLAQIGDQYADLFLAAKNLSDAILLSDILRVNTEITKAPLSASMIKRYDEHHQDLTLLKALVRQQLPEKYKEIFFDQSKNGYAGYIDGGASQEEFYKFIKPILEKMDGTEELLVKLNREDLLRKQRTFDNGSIPHQIHLGELHAILRRQEDFYPFLKDNREKIEKILTFRIPYYVGPLARGNSRFAWMTRKSEETITPWNFEEVVDKGASAQSFIERMTNFDKNLPNEKVLPKHSLLYEYFTVYNELTKVKYVTEGMRKPAFLSGEQKKAIVDLLFKTNRKVTVKQLKEDYFKKIECFDSVEISGVEDRFNASLGTYHDLLKIIKDKDFLDNEENEDILEDIVLTLTLFEDREMIEERLKTYAHLFDDKVMKQLKRRRYTGWGRLSRKLINGIRDKQSGKTILDFLKSDGFANRNFMQLIHDDSLTFKEDIQKAQVSGQGDSLHEHIANLAGSPAIKKGILQTVKVVDELVKVMGRHKPENIVIEMARENQTTQKGQKNSRERMKRIEEGIKELGSQILKEHPVENTQLQNEKLYLYYLQNGRDMYVDQELDINRLSDYDVDHIVPQSFLKDDSIDNKVLTRSDKARGKSDNVPSEEVVKKMKNYWRQLLNAKLITQRKFDNLTKAERGGLSELDKAGFIKRQLVETRQITKHVAQILDSRMNTKYDENDKLIREVKVITLKSKLVSDFRKDFQFYKVREINNYHHAHDAYLNAVVGTALIKKYPKLESEFVYGDYKVYDVRKMIAKSEQEIGKATAKYFFYSNIMNFFKTEITLANGEIRKRPLIETNGETGEIVWDKGRDFATVRKVLSMPQVNIVKKTEVQTGGFSKESILPKRNSDKLIARKKDWDPKKYGGFDSPTVAYSVLVVAKVEKGKSKKLKSVKELLGITIMERSSFEKNPIDFLEAKGYKEVKKDLIIKLPKYSLFELENGRKRMLASAGELQKGNELALPSKYVNFLYLASHYEKLKGSPEDNEQKQLFVEQHKHYLDEIIEQISEFSKRVILADANLDKVLSAYNKHRDKPIREQAENIIHLFTLTNLGAPAAFKYFDTTIDRKRYTSTKEVLDATLIHQSITGLYETRIDLSQLGGDGGPAPGGTLNIEDEYRLHETSKGPDVPLGSTWLSDFPQAWAETGGMGLAFRQAPLIISLKATSTPVSIKQYPMSQEARLGIKPHIQRLLDQGILVPCQSPWNTPLLPVKKPGTNDYRPVQDLREVNKRVEDIHPTVPNPYNLLSGLPPSHQWYTVLDLKDAFFCLRLHPTSQSLFAFEWKDPEMGISGQLTWTRLPQGFKNSPTLFNEALHRDLADFRIQHPDLILLQYVDDLLLAATSELDCQQGTRALLQTLGDLGYRASAKKAQICQKQVKYLGYLLKEGQRWLTEARKETVMGQPTPKTPRQLREFLGTAGLCRLWIPGFAEMAAPLYPLTKPGTLFKWGPDQQKAYQEIKQALLTAPALGLPDLTKPFELFVDEKQGYAKGVLTQKLGPWRRPVAYLSKKLDPVAAGWPPCLRMVAAIAVLTKDVGKLTMGQPLVILAPHAVEALVKQPPDRWLSNARMTHYQALLLDTDRVQFGPIVALNPATLLPLPEEGLQHDCLDILAEAHGTRPDLTDQPLPDADHTWYTDGSSFLQEGQRRAGAAVTTETEVIWAKALPAGTSAQRAELIALTQALKMAAGKKLNVYTDSRYAFATAHIHGEIYRRRGWLTSEGKEIKNKDEILALLKALFLPKRLSIIHCPGHQKGNHAEARGNRMADQAAREVATRETPETSTLLAGKRTADGSEFEKRTADGSEFESPKKKAKVE

SEQ ID NO: 2428 - protein, 2096 aa, synthetic construct
MPAAKRVKLDGGDKKYSIGLDIGTNSVGWAVITDEYKVPSKKFKVLGNTDRHSIKKNLIGALLFDSGETAEATRLKRTARRRYTRRKNRICYLQEIFSNEMAKVDDSFFHRLEESFLVEEDKKHERHPIFGNIVDEVAYHEKYPTIYHLRKKLVDSTDKADLRLIYLALAHMIKFRGHFLIEGDLNPDNSDVDKLFIQLVQTYNQLFEENPINASGVDAKAILSARLSKSRRLENLIAQLPGEKKNGLFGNLIALSLGLTPNFKSNFDLAEDAKLQLSKDTYDDDLDNLLAQIGDQYADLFLAAKNLSDAILLSDILRVNTEITKAPLSASMIKRYDEHHQDLTLLKALVRQQLPEKYKEIFFDQSKNGYAGYIDGGASQEEFYKFIKPILEKMDGTEELLVKLNREDLLRKQRTFDNGSIPHQIHLGELHAILRRQEDFYPFLKDNREKIEKILTFRIPYYVGPLARGNSRFAWMTRKSEETITPWNFEEVVDKGASAQSFIERMTNFDKNLPNEKVLPKHSLLYEYFTVYNELTKVKYVTEGMRKPAFLSGEQKKAIVDLLFKTNRKVTVKQLKEDYFKKIECFDSVEISGVEDRFNASLGTYHDLLKIIKDKDFLDNEENEDILEDIVLTLTLFEDREMIEERLKTYAHLFDDKVMKQLKRRRYTGWGRLSRKLINGIRDKQSGKTILDFLKSDGFANRNFMQLIHDDSLTFKEDIQKAQVSGQGDSLHEHIANLAGSPAIKKGILQTVKVVDELVKVMGRHKPENIVIEMARENQTTQKGQKNSRERMKRIEEGIKELGSQILKEHPVENTQLQNEKLYLYYLQNGRDMYVDQELDINRLSDYDVDHIVPQSFLKDDSIDNKVLTRSDKARGKSDNVPSEEVVKKMKNYWRQLLNAKLITQRKFDNLTKAERGGLSELDKAGFIKRQLVETRQITKHVAQILDSRMNTKYDENDKLIREVKVITLKSKLVSDFRKDFQFYKVREINNYHHAHDAYLNAVVGTALIKKYPKLESEFVYGDYKVYDVRKMIAKSEQEIGKATAKYFFYSNIMNFFKTEITLANGEIRKRPLIETNGETGEIVWDKGRDFATVRKVLSMPQVNIVKKTEVQTGGFSKESILPKRNSDKLIARKKDWDPKKYGGFDSPTVAYSVLVVAKVEKGKSKKLKSVKELLGITIMERSSFEKNPIDFLEAKGYKEVKKDLIIKLPKYSLFELENGRKRMLASAGELQKGNELALPSKYVNFLYLASHYEKLKGSPEDNEQKQLFVEQHKHYLDEIIEQISEFSKRVILADANLDKVLSAYNKHRDKPIREQAENIIHLFTLTNLGAPAAFKYFDTTIDRKRYTSTKEVLDATLIHQSITGLYETRIDLSQLGGDGGPAPGSSEAAAKGGTLNIEDEYRLHETSKGPDVPLGSTWLSDFPQAWAETGGMGLAFRQAPLIISLKATSTPVSIKQYPMSQEARLGIKPHIQRLLDQGILVPCQSPWNTPLLPVKKPGTNDYRPVQDLREVNKRVEDIHPTVPNPYNLLSGLPPSHQWYTVLDLKDAFFCLRLHPTSQSLFAFEWKDPEMGISGQLTWTRLPQGFKNSPTLFNEALHRDLADFRIQHPDLILLQYVDDLLLAATSELDCQQGTRALLQTLGDLGYRASAKKAQICQKQVKYLGYLLKEGQRWLTEARKETVMGQPTPKTPRQLREFLGTAGLCRLWIPGFAEMAAPLYPLTKPGTLFKWGPDQQKAYQEIKQALLTAPALGLPDLTKPFELFVDEKQGYAKGVLTQKLGPWRRPVAYLSKKLDPVAAGWPPCLRMVAAIAVLTKDVGKLTMGQPLVILAPHAVEALVKQPPDRWLSNARMTHYQALLLDTDRVQFGPIVALNPATLLPLPEEGLQHDCLDILAEAHGTRPDLTDQPLPDADHTWYTDGSSFLQEGQRRAGAAVTTETEVIWAKALPAGTSAQRAELIALTQALKMAAGKKLNVYTDSRYAFATAHIHGEIYRRRGWLTSEGKEIKNKDEILALLKALFLPKRLSIIHCPGHQKGNHAEARGNRMADQAAREVATRETPETSTLLAGKRTADGSEFEKRTADGSEFESPKKKAKVE

SEQ ID NO: 2429 - protein, 2115 aa, synthetic construct
MPAAKRVKLDGGDKKYSIGLDIGTNSVGWAVITDEYKVPSKKFKVLGNTDRHSIKKNLIGALLFDSGETAEATRLKRTARRRYTRRKNRICYLQEIFSNEMAKVDDSFFHRLEESFLVEEDKKHERHPIFGNIVDEVAYHEKYPTIYHLRKKLVDSTDKADLRLIYLALAHMIKFRGHFLIEGDLNPDNSDVDKLFIQLVQTYNQLFEENPINASGVDAKAILSARLSKSRRLENLIAQLPGEKKNGLFGNLIALSLGLTPNFKSNFDLAEDAKLQLSKDTYDDDLDNLLAQIGDQYADLFLAAKNLSDAILLSDILRVNTEITKAPLSASMIKRYDEHHQDLTLLKALVRQQLPEKYKEIFFDQSKNGYAGYIDGGASQEEFYKFIKPILEKMDGTEELLVKLNREDLLRKQRTFDNGSIPHQIHLGELHAILRRQEDFYPFLKDNREKIEKILTFRIPYYVGPLARGNSRFAWMTRKSEETITPWNFEEVVDKGASAQSFIERMTNFDKNLPNEKVLPKHSLLYEYFTVYNELTKVKYVTEGMRKPAFLSGEQKKAIVDLLFKTNRKVTVKQLKEDYFKKIECFDSVEISGVEDRFNASLGTYHDLLKIIKDKDFLDNEENEDILEDIVLTLTLFEDREMIEERLKTYAHLFDDKVMKQLKRRRYTGWGRLSRKLINGIRDKQSGKTILDFLKSDGFANRNFMQLIHDDSLTFKEDIQKAQVSGQGDSLHEHIANLAGSPAIKKGILQTVKVVDELVKVMGRHKPENIVIEMARENQTTQKGQKNSRERMKRIEEGIKELGSQILKEHPVENTQLQNEKLYLYYLQNGRDMYVDQELDINRLSDYDVDHIVPQSFLKDDSIDNKVLTRSDKARGKSDNVPSEEVVKKMKNYWRQLLNAKLITQRKFDNLTKAERGGLSELDKAGFIKRQLVETRQITKHVAQILDSRMNTKYDENDKLIREVKVITLKSKLVSDFRKDFQFYKVREINNYHHAHDAYLNAVVGTALIKKYPKLESEFVYGDYKVYDVRKMIAKSEQEIGKATAKYFFYSNIMNFFKTEITLANGEIRKRPLIETNGETGEIVWDKGRDFATVRKVLSMPQVNIVKKTEVQTGGFSKESILPKRNSDKLIARKKDWDPKKYGGFDSPTVAYSVLVVAKVEKGKSKKLKSVKELLGITIMERSSFEKNPIDFLEAKGYKEVKKDLIIKLPKYSLFELENGRKRMLASAGELQKGNELALPSKYVNFLYLASHYEKLKGSPEDNEQKQLFVEQHKHYLDEIIEQISEFSKRVILADANLDKVLSAYNKHRDKPIREQAENIIHLFTLTNLGAPAAFKYFDTTIDRKRYTSTKEVLDATLIHQSITGLYETRIDLSQLGGDGGGGGGSGGGGSGGGGSGGGGSGGGGSGGGGSGGTLNIEDEYRLHETSKGPDVPLGSTWLSDFPQAWAETGGMGLAFRQAPLIISLKATSTPVSIKQYPMSQEARLGIKPHIQRLLDQGILVPCQSPWNTPLLPVKKPGTNDYRPVQDLREVNKRVEDIHPTVPNPYNLLSGLPPSHQWYTVLDLKDAFFCLRLHPTSQSLFAFEWKDPEMGISGQLTWTRLPQGFKNSPTLFNEALHRDLADFRIQHPDLILLQYVDDLLLAATSELDCQQGTRALLQTLGDLGYRASAKKAQICQKQVKYLGYLLKEGQRWLTEARKETVMGQPTPKTPRQLREFLGTAGLCRLWIPGFAEMAAPLYPLTKPGTLFKWGPDQQKAYQEIKQALLTAPALGLPDLTKPFELFVDEKQGYAKGVLTQKLGPWRRPVAYLSKKLDPVAAGWPPCLRMVAAIAVLTKDVGKLTMGQPLVILAPHAVEALVKQPPDRWLSNARMTHYQALLLDTDRVQFGPIVALNPATLLPLPEEGLQHDCLDILAEAHGTRPDLTDQPLPDADHTWYTDGSSFLQEGQRRAGAAVTTETEVIWAKALPAGTSAQRAELIALTQALKMAAGKKLNVYTDSRYAFATAHIHGEIYRRRGWLTSEGKEIKNKDEILALLKALFLPKRLSIIHCPGHQKGNHAEARGNRMADQAAREVATRETPETSTLLAGKRTADGSEFEKRTADGSEFESPKKKAKVE

SEQ ID NO: 2430 - protein, 2098 aa, synthetic construct
MPAAKRVKLDGGDKKYSIGLDIGTNSVGWAVITDEYKVPSKKFKVLGNTDRHSIKKNLIGALLFDSGETAEATRLKRTARRRYTRRKNRICYLQEIFSNEMAKVDDSFFHRLEESFLVEEDKKHERHPIFGNIVDEVAYHEKYPTIYHLRKKLVDSTDKADLRLIYLALAHMIKFRGHFLIEGDLNPDNSDVDKLFIQLVQTYNQLFEENPINASGVDAKAILSARLSKSRRLENLIAQLPGEKKNGLFGNLIALSLGLTPNFKSNFDLAEDAKLQLSKDTYDDDLDNLLAQIGDQYADLFLAAKNLSDAILLSDILRVNTEITKAPLSASMIKRYDEHHQDLTLLKALVRQQLPEKYKEIFFDQSKNGYAGYIDGGASQEEFYKFIKPILEKMDGTEELLVKLNREDLLRKQRTFDNGSIPHQIHLGELHAILRRQEDFYPFLKDNREKIEKILTFRIPYYVGPLARGNSRFAWMTRKSEETITPWNFEEVVDKGASAQSFIERMTNFDKNLPNEKVLPKHSLLYEYFTVYNELTKVKYVTEGMRKPAFLSGEQKKAIVDLLFKTNRKVTVKQLKEDYFKKIECFDSVEISGVEDRFNASLGTYHDLLKIIKDKDFLDNEENEDILEDIVLTLTLFEDREMIEERLKTYAHLFDDKVMKQLKRRRYTGWGRLSRKLINGIRDKQSGKTILDFLKSDGFANRNFMQLIHDDSLTFKEDIQKAQVSGQGDSLHEHIANLAGSPAIKKGILQTVKVVDELVKVMGRHKPENIVIEMARENQTTQKGQKNSRERMKRIEEGIKELGSQILKEHPVENTQLQNEKLYLYYLQNGRDMYVDQELDINRLSDYDVDHIVPQSFLKDDSIDNKVLTRSDKARGKSDNVPSEEVVKKMKNYWRQLLNAKLITQRKFDNLTKAERGGLSELDKAGFIKRQLVETRQITKHVAQILDSRMNTKYDENDKLIREVKVITLKSKLVSDFRKDFQFYKVREINNYHHAHDAYLNAVVGTALIKKYPKLESEFVYGDYKVYDVRKMIAKSEQEIGKATAKYFFYSNIMNFFKTEITLANGEIRKRPLIETNGETGEIVWDKGRDFATVRKVLSMPQVNIVKKTEVQTGGFSKESILPKRNSDKLIARKKDWDPKKYGGFDSPTVAYSVLVVAKVEKGKSKKLKSVKELLGITIMERSSFEKNPIDFLEAKGYKEVKKDLIIKLPKYSLFELENGRKRMLASAGELQKGNELALPSKYVNFLYLASHYEKLKGSPEDNEQKQLFVEQHKHYLDEIIEQISEFSKRVILADANLDKVLSAYNKHRDKPIREQAENIIHLFTLTNLGAPAAFKYFDTTIDRKRYTSTKEVLDATLIHQSITGLYETRIDLSQLGGDGGPAPAPAPAPAPAPGGTLNIEDEYRLHETSKGPDVPLGSTWLSDFPQAWAETGGMGLAFRQAPLIISLKATSTPVSIKQYPMSQEARLGIKPHIQRLLDQGILVPCQSPWNTPLLPVKKPGTNDYRPVQDLREVNKRVEDIHPTVPNPYNLLSGLPPSHQWYTVLDLKDAFFCLRLHPTSQSLFAFEWKDPEMGISGQLTWTRLPQGFKNSPTLFNEALHRDLADFRIQHPDLILLQYVDDLLLAATSELDCQQGTRALLQTLGDLGYRASAKKAQICQKQVKYLGYLLKEGQRWLTEARKETVMGQPTPKTPRQLREFLGKAGLCRLFIPGFAEMAAPLYPLTKPGTLFKWGPDQQKAYQEIKQALLTAPALGLPDLTKPFELFVDEKQGYAKGVLTQKLGPWRRPVAYLSKKLDPVAAGWPPCLRMVAAIAVLTKDVGKLTMGQPLVILAPHAVEALVKQPPDRWLSNARMTHYQALLLDTDRVQFGPIVALNPATLLPLPEEGLQHDCLDILAEAHGTRPDLTDQPLPDADHTWYTDGSSFLQEGQRRAGAAVTTETEVIWAKALPAGTSAQRAELIALTQALKMAAGKKLNVYTDSRYAFATAHIHGEIYRRRGWLTSEGKEIKNKDEILALLKALFLPKRLSIIHCPGHQKGNHAEARGNRMADQAAREVATRETPETSTLLAGKRTADGSEFEKRTADGSEFESPKKKAKVE

SEQ ID NO: 2431 - protein, 2096 aa, synthetic construct
MPAAKRVKLDGGDKKYSIGLDIGTNSVGWAVITDEYKVPSKKFKVLGNTDRHSIKKNLIGALLFDSGETAEATRLKRTARRRYTRRKNRICYLQEIFSNEMAKVDDSFFHRLEESFLVEEDKKHERHPIFGNIVDEVAYHEKYPTIYHLRKKLVDSTDKADLRLIYLALAHMIKFRGHFLIEGDLNPDNSDVDKLFIQLVQTYNQLFEENPINASGVDAKAILSARLSKSRRLENLIAQLPGEKKNGLFGNLIALSLGLTPNFKSNFDLAEDAKLQLSKDTYDDDLDNLLAQIGDQYADLFLAAKNLSDAILLSDILRVNTEITKAPLSASMIKRYDEHHQDLTLLKALVRQQLPEKYKEIFFDQSKNGYAGYIDGGASQEEFYKFIKPILEKMDGTEELLVKLNREDLLRKQRTFDNGSIPHQIHLGELHAILRRQEDFYPFLKDNREKIEKILTFRIPYYVGPLARGNSRFAWMTRKSEETITPWNFEEVVDKGASAQSFIERMTNFDKNLPNEKVLPKHSLLYEYFTVYNELTKVKYVTEGMRKPAFLSGEQKKAIVDLLFKTNRKVTVKQLKEDYFKKIECFDSVEISGVEDRFNASLGTYHDLLKIIKDKDFLDNEENEDILEDIVLTLTLFEDREMIEERLKTYAHLFDDKVMKQLKRRRYTGWGRLSRKLINGIRDKQSGKTILDFLKSDGFANRNFMQLIHDDSLTFKEDIQKAQVSGQGDSLHEHIANLAGSPAIKKGILQTVKVVDELVKVMGRHKPENIVIEMARENQTTQKGQKNSRERMKRIEEGIKELGSQILKEHPVENTQLQNEKLYLYYLQNGRDMYVDQELDINRLSDYDVDHIVPQSFLKDDSIDNKVLTRSDKARGKSDNVPSEEVVKKMKNYWRQLLNAKLITQRKFDNLTKAERGGLSELDKAGFIKRQLVETRQITKHVAQILDSRMNTKYDENDKLIREVKVITLKSKLVSDFRKDFQFYKVREINNYHHAHDAYLNAVVGTALIKKYPKLESEFVYGDYKVYDVRKMIAKSEQEIGKATAKYFFYSNIMNFFKTEITLANGEIRKRPLIETNGETGEIVWDKGRDFATVRKVLSMPQVNIVKKTEVQTGGFSKESILPKRNSDKLIARKKDWDPKKYGGFDSPTVAYSVLVVAKVEKGKSKKLKSVKELLGITIMERSSFEKNPIDFLEAKGYKEVKKDLIIKLPKYSLFELENGRKRMLASAGELQKGNELALPSKYVNFLYLASHYEKLKGSPEDNEQKQLFVEQHKHYLDEIIEQISEFSKRVILADANLDKVLSAYNKHRDKPIREQAENIIHLFTLTNLGAPAAFKYFDTTIDRKRYTSTKEVLDATLIHQSITGLYETRIDLSQLGGDGGEAAAKPAPGGSGGTLNIEDEYRLHETSKGPDVPLGSTWLSDFPQAWAETGGMGLAFRQAPLIISLKATSTPVSIKQYPMSQEARLGIKPHIQRLLDQGILVPCQSPWNTPLLPVKKPGTNDYRPVQDLREVNKRVEDIHPTVPNPYNLLSGLPPSHQWYTVLDLKDAFFCLRLHPTSQSLFAFEWKDPEMGISGQLTWTRLPQGFKNSPTLFNEALHRDLADFRIQHPDLILLQYVDDLLLAATSELDCQQGTRALLQTLGDLGYRASAKKAQICQKQVKYLGYLLKEGQRWLTEARKETVMGQPTPKTPRQLREFLGKAGLCRLFIPGFAEMAAPLYPLTKPGTLFKWGPDQQKAYQEIKQALLTAPALGLPDLTKPFELFVDEKQGYAKGVLTQKLGPWRRPVAYLSKKLDPVAAGWPPCLRMVAAIAVLTKDVGKLTMGQPLVILAPHAVEALVKQPPDRWLSNARMTHYQALLLDTDRVQFGPIVALNPATLLPLPEEGLQHDCLDILAEAHGTRPDLTDQPLPDADHTWYTDGSSFLQEGQRRAGAAVTTETEVIWAKALPAGTSAQRAELIALTQALKMAAGKKLNVYTDSRYAFATAHIHGEIYRRRGWLTSEGKEIKNKDEILALLKALFLPKRLSIIHCPGHQKGNHAEARGNRMADQAAREVATRETPETSTLLAGKRTADGSEFEKRTADGSEFESPKKKAKVE

SEQ ID NO: 2432 - protein, 2094 aa, synthetic construct
MPAAKRVKLDGGDKKYSIGLDIGTNSVGWAVITDEYKVPSKKFKVLGNTDRHSIKKNLIGALLFDSGETAEATRLKRTARRRYTRRKNRICYLQEIFSNEMAKVDDSFFHRLEESFLVEEDKKHERHPIFGNIVDEVAYHEKYPTIYHLRKKLVDSTDKADLRLIYLALAHMIKFRGHFLIEGDLNPDNSDVDKLFIQLVQTYNQLFEENPINASGVDAKAILSARLSKSRRLENLIAQLPGEKKNGLFGNLIALSLGLTPNFKSNFDLAEDAKLQLSKDTYDDDLDNLLAQIGDQYADLFLAAKNLSDAILLSDILRVNTEITKAPLSASMIKRYDEHHQDLTLLKALVRQQLPEKYKEIFFDQSKNGYAGYIDGGASQEEFYKFIKPILEKMDGTEELLVKLNREDLLRKQRTFDNGSIPHQIHLGELHAILRRQEDFYPFLKDNREKIEKILTFRIPYYVGPLARGNSRFAWMTRKSEETITPWNFEEVVDKGASAQSFIERMTNFDKNLPNEKVLPKHSLLYEYFTVYNELTKVKYVTEGMRKPAFLSGEQKKAIVDLLFKTNRKVTVKQLKEDYFKKIECFDSVEISGVEDRFNASLGTYHDLLKIIKDKDFLDNEENEDILEDIVLTLTLFEDREMIEERLKTYAHLFDDKVMKQLKRRRYTGWGRLSRKLINGIRDKQSGKTILDFLKSDGFANRNFMQLIHDDSLTFKEDIQKAQVSGQGDSLHEHIANLAGSPAIKKGILQTVKVVDELVKVMGRHKPENIVIEMARENQTTQKGQKNSRERMKRIEEGIKELGSQILKEHPVENTQLQNEKLYLYYLQNGRDMYVDQELDINRLSDYDVDHIVPQSFLKDDSIDNKVLTRSDKARGKSDNVPSEEVVKKMKNYWRQLLNAKLITQRKFDNLTKAERGGLSELDKAGFIKRQLVETRQITKHVAQILDSRMNTKYDENDKLIREVKVITLKSKLVSDFRKDFQFYKVREINNYHHAHDAYLNAVVGTALIKKYPKLESEFVYGDYKVYDVRKMIAKSEQEIGKATAKYFFYSNIMNFFKTEITLANGEIRKRPLIETNGETGEIVWDKGRDFATVRKVLSMPQVNIVKKTEVQTGGFSKESILPKRNSDKLIARKKDWDPKKYGGFDSPTVAYSVLVVAKVEKGKSKKLKSVKELLGITIMERSSFEKNPIDFLEAKGYKEVKKDLIIKLPKYSLFELENGRKRMLASAGELQKGNELALPSKYVNFLYLASHYEKLKGSPEDNEQKQLFVEQHKHYLDEIIEQISEFSKRVILADANLDKVLSAYNKHRDKPIREQAENIIHLFTLTNLGAPAAFKYFDTTIDRKRYTSTKEVLDATLIHQSITGLYETRIDLSQLGGDGGPAPGGSGGGGGTLNIEDEYRLHETSKGPDVPLGSTWLSDFPQAWAETGGMGLAFRQAPLIISLKATSTPVSIKQYPMSQEARLGIKPHIQRLLDQGILVPCQSPWNTPLLPVKKPGTNDYRPVQDLREVNKRVEDIHPTVPNPYNLLSGLPPSHQWYTVLDLKDAFFCLRLHPTSQSLFAFEWKDPEMGISGQLTWTRLPQGFKNSPTLFNEALHRDLADFRIQHPDLILLQYVDDLLLAATSELDCQQGTRALLQTLGDLGYRASAKKAQICQKQVKYLGYLLKEGQRWLTEARKETVMGQPTPKTPRQLREFLGKAGLCRLFIPGFAEMAAPLYPLTKPGTLFKWGPDQQKAYQEIKQALLTAPALGLPDLTKPFELFVDEKQGYAKGVLTQKLGPWRRPVAYLSKKLDPVAAGWPPCLRMVAAIAVLTKDVGKLTMGQPLVILAPHAVEALVKQPPDRWLSNARMTHYQALLLDTDRVQFGPIVALNPATLLPLPEEGLQHDCLDILAEAHGTRPDLTDQPLPDADHTWYTDGSSFLQEGQRRAGAAVTTETEVIWAKALPAGTSAQRAELIALTQALKMAAGKKLNVYTDSRYAFATAHIHGEIYRRRGWLTSEGKEIKNKDEILALLKALFLPKRLSIIHCPGHQKGNHAEARGNRMADQAAREVATRETPETSTLLAGKRTADGSEFEKRTADGSEFESPKKKAKVE

SEQ ID NO: 2433 - protein, 2100 aa, synthetic construct
MPAAKRVKLDGGDKKYSIGLDIGTNSVGWAVITDEYKVPSKKFKVLGNTDRHSIKKNLIGALLFDSGETAEATRLKRTARRRYTRRKNRICYLQEIFSNEMAKVDDSFFHRLEESFLVEEDKKHERHPIFGNIVDEVAYHEKYPTIYHLRKKLVDSTDKADLRLIYLALAHMIKFRGHFLIEGDLNPDNSDVDKLFIQLVQTYNQLFEENPINASGVDAKAILSARLSKSRRLENLIAQLPGEKKNGLFGNLIALSLGLTPNFKSNFDLAEDAKLQLSKDTYDDDLDNLLAQIGDQYADLFLAAKNLSDAILLSDILRVNTEITKAPLSASMIKRYDEHHQDLTLLKALVRQQLPEKYKEIFFDQSKNGYAGYIDGGASQEEFYKFIKPILEKMDGTEELLVKLNREDLLRKQRTFDNGSIPHQIHLGELHAILRRQEDFYPFLKDNREKIEKILTFRIPYYVGPLARGNSRFAWMTRKSEETITPWNFEEVVDKGASAQSFIERMTNFDKNLPNEKVLPKHSLLYEYFTVYNELTKVKYVTEGMRKPAFLSGEQKKAIVDLLFKTNRKVTVKQLKEDYFKKIECFDSVEISGVEDRFNASLGTYHDLLKIIKDKDFLDNEENEDILEDIVLTLTLFEDREMIEERLKTYAHLFDDKVMKQLKRRRYTGWGRLSRKLINGIRDKQSGKTILDFLKSDGFANRNFMQLIHDDSLTFKEDIQKAQVSGQGDSLHEHIANLAGSPAIKKGILQTVKVVDELVKVMGRHKPENIVIEMARENQTTQKGQKNSRERMKRIEEGIKELGSQILKEHPVENTQLQNEKLYLYYLQNGRDMYVDQELDINRLSDYDVDHIVPQSFLKDDSIDNKVLTRSDKARGKSDNVPSEEVVKKMKNYWRQLLNAKLITQRKFDNLTKAERGGLSELDKAGFIKRQLVETRQITKHVAQILDSRMNTKYDENDKLIREVKVITLKSKLVSDFRKDFQFYKVREINNYHHAHDAYLNAVVGTALIKKYPKLESEFVYGDYKVYDVRKMIAKSEQEIGKATAKYFFYSNIMNFFKTEITLANGEIRKRPLIETNGETGEIVWDKGRDFATVRKVLSMPQVNIVKKTEVQTGGFSKESILPKRNSDKLIARKKDWDPKKYGGFDSPTVAYSVLVVAKVEKGKSKKLKSVKELLGITIMERSSFEKNPIDFLEAKGYKEVKKDLIIKLPKYSLFELENGRKRMLASAGELQKGNELALPSKYVNFLYLASHYEKLKGSPEDNEQKQLFVEQHKHYLDEIIEQISEFSKRVILADANLDKVLSAYNKHRDKPIREQAENIIHLFTLTNLGAPAAFKYFDTTIDRKRYTSTKEVLDATLIHQSITGLYETRIDLSQLGGDGGEAAAKGGGGSEAAAKGGTLNIEDEYRLHETSKGPDVPLGSTWLSDFPQAWAETGGMGLAFRQAPLIISLKATSTPVSIKQYPMSQEARLGIKPHIQRLLDQGILVPCQSPWNTPLLPVKKPGTNDYRPVQDLREVNKRVEDIHPTVPNPYNLLSGLPPSHQWYTVLDLKDAFFCLRLHPTSQSLFAFEWKDPEMGISGQLTWTRLPQGFKNSPTLFNEALHRDLADFRIQHPDLILLQYVDDLLLAATSELDCQQGTRALLQTLGDLGYRASAKKAQICQKQVKYLGYLLKEGQRWLTEARKETVMGQPTPKTPRQLREFLGKAGLCRLFIPGFAEMAAPLYPLTKPGTLFKWGPDQQKAYQEIKQALLTAPALGLPDLTKPFELFVDEKQGYAKGVLTQKLGPWRRPVAYLSKKLDPVAAGWPPCLRMVAAIAVLTKDVGKLTMGQPLVILAPHAVEALVKQPPDRWLSNARMTHYQALLLDTDRVQFGPIVALNPATLLPLPEEGLQHDCLDILAEAHGTRPDLTDQPLPDADHTWYTDGSSFLQEGQRRAGAAVTTETEVIWAKALPAGTSAQRAELIALTQALKMAAGKKLNVYTDSRYAFATAHIHGEIYRRRGWLTSEGKEIKNKDEILALLKALFLPKRLSIIHCPGHQKGNHAEARGNRMADQAAREVATRETPETSTLLAGKRTADGSEFEKRTADGSEFESPKKKAKVE

SEQ ID NO: 2434 - protein, 2096 aa, synthetic construct
MPAAKRVKLDGGDKKYSIGLDIGTNSVGWAVITDEYKVPSKKFKVLGNTDRHSIKKNLIGALLFDSGETAEATRLKRTARRRYTRRKNRICYLQEIFSNEMAKVDDSFFHRLEESFLVEEDKKHERHPIFGNIVDEVAYHEKYPTIYHLRKKLVDSTDKADLRLIYLALAHMIKFRGHFLIEGDLNPDNSDVDKLFIQLVQTYNQLFEENPINASGVDAKAILSARLSKSRRLENLIAQLPGEKKNGLFGNLIALSLGLTPNFKSNFDLAEDAKLQLSKDTYDDDLDNLLAQIGDQYADLFLAAKNLSDAILLSDILRVNTEITKAPLSASMIKRYDEHHQDLTLLKALVRQQLPEKYKEIFFDQSKNGYAGYIDGGASQEEFYKFIKPILEKMDGTEELLVKLNREDLLRKQRTFDNGSIPHQIHLGELHAILRRQEDFYPFLKDNREKIEKILTFRIPYYVGPLARGNSRFAWMTRKSEETITPWNFEEVVDKGASAQSFIERMTNFDKNLPNEKVLPKHSLLYEYFTVYNELTKVKYVTEGMRKPAFLSGEQKKAIVDLLFKTNRKVTVKQLKEDYFKKIECFDSVEISGVEDRFNASLGTYHDLLKIIKDKDFLDNEENEDILEDIVLTLTLFEDREMIEERLKTYAHLFDDKVMKQLKRRRYTGWGRLSRKLINGIRDKQSGKTILDFLKSDGFANRNFMQLIHDDSLTFKEDIQKAQVSGQGDSLHEHIANLAGSPAIKKGILQTVKVVDELVKVMGRHKPENIVIEMARENQTTQKGQKNSRERMKRIEEGIKELGSQILKEHPVENTQLQNEKLYLYYLQNGRDMYVDQELDINRLSDYDVDHIVPQSFLKDDSIDNKVLTRSDKARGKSDNVPSEEVVKKMKNYWRQLLNAKLITQRKFDNLTKAERGGLSELDKAGFIKRQLVETRQITKHVAQILDSRMNTKYDENDKLIREVKVITLKSKLVSDFRKDFQFYKVREINNYHHAHDAYLNAVVGTALIKKYPKLESEFVYGDYKVYDVRKMIAKSEQEIGKATAKYFFYSNIMNFFKTEITLANGEIRKRPLIETNGETGEIVWDKGRDFATVRKVLSMPQVNIVKKTEVQTGGFSKESILPKRNSDKLIARKKDWDPKKYGGFDSPTVAYSVLVVAKVEKGKSKKLKSVKELLGITIMERSSFEKNPIDFLEAKGYKEVKKDLIIKLPKYSLFELENGRKRMLASAGELQKGNELALPSKYVNFLYLASHYEKLKGSPEDNEQKQLFVEQHKHYLDEIIEQISEFSKRVILADANLDKVLSAYNKHRDKPIREQAENIIHLFTLTNLGAPAAFKYFDTTIDRKRYTSTKEVLDATLIHQSITGLYETRIDLSQLGGDGGGGGGSSEAAAKGGTLNIEDEYRLHETSKGPDVPLGSTWLSDFPQAWAETGGMGLAFRQAPLIISLKATSTPVSIKQYPMSQEARLGIKPHIQRLLDQGILVPCQSPWNTPLLPVKKPGTNDYRPVQDLREVNKRVEDIHPTVPNPYNLLSGLPPSHQWYTVLDLKDAFFCLRLHPTSQSLFAFEWKDPEMGISGQLTWTRLPQGFKNSPTLFNEALHRDLADFRIQHPDLILLQYVDDLLLAATSELDCQQGTRALLQTLGDLGYRASAKKAQICQKQVKYLGYLLKEGQRWLTEARKETVMGQPTPKTPRQLREFLGKAGLCRLFIPGFAEMAAPLYPLTKPGTLFKWGPDQQKAYQEIKQALLTAPALGLPDLTKPFELFVDEKQGYAKGVLTQKLGPWRRPVAYLSKKLDPVAAGWPPCLRMVAAIAVLTKDVGKLTMGQPLVILAPHAVEALVKQPPDRWLSNARMTHYQALLLDTDRVQFGPIVALNPATLLPLPEEGLQHDCLDILAEAHGTRPDLTDQPLPDADHTWYTDGSSFLQEGQRRAGAAVTTETEVIWAKALPAGTSAQRAELIALTQALKMAAGKKLNVYTDSRYAFATAHIHGEIYRRRGWLTSEGKEIKNKDEILALLKALFLPKRLSIIHCPGHQKGNHAEARGNRMADQAAREVATRETPETSTLLAGKRTADGSEFEKRTADGSEFESPKKKAKVE

SEQ ID NO: 2435 - protein, 2093 aa, synthetic construct
MPAAKRVKLDGGDKKYSIGLDIGTNSVGWAVITDEYKVPSKKFKVLGNTDRHSIKKNLIGALLFDSGETAEATRLKRTARRRYTRRKNRICYLQEIFSNEMAKVDDSFFHRLEESFLVEEDKKHERHPIFGNIVDEVAYHEKYPTIYHLRKKLVDSTDKADLRLIYLALAHMIKFRGHFLIEGDLNPDNSDVDKLFIQLVQTYNQLFEENPINASGVDAKAILSARLSKSRRLENLIAQLPGEKKNGLFGNLIALSLGLTPNFKSNFDLAEDAKLQLSKDTYDDDLDNLLAQIGDQYADLFLAAKNLSDAILLSDILRVNTEITKAPLSASMIKRYDEHHQDLTLLKALVRQQLPEKYKEIFFDQSKNGYAGYIDGGASQEEFYKFIKPILEKMDGTEELLVKLNREDLLRKQRTFDNGSIPHQIHLGELHAILRRQEDFYPFLKDNREKIEKILTFRIPYYVGPLARGNSRFAWMTRKSEETITPWNFEEVVDKGASAQSFIERMTNFDKNLPNEKVLPKHSLLYEYFTVYNELTKVKYVTEGMRKPAFLSGEQKKAIVDLLFKTNRKVTVKQLKEDYFKKIECFDSVEISGVEDRFNASLGTYHDLLKIIKDKDFLDNEENEDILEDIVLTLTLFEDREMIEERLKTYAHLFDDKVMKQLKRRRYTGWGRLSRKLINGIRDKQSGKTILDFLKSDGFANRNFMQLIHDDSLTFKEDIQKAQVSGQGDSLHEHIANLAGSPAIKKGILQTVKVVDELVKVMGRHKPENIVIEMARENQTTQKGQKNSRERMKRIEEGIKELGSQILKEHPVENTQLQNEKLYLYYLQNGRDMYVDQELDINRLSDYDVDHIVPQSFLKDDSIDNKVLTRSDKARGKSDNVPSEEVVKKMKNYWRQLLNAKLITQRKFDNLTKAERGGLSELDKAGFIKRQLVETRQITKHVAQILDSRMNTKYDENDKLIREVKVITLKSKLVSDFRKDFQFYKVREINNYHHAHDAYLNAVVGTALIKKYPKLESEFVYGDYKVYDVRKMIAKSEQEIGKATAKYFFYSNIMNFFKTEITLANGEIRKRPLIETNGETGEIVWDKGRDFATVRKVLSMPQVNIVKKTEVQTGGFSKESILPKRNSDKLIARKKDWDPKKYGGFDSPTVAYSVLVVAKVEKGKSKKLKSVKELLGITIMERSSFEKNPIDFLEAKGYKEVKKDLIIKLPKYSLFELENGRKRMLASAGELQKGNELALPSKYVNFLYLASHYEKLKGSPEDNEQKQLFVEQHKHYLDEIIEQISEFSKRVILADANLDKVLSAYNKHRDKPIREQAENIIHLFTLTNLGAPAAFKYFDTTIDRKRYTSTKEVLDATLIHQSITGLYETRIDLSQLGGDGGEAAAKGGSGGTLNIEDEYRLHETSKGPDVPLGSTWLSDFPQAWAETGGMGLAFRQAPLIISLKATSTPVSIKQYPMSQEARLGIKPHIQRLLDQGILVPCQSPWNTPLLPVKKPGTNDYRPVQDLREVNKRVEDIHPTVPNPYNLLSGLPPSHQWYTVLDLKDAFFCLRLHPTSQSLFAFEWKDPEMGISGQLTWTRLPQGFKNSPTLFNEALHRDLADFRIQHPDLILLQYVDDLLLAATSELDCQQGTRALLQTLGDLGYRASAKKAQICQKQVKYLGYLLKEGQRWLTEARKETVMGQPTPKTPRQLREFLGKAGLCRLFIPGFAEMAAPLYPLTKPGTLFKWGPDQQKAYQEIKQALLTAPALGLPDLTKPFELFVDEKQGYAKGVLTQKLGPWRRPVAYLSKKLDPVAAGWPPCLRMVAAIAVLTKDVGKLTMGQPLVILAPHAVEALVKQPPDRWLSNARMTHYQALLLDTDRVQFGPIVALNPATLLPLPEEGLQHDCLDILAEAHGTRPDLTDQPLPDADHTWYTDGSSFLQEGQRRAGAAVTTETEVIWAKALPAGTSAQRAELIALTQALKMAAGKKLNVYTDSRYAFATAHIHGEIYRRRGWLTSEGKEIKNKDEILALLKALFLPKRLSIIHCPGHQKGNHAEARGNRMADQAAREVATRETPETSTLLAGKRTADGSEFEKRTADGSEFESPKKKAKVE

SEQ ID NO: 2436 - protein, 2091 aa, synthetic construct
MPAAKRVKLDGGDKKYSIGLDIGTNSVGWAVITDEYKVPSKKFKVLGNTDRHSIKKNLIGALLFDSGETAEATRLKRTARRRYTRRKNRICYLQEIFSNEMAKVDDSFFHRLEESFLVEEDKKHERHPIFGNIVDEVAYHEKYPTIYHLRKKLVDSTDKADLRLIYLALAHMIKFRGHFLIEGDLNPDNSDVDKLFIQLVQTYNQLFEENPINASGVDAKAILSARLSKSRRLENLIAQLPGEKKNGLFGNLIALSLGLTPNFKSNFDLAEDAKLQLSKDTYDDDLDNLLAQIGDQYADLFLAAKNLSDAILLSDILRVNTEITKAPLSASMIKRYDEHHQDLTLLKALVRQQLPEKYKEIFFDQSKNGYAGYIDGGASQEEFYKFIKPILEKMDGTEELLVKLNREDLLRKQRTFDNGSIPHQIHLGELHAILRRQEDFYPFLKDNREKIEKILTFRIPYYVGPLARGNSRFAWMTRKSEETITPWNFEEVVDKGASAQSFIERMTNFDKNLPNEKVLPKHSLLYEYFTVYNELTKVKYVTEGMRKPAFLSGEQKKAIVDLLFKTNRKVTVKQLKEDYFKKIECFDSVEISGVEDRFNASLGTYHDLLKIIKDKDFLDNEENEDILEDIVLTLTLFEDREMIEERLKTYAHLFDDKVMKQLKRRRYTGWGRLSRKLINGIRDKQSGKTILDFLKSDGFANRNFMQLIHDDSLTFKEDIQKAQVSGQGDSLHEHIANLAGSPAIKKGILQTVKVVDELVKVMGRHKPENIVIEMARENQTTQKGQKNSRERMKRIEEGIKELGSQILKEHPVENTQLQNEKLYLYYLQNGRDMYVDQELDINRLSDYDVDHIVPQSFLKDDSIDNKVLTRSDKARGKSDNVPSEEVVKKMKNYWRQLLNAKLITQRKFDNLTKAERGGLSELDKAGFIKRQLVETRQITKHVAQILDSRMNTKYDENDKLIREVKVITLKSKLVSDFRKDFQFYKVREINNYHHAHDAYLNAVVGTALIKKYPKLESEFVYGDYKVYDVRKMIAKSEQEIGKATAKYFFYSNIMNFFKTEITLANGEIRKRPLIETNGETGEIVWDKGRDFATVRKVLSMPQVNIVKKTEVQTGGFSKESILPKRNSDKLIARKKDWDPKKYGGFDSPTVAYSVLVVAKVEKGKSKKLKSVKELLGITIMERSSFEKNPIDFLEAKGYKEVKKDLIIKLPKYSLFELENGRKRMLASAGELQKGNELALPSKYVNFLYLASHYEKLKGSPEDNEQKQLFVEQHKHYLDEIIEQISEFSKRVILADANLDKVLSAYNKHRDKPIREQAENIIHLFTLTNLGAPAAFKYFDTTIDRKRYTSTKEVLDATLIHQSITGLYETRIDLSQLGGDGGGGGGGSGGTLNIEDEYRLHETSKGPDVPLGSTWLSDFPQAWAETGGMGLAFRQAPLIISLKATSTPVSIKQYPMSQEARLGIKPHIQRLLDQGILVPCQSPWNTPLLPVKKPGTNDYRPVQDLREVNKRVEDIHPTVPNPYNLLSGLPPSHQWYTVLDLKDAFFCLRLHPTSQSLFAFEWKDPEMGISGQLTWTRLPQGFKNSPTLFNEALHRDLADFRIQHPDLILLQYVDDLLLAATSELDCQQGTRALLQTLGDLGYRASAKKAQICQKQVKYLGYLLKEGQRWLTEARKETVMGQPTPKTPRQLREFLGKAGLCRLFIPGFAEMAAPLYPLTKPGTLFKWGPDQQKAYQEIKQALLTAPALGLPDLTKPFELFVDEKQGYAKGVLTQKLGPWRRPVAYLSKKLDPVAAGWPPCLRMVAAIAVLTKDVGKLTMGQPLVILAPHAVEALVKQPPDRWLSNARMTHYQALLLDTDRVQFGPIVALNPATLLPLPEEGLQHDCLDILAEAHGTRPDLTDQPLPDADHTWYTDGSSFLQEGQRRAGAAVTTETEVIWAKALPAGTSAQRAELIALTQALKMAAGKKLNVYTDSRYAFATAHIHGEIYRRRGWLTSEGKEIKNKDEILALLKALFLPKRLSIIHCPGHQKGNHAEARGNRMADQAAREVATRETPETSTLLAGKRTADGSEFEKRTADGSEFESPKKKAKVE

SEQ ID NO: 2437 - protein, 2096 aa, synthetic construct
MPAAKRVKLDGGDKKYSIGLDIGTNSVGWAVITDEYKVPSKKFKVLGNTDRHSIKKNLIGALLFDSGETAEATRLKRTARRRYTRRKNRICYLQEIFSNEMAKVDDSFFHRLEESFLVEEDKKHERHPIFGNIVDEVAYHEKYPTIYHLRKKLVDSTDKADLRLIYLALAHMIKFRGHFLIEGDLNPDNSDVDKLFIQLVQTYNQLFEENPINASGVDAKAILSARLSKSRRLENLIAQLPGEKKNGLFGNLIALSLGLTPNFKSNFDLAEDAKLQLSKDTYDDDLDNLLAQIGDQYADLFLAAKNLSDAILLSDILRVNTEITKAPLSASMIKRYDEHHQDLTLLKALVRQQLPEKYKEIFFDQSKNGYAGYIDGGASQEEFYKFIKPILEKMDGTEELLVKLNREDLLRKQRTFDNGSIPHQIHLGELHAILRRQEDFYPFLKDNREKIEKILTFRIPYYVGPLARGNSRFAWMTRKSEETITPWNFEEVVDKGASAQSFIERMTNFDKNLPNEKVLPKHSLLYEYFTVYNELTKVKYVTEGMRKPAFLSGEQKKAIVDLLFKTNRKVTVKQLKEDYFKKIECFDSVEISGVEDRFNASLGTYHDLLKIIKDKDFLDNEENEDILEDIVLTLTLFEDREMIEERLKTYAHLFDDKVMKQLKRRRYTGWGRLSRKLINGIRDKQSGKTILDFLKSDGFANRNFMQLIHDDSLTFKEDIQKAQVSGQGDSLHEHIANLAGSPAIKKGILQTVKVVDELVKVMGRHKPENIVIEMARENQTTQKGQKNSRERMKRIEEGIKELGSQILKEHPVENTQLQNEKLYLYYLQNGRDMYVDQELDINRLSDYDVDHIVPQSFLKDDSIDNKVLTRSDKARGKSDNVPSEEVVKKMKNYWRQLLNAKLITQRKFDNLTKAERGGLSELDKAGFIKRQLVETRQITKHVAQILDSRMNTKYDENDKLIREVKVITLKSKLVSDFRKDFQFYKVREINNYHHAHDAYLNAVVGTALIKKYPKLESEFVYGDYKVYDVRKMIAKSEQEIGKATAKYFFYSNIMNFFKTEITLANGEIRKRPLIETNGETGEIVWDKGRDFATVRKVLSMPQVNIVKKTEVQTGGFSKESILPKRNSDKLIARKKDWDPKKYGGFDSPTVAYSVLVVAKVEKGKSKKLKSVKELLGITIMERSSFEKNPIDFLEAKGYKEVKKDLIIKLPKYSLFELENGRKRMLASAGELQKGNELALPSKYVNFLYLASHYEKLKGSPEDNEQKQLFVEQHKHYLDEIIEQISEFSKRVILADANLDKVLSAYNKHRDKPIREQAENIIHLFTLTNLGAPAAFKYFDTTIDRKRYTSTKEVLDATLIHQSITGLYETRIDLSQLGGDGGGSSGGSEAAAKGGTLNIEDEYRLHETSKGPDVPLGSTWLSDFPQAWAETGGMGLAFRQAPLIISLKATSTPVSIKQYPMSQEARLGIKPHIQRLLDQGILVPCQSPWNTPLLPVKKPGTNDYRPVQDLREVNKRVEDIHPTVPNPYNLLSGLPPSHQWYTVLDLKDAFFCLRLHPTSQSLFAFEWKDPEMGISGQLTWTRLPQGFKNSPTLFNEALHRDLADFRIQHPDLILLQYVDDLLLAATSELDCQQGTRALLQTLGDLGYRASAKKAQICQKQVKYLGYLLKEGQRWLTEARKETVMGQPTPKTPRQLREFLGKAGLCRLFIPGFAEMAAPLYPLTKPGTLFKWGPDQQKAYQEIKQALLTAPALGLPDLTKPFELFVDEKQGYAKGVLTQKLGPWRRPVAYLSKKLDPVAAGWPPCLRMVAAIAVLTKDVGKLTMGQPLVILAPHAVEALVKQPPDRWLSNARMTHYQALLLDTDRVQFGPIVALNPATLLPLPEEGLQHDCLDILAEAHGTRPDLTDQPLPDADHTWYTDGSSFLQEGQRRAGAAVTTETEVIWAKALPAGTSAQRAELIALTQALKMAAGKKLNVYTDSRYAFATAHIHGEIYRRRGWLTSEGKEIKNKDEILALLKALFLPKRLSIIHCPGHQKGNHAEARGNRMADQAAREVATRETPETSTLLAGKRTADGSEFEKRTADGSEFESPKKKAKVE

SEQ ID NO: 2438 - protein, 2094 aa, synthetic construct
MPAAKRVKLDGGDKKYSIGLDIGTNSVGWAVITDEYKVPSKKFKVLGNTDRHSIKKNLIGALLFDSGETAEATRLKRTARRRYTRRKNRICYLQEIFSNEMAKVDDSFFHRLEESFLVEEDKKHERHPIFGNIVDEVAYHEKYPTIYHLRKKLVDSTDKADLRLIYLALAHMIKFRGHFLIEGDLNPDNSDVDKLFIQLVQTYNQLFEENPINASGVDAKAILSARLSKSRRLENLIAQLPGEKKNGLFGNLIALSLGLTPNFKSNFDLAEDAKLQLSKDTYDDDLDNLLAQIGDQYADLFLAAKNLSDAILLSDILRVNTEITKAPLSASMIKRYDEHHQDLTLLKALVRQQLPEKYKEIFFDQSKNGYAGYIDGGASQEEFYKFIKPILEKMDGTEELLVKLNREDLLRKQRTFDNGSIPHQIHLGELHAILRRQEDFYPFLKDNREKIEKILTFRIPYYVGPLARGNSRFAWMTRKSEETITPWNFEEVVDKGASAQSFIERMTNFDKNLPNEKVLPKHSLLYEYFTVYNELTKVKYVTEGMRKPAFLSGEQKKAIVDLLFKTNRKVTVKQLKEDYFKKIECFDSVEISGVEDRFNASLGTYHDLLKIIKDKDFLDNEENEDILEDIVLTLTLFEDREMIEERLKTYAHLFDDKVMKQLKRRRYTGWGRLSRKLINGIRDKQSGKTILDFLKSDGFANRNFMQLIHDDSLTFKEDIQKAQVSGQGDSLHEHIANLAGSPAIKKGILQTVKVVDELVKVMGRHKPENIVIEMARENQTTQKGQKNSRERMKRIEEGIKELGSQILKEHPVENTQLQNEKLYLYYLQNGRDMYVDQELDINRLSDYDVDHIVPQSFLKDDSIDNKVLTRSDKARGKSDNVPSEEVVKKMKNYWRQLLNAKLITQRKFDNLTKAERGGLSELDKAGFIKRQLVETRQITKHVAQILDSRMNTKYDENDKLIREVKVITLKSKLVSDFRKDFQFYKVREINNYHHAHDAYLNAVVGTALIKKYPKLESEFVYGDYKVYDVRKMIAKSEQEIGKATAKYFFYSNIMNFFKTEITLANGEIRKRPLIETNGETGEIVWDKGRDFATVRKVLSMPQVNIVKKTEVQTGGFSKESILPKRNSDKLIARKKDWDPKKYGGFDSPTVAYSVLVVAKVEKGKSKKLKSVKELLGITIMERSSFEKNPIDFLEAKGYKEVKKDLIIKLPKYSLFELENGRKRMLASAGELQKGNELALPSKYVNFLYLASHYEKLKGSPEDNEQKQLFVEQHKHYLDEIIEQISEFSKRVILADANLDKVLSAYNKHRDKPIREQAENIIHLFTLTNLGAPAAFKYFDTTIDRKRYTSTKEVLDATLIHQSITGLYETRIDLSQLGGDGGGSSGGGGGSGGTLNIEDEYRLHETSKGPDVPLGSTWLSDFPQAWAETGGMGLAFRQAPLIISLKATSTPVSIKQYPMSQEARLGIKPHIQRLLDQGILVPCQSPWNTPLLPVKKPGTNDYRPVQDLREVNKRVEDIHPTVPNPYNLLSGLPPSHQWYTVLDLKDAFFCLRLHPTSQSLFAFEWKDPEMGISGQLTWTRLPQGFKNSPTLFNEALHRDLADFRIQHPDLILLQYVDDLLLAATSELDCQQGTRALLQTLGDLGYRASAKKAQICQKQVKYLGYLLKEGQRWLTEARKETVMGQPTPKTPRQLREFLGKAGLCRLFIPGFAEMAAPLYPLTKPGTLFKWGPDQQKAYQEIKQALLTAPALGLPDLTKPFELFVDEKQGYAKGVLTQKLGPWRRPVAYLSKKLDPVAAGWPPCLRMVAAIAVLTKDVGKLTMGQPLVILAPHAVEALVKQPPDRWLSNARMTHYQALLLDTDRVQFGPIVALNPATLLPLPEEGLQHDCLDILAEAHGTRPDLTDQPLPDADHTWYTDGSSFLQEGQRRAGAAVTTETEVIWAKALPAGTSAQRAELIALTQALKMAAGKKLNVYTDSRYAFATAHIHGEIYRRRGWLTSEGKEIKNKDEILALLKALFLPKRLSIIHCPGHQKGNHAEARGNRMADQAAREVATRETPETSTLLAGKRTADGSEFEKRTADGSEFESPKKKAKVE

SEQ ID NO: 2439 - protein, 2091 aa, synthetic construct
MPAAKRVKLDGGDKKYSIGLDIGTNSVGWAVITDEYKVPSKKFKVLGNTDRHSIKKNLIGALLFDSGETAEATRLKRTARRRYTRRKNRICYLQEIFSNEMAKVDDSFFHRLEESFLVEEDKKHERHPIFGNIVDEVAYHEKYPTIYHLRKKLVDSTDKADLRLIYLALAHMIKFRGHFLIEGDLNPDNSDVDKLFIQLVQTYNQLFEENPINASGVDAKAILSARLSKSRRLENLIAQLPGEKKNGLFGNLIALSLGLTPNFKSNFDLAEDAKLQLSKDTYDDDLDNLLAQIGDQYADLFLAAKNLSDAILLSDILRVNTEITKAPLSASMIKRYDEHHQDLTLLKALVRQQLPEKYKEIFFDQSKNGYAGYIDGGASQEEFYKFIKPILEKMDGTEELLVKLNREDLLRKQRTFDNGSIPHQIHLGELHAILRRQEDFYPFLKDNREKIEKILTFRIPYYVGPLARGNSRFAWMTRKSEETITPWNFEEVVDKGASAQSFIERMTNFDKNLPNEKVLPKHSLLYEYFTVYNELTKVKYVTEGMRKPAFLSGEQKKAIVDLLFKTNRKVTVKQLKEDYFKKIECFDSVEISGVEDRFNASLGTYHDLLKIIKDKDFLDNEENEDILEDIVLTLTLFEDREMIEERLKTYAHLFDDKVMKQLKRRRYTGWGRLSRKLINGIRDKQSGKTILDFLKSDGFANRNFMQLIHDDSLTFKEDIQKAQVSGQGDSLHEHIANLAGSPAIKKGILQTVKVVDELVKVMGRHKPENIVIEMARENQTTQKGQKNSRERMKRIEEGIKELGSQILKEHPVENTQLQNEKLYLYYLQNGRDMYVDQELDINRLSDYDVDHIVPQSFLKDDSIDNKVLTRSDKARGKSDNVPSEEVVKKMKNYWRQLLNAKLITQRKFDNLTKAERGGLSELDKAGFIKRQLVETRQITKHVAQILDSRMNTKYDENDKLIREVKVITLKSKLVSDFRKDFQFYKVREINNYHHAHDAYLNAVVGTALIKKYPKLESEFVYGDYKVYDVRKMIAKSEQEIGKATAKYFFYSNIMNFFKTEITLANGEIRKRPLIETNGETGEIVWDKGRDFATVRKVLSMPQVNIVKKTEVQTGGFSKESILPKRNSDKLIARKKDWDPKKYGGFDSPTVAYSVLVVAKVEKGKSKKLKSVKELLGITIMERSSFEKNPIDFLEAKGYKEVKKDLIIKLPKYSLFELENGRKRMLASAGELQKGNELALPSKYVNFLYLASHYEKLKGSPEDNEQKQLFVEQHKHYLDEIIEQISEFSKRVILADANLDKVLSAYNKHRDKPIREQAENIIHLFTLTNLGAPAAFKYFDTTIDRKRYTSTKEVLDATLIHQSITGLYETRIDLSQLGGDGGGGSGSSGGTLNIEDEYRLHETSKGPDVPLGSTWLSDFPQAWAETGGMGLAFRQAPLIISLKATSTPVSIKQYPMSQEARLGIKPHIQRLLDQGILVPCQSPWNTPLLPVKKPGTNDYRPVQDLREVNKRVEDIHPTVPNPYNLLSGLPPSHQWYTVLDLKDAFFCLRLHPTSQSLFAFEWKDPEMGISGQLTWTRLPQGFKNSPTLFNEALHRDLADFRIQHPDLILLQYVDDLLLAATSELDCQQGTRALLQTLGDLGYRASAKKAQICQKQVKYLGYLLKEGQRWLTEARKETVMGQPTPKTPRQLREFLGKAGLCRLFIPGFAEMAAPLYPLTKPGTLFKWGPDQQKAYQEIKQALLTAPALGLPDLTKPFELFVDEKQGYAKGVLTQKLGPWRRPVAYLSKKLDPVAAGWPPCLRMVAAIAVLTKDVGKLTMGQPLVILAPHAVEALVKQPPDRWLSNARMTHYQALLLDTDRVQFGPIVALNPATLLPLPEEGLQHDCLDILAEAHGTRPDLTDQPLPDADHTWYTDGSSFLQEGQRRAGAAVTTETEVIWAKALPAGTSAQRAELIALTQALKMAAGKKLNVYTDSRYAFATAHIHGEIYRRRGWLTSEGKEIKNKDEILALLKALFLPKRLSIIHCPGHQKGNHAEARGNRMADQAAREVATRETPETSTLLAGKRTADGSEFEKRTADGSEFESPKKKAKVE

SEQ ID NO: 2440 - protein, 2096 aa, synthetic construct
MPAAKRVKLDGGDKKYSIGLDIGTNSVGWAVITDEYKVPSKKFKVLGNTDRHSIKKNLIGALLFDSGETAEATRLKRTARRRYTRRKNRICYLQEIFSNEMAKVDDSFFHRLEESFLVEEDKKHERHPIFGNIVDEVAYHEKYPTIYHLRKKLVDSTDKADLRLIYLALAHMIKFRGHFLIEGDLNPDNSDVDKLFIQLVQTYNQLFEENPINASGVDAKAILSARLSKSRRLENLIAQLPGEKKNGLFGNLIALSLGLTPNFKSNFDLAEDAKLQLSKDTYDDDLDNLLAQIGDQYADLFLAAKNLSDAILLSDILRVNTEITKAPLSASMIKRYDEHHQDLTLLKALVRQQLPEKYKEIFFDQSKNGYAGYIDGGASQEEFYKFIKPILEKMDGTEELLVKLNREDLLRKQRTFDNGSIPHQIHLGELHAILRRQEDFYPFLKDNREKIEKILTFRIPYYVGPLARGNSRFAWMTRKSEETITPWNFEEVVDKGASAQSFIERMTNFDKNLPNEKVLPKHSLLYEYFTVYNELTKVKYVTEGMRKPAFLSGEQKKAIVDLLFKTNRKVTVKQLKEDYFKKIECFDSVEISGVEDRFNASLGTYHDLLKIIKDKDFLDNEENEDILEDIVLTLTLFEDREMIEERLKTYAHLFDDKVMKQLKRRRYTGWGRLSRKLINGIRDKQSGKTILDFLKSDGFANRNFMQLIHDDSLTFKEDIQKAQVSGQGDSLHEHIANLAGSPAIKKGILQTVKVVDELVKVMGRHKPENIVIEMARENQTTQKGQKNSRERMKRIEEGIKELGSQILKEHPVENTQLQNEKLYLYYLQNGRDMYVDQELDINRLSDYDVDHIVPQSFLKDDSIDNKVLTRSDKARGKSDNVPSEEVVKKMKNYWRQLLNAKLITQRKFDNLTKAERGGLSELDKAGFIKRQLVETRQITKHVAQILDSRMNTKYDENDKLIREVKVITLKSKLVSDFRKDFQFYKVREINNYHHAHDAYLNAVVGTALIKKYPKLESEFVYGDYKVYDVRKMIAKSEQEIGKATAKYFFYSNIMNFFKTEITLANGEIRKRPLIETNGETGEIVWDKGRDFATVRKVLSMPQVNIVKKTEVQTGGFSKESILPKRNSDKLIARKKDWDPKKYGGFDSPTVAYSVLVVAKVEKGKSKKLKSVKELLGITIMERSSFEKNPIDFLEAKGYKEVKKDLIIKLPKYSLFELENGRKRMLASAGELQKGNELALPSKYVNFLYLASHYEKLKGSPEDNEQKQLFVEQHKHYLDEIIEQISEFSKRVILADANLDKVLSAYNKHRDKPIREQAENIIHLFTLTNLGAPAAFKYFDTTIDRKRYTSTKEVLDATLIHQSITGLYETRIDLSQLGGDGGPAPGGGEAAAKGGTLNIEDEYRLHETSKGPDVPLGSTWLSDFPQAWAETGGMGLAVRQAPLIIPLKATSTPVSIKQYPMSQEARLGIKPHIQRLLDQGILVPCQSPWNTPLLPVKKPGTNDYRPVQDLREVNKRVEDIHPTVPNPYNLLSGLPPSHQWYTVLDLKDAFFCLRLHPTSQSLFAFEWRDPEMGISGQLTWTRLPQGFKNSPTLFNEALHRDLADFRIQHPDLILLQYVDDLLLAATSELDCQQGTRALLQTLGDLGYRASAKKAQICQKQVKYLGYLLKEGQRWLTEARKETVMGQPTPKTPRQLREFLGTAGFCRLWIPGFAEMAAPLYPLTKPGTLFEWGPDQQKAYQEIKQALLTAPALGLPDLTKPFELFVDEKQGYAKGVLTQKLGPWRRPVAYLSKKLDPVAAGWPPCLRMVAAIAVLTKDAGKLTMGQPLVILAPHAVEALVKQPPDRWLSNARMTHYQALLLDTDRVQFGPIVALNPATLLPLPEEGLQHDCLDILAEAHGTRPDLTDQPLPDADHTWYTDGSSFLQEGQRKAGAAVTTETEVVWAKALPAGTSAQRAELIALTQALKMAEGKKLNVYTDSRYAFATAHIHGEIYRRRGWLTSEGKEIKNKDEILALLKALFLPKRLSIIHCPGHQKGNRAEARGNRMADQAAREVATRETPETSTLLAGKRTADGSEFEKRTADGSEFESPKKKAKVE

SEQ ID NO: 2441 - protein, 2110 aa, synthetic construct
MPAAKRVKLDGGDKKYSIGLDIGTNSVGWAVITDEYKVPSKKFKVLGNTDRHSIKKNLIGALLFDSGETAEATRLKRTARRRYTRRKNRICYLQEIFSNEMAKVDDSFFHRLEESFLVEEDKKHERHPIFGNIVDEVAYHEKYPTIYHLRKKLVDSTDKADLRLIYLALAHMIKFRGHFLIEGDLNPDNSDVDKLFIQLVQTYNQLFEENPINASGVDAKAILSARLSKSRRLENLIAQLPGEKKNGLFGNLIALSLGLTPNFKSNFDLAEDAKLQLSKDTYDDDLDNLLAQIGDQYADLFLAAKNLSDAILLSDILRVNTEITKAPLSASMIKRYDEHHQDLTLLKALVRQQLPEKYKEIFFDQSKNGYAGYIDGGASQEEFYKFIKPILEKMDGTEELLVKLNREDLLRKQRTFDNGSIPHQIHLGELHAILRRQEDFYPFLKDNREKIEKILTFRIPYYVGPLARGNSRFAWMTRKSEETITPWNFEEVVDKGASAQSFIERMTNFDKNLPNEKVLPKHSLLYEYFTVYNELTKVKYVTEGMRKPAFLSGEQKKAIVDLLFKTNRKVTVKQLKEDYFKKIECFDSVEISGVEDRFNASLGTYHDLLKIIKDKDFLDNEENEDILEDIVLTLTLFEDREMIEERLKTYAHLFDDKVMKQLKRRRYTGWGRLSRKLINGIRDKQSGKTILDFLKSDGFANRNFMQLIHDDSLTFKEDIQKAQVSGQGDSLHEHIANLAGSPAIKKGILQTVKVVDELVKVMGRHKPENIVIEMARENQTTQKGQKNSRERMKRIEEGIKELGSQILKEHPVENTQLQNEKLYLYYLQNGRDMYVDQELDINRLSDYDVDHIVPQSFLKDDSIDNKVLTRSDKARGKSDNVPSEEVVKKMKNYWRQLLNAKLITQRKFDNLTKAERGGLSELDKAGFIKRQLVETRQITKHVAQILDSRMNTKYDENDKLIREVKVITLKSKLVSDFRKDFQFYKVREINNYHHAHDAYLNAVVGTALIKKYPKLESEFVYGDYKVYDVRKMIAKSEQEIGKATAKYFFYSNIMNFFKTEITLANGEIRKRPLIETNGETGEIVWDKGRDFATVRKVLSMPQVNIVKKTEVQTGGFSKESILPKRNSDKLIARKKDWDPKKYGGFDSPTVAYSVLVVAKVEKGKSKKLKSVKELLGITIMERSSFEKNPIDFLEAKGYKEVKKDLIIKLPKYSLFELENGRKRMLASAGELQKGNELALPSKYVNFLYLASHYEKLKGSPEDNEQKQLFVEQHKHYLDEIIEQISEFSKRVILADANLDKVLSAYNKHRDKPIREQAENIIHLFTLTNLGAPAAFKYFDTTIDRKRYTSTKEVLDATLIHQSITGLYETRIDLSQLGGDGGGGGGSGGGGSGGGGSGGGGSGGGGSGGTLNIEDEYRLHETSKGPDVPLGSTWLSDFPQAWAETGGMGLAVRQAPLIIPLKATSTPVSIKQYPMSQEARLGIKPHIQRLLDQGILVPCQSPWNTPLLPVKKPGTNDYRPVQDLREVNKRVEDIHPTVPNPYNLLSGLPPSHQWYTVLDLKDAFFCLRLHPTSQSLFAFEWRDPEMGISGQLTWTRLPQGFKNSPTLFNEALHRDLADFRIQHPDLILLQYVDDLLLAATSELDCQQGTRALLQTLGDLGYRASAKKAQICQKQVKYLGYLLKEGQRWLTEARKETVMGQPTPKTPRQLREFLGTAGFCRLWIPGFAEMAAPLYPLTKPGTLFEWGPDQQKAYQEIKQALLTAPALGLPDLTKPFELFVDEKQGYAKGVLTQKLGPWRRPVAYLSKKLDPVAAGWPPCLRMVAAIAVLTKDAGKLTMGQPLVILAPHAVEALVKQPPDRWLSNARMTHYQALLLDTDRVQFGPIVALNPATLLPLPEEGLQHDCLDILAEAHGTRPDLTDQPLPDADHTWYTDGSSFLQEGQRKAGAAVTTETEVVWAKALPAGTSAQRAELIALTQALKMAEGKKLNVYTDSRYAFATAHIHGEIYRRRGWLTSEGKEIKNKDEILALLKALFLPKRLSIIHCPGHQKGNRAEARGNRMADQAAREVATRETPETSTLLAGKRTADGSEFEKRTADGSEFESPKKKAKVE

SEQ ID NO: 2442 - protein, 2088 aa, synthetic construct
MPAAKRVKLDGGDKKYSIGLDIGTNSVGWAVITDEYKVPSKKFKVLGNTDRHSIKKNLIGALLFDSGETAEATRLKRTARRRYTRRKNRICYLQEIFSNEMAKVDDSFFHRLEESFLVEEDKKHERHPIFGNIVDEVAYHEKYPTIYHLRKKLVDSTDKADLRLIYLALAHMIKFRGHFLIEGDLNPDNSDVDKLFIQLVQTYNQLFEENPINASGVDAKAILSARLSKSRRLENLIAQLPGEKKNGLFGNLIALSLGLTPNFKSNFDLAEDAKLQLSKDTYDDDLDNLLAQIGDQYADLFLAAKNLSDAILLSDILRVNTEITKAPLSASMIKRYDEHHQDLTLLKALVRQQLPEKYKEIFFDQSKNGYAGYIDGGASQEEFYKFIKPILEKMDGTEELLVKLNREDLLRKQRTFDNGSIPHQIHLGELHAILRRQEDFYPFLKDNREKIEKILTFRIPYYVGPLARGNSRFAWMTRKSEETITPWNFEEVVDKGASAQSFIERMTNFDKNLPNEKVLPKHSLLYEYFTVYNELTKVKYVTEGMRKPAFLSGEQKKAIVDLLFKTNRKVTVKQLKEDYFKKIECFDSVEISGVEDRFNASLGTYHDLLKIIKDKDFLDNEENEDILEDIVLTLTLFEDREMIEERLKTYAHLFDDKVMKQLKRRRYTGWGRLSRKLINGIRDKQSGKTILDFLKSDGFANRNFMQLIHDDSLTFKEDIQKAQVSGQGDSLHEHIANLAGSPAIKKGILQTVKVVDELVKVMGRHKPENIVIEMARENQTTQKGQKNSRERMKRIEEGIKELGSQILKEHPVENTQLQNEKLYLYYLQNGRDMYVDQELDINRLSDYDVDHIVPQSFLKDDSIDNKVLTRSDKARGKSDNVPSEEVVKKMKNYWRQLLNAKLITQRKFDNLTKAERGGLSELDKAGFIKRQLVETRQITKHVAQILDSRMNTKYDENDKLIREVKVITLKSKLVSDFRKDFQFYKVREINNYHHAHDAYLNAVVGTALIKKYPKLESEFVYGDYKVYDVRKMIAKSEQEIGKATAKYFFYSNIMNFFKTEITLANGEIRKRPLIETNGETGEIVWDKGRDFATVRKVLSMPQVNIVKKTEVQTGGFSKESILPKRNSDKLIARKKDWDPKKYGGFDSPTVAYSVLVVAKVEKGKSKKLKSVKELLGITIMERSSFEKNPIDFLEAKGYKEVKKDLIIKLPKYSLFELENGRKRMLASAGELQKGNELALPSKYVNFLYLASHYEKLKGSPEDNEQKQLFVEQHKHYLDEIIEQISEFSKRVILADANLDKVLSAYNKHRDKPIREQAENIIHLFTLTNLGAPAAFKYFDTTIDRKRYTSTKEVLDATLIHQSITGLYETRIDLSQLGGDGGPAPGGTLNIEDEYRLHETSKGPDVPLGSTWLSDFPQAWAETGGMGLAVRQAPLIIPLKATSTPVSIKQYPMSQEARLGIKPHIQRLLDQGILVPCQSPWNTPLLPVKKPGTNDYRPVQDLREVNKRVEDIHPTVPNPYNLLSGLPPSHQWYTVLDLKDAFFCLRLHPTSQSLFAFEWRDPEMGISGQLTWTRLPQGFKNSPTLFNEALHRDLADFRIQHPDLILLQYVDDLLLAATSELDCQQGTRALLQTLGDLGYRASAKKAQICQKQVKYLGYLLKEGQRWLTEARKETVMGQPTPKTPRQLREFLGTAGFCRLWIPGFAEMAAPLYPLTKPGTLFEWGPDQQKAYQEIKQALLTAPALGLPDLTKPFELFVDEKQGYAKGVLTQKLGPWRRPVAYLSKKLDPVAAGWPPCLRMVAAIAVLTKDAGKLTMGQPLVILAPHAVEALVKQPPDRWLSNARMTHYQALLLDTDRVQFGPIVALNPATLLPLPEEGLQHDCLDILAEAHGTRPDLTDQPLPDADHTWYTDGSSFLQEGQRKAGAAVTTETEVVWAKALPAGTSAQRAELIALTQALKMAEGKKLNVYTDSRYAFATAHIHGEIYRRRGWLTSEGKEIKNKDEILALLKALFLPKRLSIIHCPGHQKGNRAEARGNRMADQAAREVATRETPETSTLLAGKRTADGSEFEKRTADGSEFESPKKKAKVE

SEQ ID NO: 2443 - protein, 2100 aa, synthetic construct
MPAAKRVKLDGGDKKYSIGLDIGTNSVGWAVITDEYKVPSKKFKVLGNTDRHSIKKNLIGALLFDSGETAEATRLKRTARRRYTRRKNRICYLQEIFSNEMAKVDDSFFHRLEESFLVEEDKKHERHPIFGNIVDEVAYHEKYPTIYHLRKKLVDSTDKADLRLIYLALAHMIKFRGHFLIEGDLNPDNSDVDKLFIQLVQTYNQLFEENPINASGVDAKAILSARLSKSRRLENLIAQLPGEKKNGLFGNLIALSLGLTPNFKSNFDLAEDAKLQLSKDTYDDDLDNLLAQIGDQYADLFLAAKNLSDAILLSDILRVNTEITKAPLSASMIKRYDEHHQDLTLLKALVRQQLPEKYKEIFFDQSKNGYAGYIDGGASQEEFYKFIKPILEKMDGTEELLVKLNREDLLRKQRTFDNGSIPHQIHLGELHAILRRQEDFYPFLKDNREKIEKILTFRIPYYVGPLARGNSRFAWMTRKSEETITPWNFEEVVDKGASAQSFIERMTNFDKNLPNEKVLPKHSLLYEYFTVYNELTKVKYVTEGMRKPAFLSGEQKKAIVDLLFKTNRKVTVKQLKEDYFKKIECFDSVEISGVEDRFNASLGTYHDLLKIIKDKDFLDNEENEDILEDIVLTLTLFEDREMIEERLKTYAHLFDDKVMKQLKRRRYTGWGRLSRKLINGIRDKQSGKTILDFLKSDGFANRNFMQLIHDDSLTFKEDIQKAQVSGQGDSLHEHIANLAGSPAIKKGILQTVKVVDELVKVMGRHKPENIVIEMARENQTTQKGQKNSRERMKRIEEGIKELGSQILKEHPVENTQLQNEKLYLYYLQNGRDMYVDQELDINRLSDYDVDHIVPQSFLKDDSIDNKVLTRSDKARGKSDNVPSEEVVKKMKNYWRQLLNAKLITQRKFDNLTKAERGGLSELDKAGFIKRQLVETRQITKHVAQILDSRMNTKYDENDKLIREVKVITLKSKLVSDFRKDFQFYKVREINNYHHAHDAYLNAVVGTALIKKYPKLESEFVYGDYKVYDVRKMIAKSEQEIGKATAKYFFYSNIMNFFKTEITLANGEIRKRPLIETNGETGEIVWDKGRDFATVRKVLSMPQVNIVKKTEVQTGGFSKESILPKRNSDKLIARKKDWDPKKYGGFDSPTVAYSVLVVAKVEKGKSKKLKSVKELLGITIMERSSFEKNPIDFLEAKGYKEVKKDLIIKLPKYSLFELENGRKRMLASAGELQKGNELALPSKYVNFLYLASHYEKLKGSPEDNEQKQLFVEQHKHYLDEIIEQISEFSKRVILADANLDKVLSAYNKHRDKPIREQAENIIHLFTLTNLGAPAAFKYFDTTIDRKRYTSTKEVLDATLIHQSITGLYETRIDLSQLGGDGGGSSGSSGSSGSSGSSGGTLNIEDEYRLHETSKGPDVPLGSTWLSDFPQAWAETGGMGLAVRQAPLIIPLKATSTPVSIKQYPMSQEARLGIKPHIQRLLDQGILVPCQSPWNTPLLPVKKPGTNDYRPVQDLREVNKRVEDIHPTVPNPYNLLSGLPPSHQWYTVLDLKDAFFCLRLHPTSQSLFAFEWRDPEMGISGQLTWTRLPQGFKNSPTLFNEALHRDLADFRIQHPDLILLQYVDDLLLAATSELDCQQGTRALLQTLGDLGYRASAKKAQICQKQVKYLGYLLKEGQRWLTEARKETVMGQPTPKTPRQLREFLGTAGFCRLWIPGFAEMAAPLYPLTKPGTLFEWGPDQQKAYQEIKQALLTAPALGLPDLTKPFELFVDEKQGYAKGVLTQKLGPWRRPVAYLSKKLDPVAAGWPPCLRMVAAIAVLTKDAGKLTMGQPLVILAPHAVEALVKQPPDRWLSNARMTHYQALLLDTDRVQFGPIVALNPATLLPLPEEGLQHDCLDILAEAHGTRPDLTDQPLPDADHTWYTDGSSFLQEGQRKAGAAVTTETEVVWAKALPAGTSAQRAELIALTQALKMAEGKKLNVYTDSRYAFATAHIHGEIYRRRGWLTSEGKEIKNKDEILALLKALFLPKRLSIIHCPGHQKGNRAEARGNRMADQAAREVATRETPETSTLLAGKRTADGSEFEKRTADGSEFESPKKKAKVE

SEQ ID NO: 2444 - protein, 2096 aa, synthetic construct
MPAAKRVKLDGGDKKYSIGLDIGTNSVGWAVITDEYKVPSKKFKVLGNTDRHSIKKNLIGALLFDSGETAEATRLKRTARRRYTRRKNRICYLQEIFSNEMAKVDDSFFHRLEESFLVEEDKKHERHPIFGNIVDEVAYHEKYPTIYHLRKKLVDSTDKADLRLIYLALAHMIKFRGHFLIEGDLNPDNSDVDKLFIQLVQTYNQLFEENPINASGVDAKAILSARLSKSRRLENLIAQLPGEKKNGLFGNLIALSLGLTPNFKSNFDLAEDAKLQLSKDTYDDDLDNLLAQIGDQYADLFLAAKNLSDAILLSDILRVNTEITKAPLSASMIKRYDEHHQDLTLLKALVRQQLPEKYKEIFFDQSKNGYAGYIDGGASQEEFYKFIKPILEKMDGTEELLVKLNREDLLRKQRTFDNGSIPHQIHLGELHAILRRQEDFYPFLKDNREKIEKILTFRIPYYVGPLARGNSRFAWMTRKSEETITPWNFEEVVDKGASAQSFIERMTNFDKNLPNEKVLPKHSLLYEYFTVYNELTKVKYVTEGMRKPAFLSGEQKKAIVDLLFKTNRKVTVKQLKEDYFKKIECFDSVEISGVEDRFNASLGTYHDLLKIIKDKDFLDNEENEDILEDIVLTLTLFEDREMIEERLKTYAHLFDDKVMKQLKRRRYTGWGRLSRKLINGIRDKQSGKTILDFLKSDGFANRNFMQLIHDDSLTFKEDIQKAQVSGQGDSLHEHIANLAGSPAIKKGILQTVKVVDELVKVMGRHKPENIVIEMARENQTTQKGQKNSRERMKRIEEGIKELGSQILKEHPVENTQLQNEKLYLYYLQNGRDMYVDQELDINRLSDYDVDHIVPQSFLKDDSIDNKVLTRSDKARGKSDNVPSEEVVKKMKNYWRQLLNAKLITQRKFDNLTKAERGGLSELDKAGFIKRQLVETRQITKHVAQILDSRMNTKYDENDKLIREVKVITLKSKLVSDFRKDFQFYKVREINNYHHAHDAYLNAVVGTALIKKYPKLESEFVYGDYKVYDVRKMIAKSEQEIGKATAKYFFYSNIMNFFKTEITLANGEIRKRPLIETNGETGEIVWDKGRDFATVRKVLSMPQVNIVKKTEVQTGGFSKESILPKRNSDKLIARKKDWDPKKYGGFDSPTVAYSVLVVAKVEKGKSKKLKSVKELLGITIMERSSFEKNPIDFLEAKGYKEVKKDLIIKLPKYSLFELENGRKRMLASAGELQKGNELALPSKYVNFLYLASHYEKLKGSPEDNEQKQLFVEQHKHYLDEIIEQISEFSKRVILADANLDKVLSAYNKHRDKPIREQAENIIHLFTLTNLGAPAAFKYFDTTIDRKRYTSTKEVLDATLIHQSITGLYETRIDLSQLGGDGGEAAAKGSSGGSGGTLNIEDEYRLHETSKGPDVPLGSTWLSDFPQAWAETGGMGLAVRQAPLIIPLKATSTPVSIKQYPMSQEARLGIKPHIQRLLDQGILVPCQSPWNTPLLPVKKPGTNDYRPVQDLREVNKRVEDIHPTVPNPYNLLSGLPPSHQWYTVLDLKDAFFCLRLHPTSQSLFAFEWRDPEMGISGQLTWTRLPQGFKNSPTLFNEALHRDLADFRIQHPDLILLQYVDDLLLAATSELDCQQGTRALLQTLGDLGYRASAKKAQICQKQVKYLGYLLKEGQRWLTEARKETVMGQPTPKTPRQLREFLGTAGFCRLWIPGFAEMAAPLYPLTKPGTLFEWGPDQQKAYQEIKQALLTAPALGLPDLTKPFELFVDEKQGYAKGVLTQKLGPWRRPVAYLSKKLDPVAAGWPPCLRMVAAIAVLTKDAGKLTMGQPLVILAPHAVEALVKQPPDRWLSNARMTHYQALLLDTDRVQFGPIVALNPATLLPLPEEGLQHDCLDILAEAHGTRPDLTDQPLPDADHTWYTDGSSFLQEGQRKAGAAVTTETEVVWAKALPAGTSAQRAELIALTQALKMAEGKKLNVYTDSRYAFATAHIHGEIYRRRGWLTSEGKEIKNKDEILALLKALFLPKRLSIIHCPGHQKGNRAEARGNRMADQAAREVATRETPETSTLLAGKRTADGSEFEKRTADGSEFESPKKKAKVE

SEQ ID NO: 2445 - protein, 2091 aa, synthetic construct
MPAAKRVKLDGGDKKYSIGLDIGTNSVGWAVITDEYKVPSKKFKVLGNTDRHSIKKNLIGALLFDSGETAEATRLKRTARRRYTRRKNRICYLQEIFSNEMAKVDDSFFHRLEESFLVEEDKKHERHPIFGNIVDEVAYHEKYPTIYHLRKKLVDSTDKADLRLIYLALAHMIKFRGHFLIEGDLNPDNSDVDKLFIQLVQTYNQLFEENPINASGVDAKAILSARLSKSRRLENLIAQLPGEKKNGLFGNLIALSLGLTPNFKSNFDLAEDAKLQLSKDTYDDDLDNLLAQIGDQYADLFLAAKNLSDAILLSDILRVNTEITKAPLSASMIKRYDEHHQDLTLLKALVRQQLPEKYKEIFFDQSKNGYAGYIDGGASQEEFYKFIKPILEKMDGTEELLVKLNREDLLRKQRTFDNGSIPHQIHLGELHAILRRQEDFYPFLKDNREKIEKILTFRIPYYVGPLARGNSRFAWMTRKSEETITPWNFEEVVDKGASAQSFIERMTNFDKNLPNEKVLPKHSLLYEYFTVYNELTKVKYVTEGMRKPAFLSGEQKKAIVDLLFKTNRKVTVKQLKEDYFKKIECFDSVEISGVEDRFNASLGTYHDLLKIIKDKDFLDNEENEDILEDIVLTLTLFEDREMIEERLKTYAHLFDDKVMKQLKRRRYTGWGRLSRKLINGIRDKQSGKTILDFLKSDGFANRNFMQLIHDDSLTFKEDIQKAQVSGQGDSLHEHIANLAGSPAIKKGILQTVKVVDELVKVMGRHKPENIVIEMARENQTTQKGQKNSRERMKRIEEGIKELGSQILKEHPVENTQLQNEKLYLYYLQNGRDMYVDQELDINRLSDYDVDHIVPQSFLKDDSIDNKVLTRSDKARGKSDNVPSEEVVKKMKNYWRQLLNAKLITQRKFDNLTKAERGGLSELDKAGFIKRQLVETRQITKHVAQILDSRMNTKYDENDKLIREVKVITLKSKLVSDFRKDFQFYKVREINNYHHAHDAYLNAVVGTALIKKYPKLESEFVYGDYKVYDVRKMIAKSEQEIGKATAKYFFYSNIMNFFKTEITLANGEIRKRPLIETNGETGEIVWDKGRDFATVRKVLSMPQVNIVKKTEVQTGGFSKESILPKRNSDKLIARKKDWDPKKYGGFDSPTVAYSVLVVAKVEKGKSKKLKSVKELLGITIMERSSFEKNPIDFLEAKGYKEVKKDLIIKLPKYSLFELENGRKRMLASAGELQKGNELALPSKYVNFLYLASHYEKLKGSPEDNEQKQLFVEQHKHYLDEIIEQISEFSKRVILADANLDKVLSAYNKHRDKPIREQAENIIHLFTLTNLGAPAAFKYFDTTIDRKRYTSTKEVLDATLIHQSITGLYETRIDLSQLGGDGGGGGPAPGGTLNIEDEYRLHETSKGPDVPLGSTWLSDFPQAWAETGGMGLAVRQAPLIIPLKATSTPVSIKQYPMSQEARLGIKPHIQRLLDQGILVPCQSPWNTPLLPVKKPGTNDYRPVQDLREVNKRVEDIHPTVPNPYNLLSGLPPSHQWYTVLDLKDAFFCLRLHPTSQSLFAFEWRDPEMGISGQLTWTRLPQGFKNSPTLFNEALHRDLADFRIQHPDLILLQYVDDLLLAATSELDCQQGTRALLQTLGDLGYRASAKKAQICQKQVKYLGYLLKEGQRWLTEARKETVMGQPTPKTPRQLREFLGTAGFCRLWIPGFAEMAAPLYPLTKPGTLFEWGPDQQKAYQEIKQALLTAPALGLPDLTKPFELFVDEKQGYAKGVLTQKLGPWRRPVAYLSKKLDPVAAGWPPCLRMVAAIAVLTKDAGKLTMGQPLVILAPHAVEALVKQPPDRWLSNARMTHYQALLLDTDRVQFGPIVALNPATLLPLPEEGLQHDCLDILAEAHGTRPDLTDQPLPDADHTWYTDGSSFLQEGQRKAGAAVTTETEVVWAKALPAGTSAQRAELIALTQALKMAEGKKLNVYTDSRYAFATAHIHGEIYRRRGWLTSEGKEIKNKDEILALLKALFLPKRLSIIHCPGHQKGNRAEARGNRMADQAAREVATRETPETSTLLAGKRTADGSEFEKRTADGSEFESPKKKAKVE

SEQ ID NO: 2446 - protein, 2105 aa, synthetic construct
MPAAKRVKLDGGDKKYSIGLDIGTNSVGWAVITDEYKVPSKKFKVLGNTDRHSIKKNLIGALLFDSGETAEATRLKRTARRRYTRRKNRICYLQEIFSNEMAKVDDSFFHRLEESFLVEEDKKHERHPIFGNIVDEVAYHEKYPTIYHLRKKLVDSTDKADLRLIYLALAHMIKFRGHFLIEGDLNPDNSDVDKLFIQLVQTYNQLFEENPINASGVDAKAILSARLSKSRRLENLIAQLPGEKKNGLFGNLIALSLGLTPNFKSNFDLAEDAKLQLSKDTYDDDLDNLLAQIGDQYADLFLAAKNLSDAILLSDILRVNTEITKAPLSASMIKRYDEHHQDLTLLKALVRQQLPEKYKEIFFDQSKNGYAGYIDGGASQEEFYKFIKPILEKMDGTEELLVKLNREDLLRKQRTFDNGSIPHQIHLGELHAILRRQEDFYPFLKDNREKIEKILTFRIPYYVGPLARGNSRFAWMTRKSEETITPWNFEEVVDKGASAQSFIERMTNFDKNLPNEKVLPKHSLLYEYFTVYNELTKVKYVTEGMRKPAFLSGEQKKAIVDLLFKTNRKVTVKQLKEDYFKKIECFDSVEISGVEDRFNASLGTYHDLLKIIKDKDFLDNEENEDILEDIVLTLTLFEDREMIEERLKTYAHLFDDKVMKQLKRRRYTGWGRLSRKLINGIRDKQSGKTILDFLKSDGFANRNFMQLIHDDSLTFKEDIQKAQVSGQGDSLHEHIANLAGSPAIKKGILQTVKVVDELVKVMGRHKPENIVIEMARENQTTQKGQKNSRERMKRIEEGIKELGSQILKEHPVENTQLQNEKLYLYYLQNGRDMYVDQELDINRLSDYDVDHIVPQSFLKDDSIDNKVLTRSDKARGKSDNVPSEEVVKKMKNYWRQLLNAKLITQRKFDNLTKAERGGLSELDKAGFIKRQLVETRQITKHVAQILDSRMNTKYDENDKLIREVKVITLKSKLVSDFRKDFQFYKVREINNYHHAHDAYLNAVVGTALIKKYPKLESEFVYGDYKVYDVRKMIAKSEQEIGKATAKYFFYSNIMNFFKTEITLANGEIRKRPLIETNGETGEIVWDKGRDFATVRKVLSMPQVNIVKKTEVQTGGFSKESILPKRNSDKLIARKKDWDPKKYGGFDSPTVAYSVLVVAKVEKGKSKKLKSVKELLGITIMERSSFEKNPIDFLEAKGYKEVKKDLIIKLPKYSLFELENGRKRMLASAGELQKGNELALPSKYVNFLYLASHYEKLKGSPEDNEQKQLFVEQHKHYLDEIIEQISEFSKRVILADANLDKVLSAYNKHRDKPIREQAENIIHLFTLTNLGAPAAFKYFDTTIDRKRYTSTKEVLDATLIHQSITGLYETRIDLSQLGGDGGEAAAKEAAAKEAAAKEAAAKGGTLNIEDEYRLHETSKGPDVPLGSTWLSDFPQAWAETGGMGLAVRQAPLIIPLKATSTPVSIKQYPMSQEARLGIKPHIQRLLDQGILVPCQSPWNTPLLPVKKPGTNDYRPVQDLREVNKRVEDIHPTVPNPYNLLSGLPPSHQWYTVLDLKDAFFCLRLHPTSQSLFAFEWRDPEMGISGQLTWTRLPQGFKNSPTLFNEALHRDLADFRIQHPDLILLQYVDDLLLAATSELDCQQGTRALLQTLGDLGYRASAKKAQICQKQVKYLGYLLKEGQRWLTEARKETVMGQPTPKTPRQLREFLGTAGFCRLWIPGFAEMAAPLYPLTKPGTLFEWGPDQQKAYQEIKQALLTAPALGLPDLTKPFELFVDEKQGYAKGVLTQKLGPWRRPVAYLSKKLDPVAAGWPPCLRMVAAIAVLTKDAGKLTMGQPLVILAPHAVEALVKQPPDRWLSNARMTHYQALLLDTDRVQFGPIVALNPATLLPLPEEGLQHDCLDILAEAHGTRPDLTDQPLPDADHTWYTDGSSFLQEGQRKAGAAVTTETEVVWAKALPAGTSAQRAELIALTQALKMAEGKKLNVYTDSRYAFATAHIHGEIYRRRGWLTSEGKEIKNKDEILALLKALFLPKRLSIIHCPGHQKGNRAEARGNRMADQAAREVATRETPETSTLLAGKRTADGSEFEKRTADGSEFESPKKKAKVE

SEQ ID NO: 2447 - protein, 2096 aa, synthetic construct
MPAAKRVKLDGGDKKYSIGLDIGTNSVGWAVITDEYKVPSKKFKVLGNTDRHSIKKNLIGALLFDSGETAEATRLKRTARRRYTRRKNRICYLQEIFSNEMAKVDDSFFHRLEESFLVEEDKKHERHPIFGNIVDEVAYHEKYPTIYHLRKKLVDSTDKADLRLIYLALAHMIKFRGHFLIEGDLNPDNSDVDKLFIQLVQTYNQLFEENPINASGVDAKAILSARLSKSRRLENLIAQLPGEKKNGLFGNLIALSLGLTPNFKSNFDLAEDAKLQLSKDTYDDDLDNLLAQIGDQYADLFLAAKNLSDAILLSDILRVNTEITKAPLSASMIKRYDEHHQDLTLLKALVRQQLPEKYKEIFFDQSKNGYAGYIDGGASQEEFYKFIKPILEKMDGTEELLVKLNREDLLRKQRTFDNGSIPHQIHLGELHAILRRQEDFYPFLKDNREKIEKILTFRIPYYVGPLARGNSRFAWMTRKSEETITPWNFEEVVDKGASAQSFIERMTNFDKNLPNEKVLPKHSLLYEYFTVYNELTKVKYVTEGMRKPAFLSGEQKKAIVDLLFKTNRKVTVKQLKEDYFKKIECFDSVEISGVEDRFNASLGTYHDLLKIIKDKDFLDNEENEDILEDIVLTLTLFEDREMIEERLKTYAHLFDDKVMKQLKRRRYTGWGRLSRKLINGIRDKQSGKTILDFLKSDGFANRNFMQLIHDDSLTFKEDIQKAQVSGQGDSLHEHIANLAGSPAIKKGILQTVKVVDELVKVMGRHKPENIVIEMARENQTTQKGQKNSRERMKRIEEGIKELGSQILKEHPVENTQLQNEKLYLYYLQNGRDMYVDQELDINRLSDYDVDHIVPQSFLKDDSIDNKVLTRSDKARGKSDNVPSEEVVKKMKNYWRQLLNAKLITQRKFDNLTKAERGGLSELDKAGFIKRQLVETRQITKHVAQILDSRMNTKYDENDKLIREVKVITLKSKLVSDFRKDFQFYKVREINNYHHAHDAYLNAVVGTALIKKYPKLESEFVYGDYKVYDVRKMIAKSEQEIGKATAKYFFYSNIMNFFKTEITLANGEIRKRPLIETNGETGEIVWDKGRDFATVRKVLSMPQVNIVKKTEVQTGGFSKESILPKRNSDKLIARKKDWDPKKYGGFDSPTVAYSVLVVAKVEKGKSKKLKSVKELLGITIMERSSFEKNPIDFLEAKGYKEVKKDLIIKLPKYSLFELENGRKRMLASAGELQKGNELALPSKYVNFLYLASHYEKLKGSPEDNEQKQLFVEQHKHYLDEIIEQISEFSKRVILADANLDKVLSAYNKHRDKPIREQAENIIHLFTLTNLGAPAAFKYFDTTIDRKRYTSTKEVLDATLIHQSITGLYETRIDLSQLGGDGGGGSPAPEAAAKGGTLNIEDEYRLHETSKGPDVPLGSTWLSDFPQAWAETGGMGLAVRQAPLIIPLKATSTPVSIKQYPMSQEARLGIKPHIQRLLDQGILVPCQSPWNTPLLPVKKPGTNDYRPVQDLREVNKRVEDIHPTVPNPYNLLSGLPPSHQWYTVLDLKDAFFCLRLHPTSQSLFAFEWRDPEMGISGQLTWTRLPQGFKNSPTLFNEALHRDLADFRIQHPDLILLQYVDDLLLAATSELDCQQGTRALLQTLGDLGYRASAKKAQICQKQVKYLGYLLKEGQRWLTEARKETVMGQPTPKTPRQLREFLGTAGFCRLWIPGFAEMAAPLYPLTKPGTLFEWGPDQQKAYQEIKQALLTAPALGLPDLTKPFELFVDEKQGYAKGVLTQKLGPWRRPVAYLSKKLDPVAAGWPPCLRMVAAIAVLTKDAGKLTMGQPLVILAPHAVEALVKQPPDRWLSNARMTHYQALLLDTDRVQFGPIVALNPATLLPLPEEGLQHDCLDILAEAHGTRPDLTDQPLPDADHTWYTDGSSFLQEGQRKAGAAVTTETEVVWAKALPAGTSAQRAELIALTQALKMAEGKKLNVYTDSRYAFATAHIHGEIYRRRGWLTSEGKEIKNKDEILALLKALFLPKRLSIIHCPGHQKGNRAEARGNRMADQAAREVATRETPETSTLLAGKRTADGSEFEKRTADGSEFESPKKKAKVE

SEQ ID NO: 2448 - protein, 2090 aa, synthetic construct
MPAAKRVKLDGGDKKYSIGLDIGTNSVGWAVITDEYKVPSKKFKVLGNTDRHSIKKNLIGALLFDSGETAEATRLKRTARRRYTRRKNRICYLQEIFSNEMAKVDDSFFHRLEESFLVEEDKKHERHPIFGNIVDEVAYHEKYPTIYHLRKKLVDSTDKADLRLIYLALAHMIKFRGHFLIEGDLNPDNSDVDKLFIQLVQTYNQLFEENPINASGVDAKAILSARLSKSRRLENLIAQLPGEKKNGLFGNLIALSLGLTPNFKSNFDLAEDAKLQLSKDTYDDDLDNLLAQIGDQYADLFLAAKNLSDAILLSDILRVNTEITKAPLSASMIKRYDEHHQDLTLLKALVRQQLPEKYKEIFFDQSKNGYAGYIDGGASQEEFYKFIKPILEKMDGTEELLVKLNREDLLRKQRTFDNGSIPHQIHLGELHAILRRQEDFYPFLKDNREKIEKILTFRIPYYVGPLARGNSRFAWMTRKSEETITPWNFEEVVDKGASAQSFIERMTNFDKNLPNEKVLPKHSLLYEYFTVYNELTKVKYVTEGMRKPAFLSGEQKKAIVDLLFKTNRKVTVKQLKEDYFKKIECFDSVEISGVEDRFNASLGTYHDLLKIIKDKDFLDNEENEDILEDIVLTLTLFEDREMIEERLKTYAHLFDDKVMKQLKRRRYTGWGRLSRKLINGIRDKQSGKTILDFLKSDGFANRNFMQLIHDDSLTFKEDIQKAQVSGQGDSLHEHIANLAGSPAIKKGILQTVKVVDELVKVMGRHKPENIVIEMARENQTTQKGQKNSRERMKRIEEGIKELGSQILKEHPVENTQLQNEKLYLYYLQNGRDMYVDQELDINRLSDYDVDHIVPQSFLKDDSIDNKVLTRSDKARGKSDNVPSEEVVKKMKNYWRQLLNAKLITQRKFDNLTKAERGGLSELDKAGFIKRQLVETRQITKHVAQILDSRMNTKYDENDKLIREVKVITLKSKLVSDFRKDFQFYKVREINNYHHAHDAYLNAVVGTALIKKYPKLESEFVYGDYKVYDVRKMIAKSEQEIGKATAKYFFYSNIMNFFKTEITLANGEIRKRPLIETNGETGEIVWDKGRDFATVRKVLSMPQVNIVKKTEVQTGGFSKESILPKRNSDKLIARKKDWDPKKYGGFDSPTVAYSVLVVAKVEKGKSKKLKSVKELLGITIMERSSFEKNPIDFLEAKGYKEVKKDLIIKLPKYSLFELENGRKRMLASAGELQKGNELALPSKYVNFLYLASHYEKLKGSPEDNEQKQLFVEQHKHYLDEIIEQISEFSKRVILADANLDKVLSAYNKHRDKPIREQAENIIHLFTLTNLGAPAAFKYFDTTIDRKRYTSTKEVLDATLIHQSITGLYETRIDLSQLGGDGGPAPAPGGTLNIEDEYRLHETSKGPDVPLGSTWLSDFPQAWAETGGMGLAVRQAPLIIPLKATSTPVSIKQYPMSQEARLGIKPHIQRLLDQGILVPCQSPWNTPLLPVKKPGTNDYRPVQDLREVNKRVEDIHPTVPNPYNLLSGLPPSHQWYTVLDLKDAFFCLRLHPTSQSLFAFEWRDPEMGISGQLTWTRLPQGFKNSPTLFNEALHRDLADFRIQHPDLILLQYVDDLLLAATSELDCQQGTRALLQTLGDLGYRASAKKAQICQKQVKYLGYLLKEGQRWLTEARKETVMGQPTPKTPRQLREFLGTAGFCRLWIPGFAEMAAPLYPLTKPGTLFEWGPDQQKAYQEIKQALLTAPALGLPDLTKPFELFVDEKQGYAKGVLTQKLGPWRRPVAYLSKKLDPVAAGWPPCLRMVAAIAVLTKDAGKLTMGQPLVILAPHAVEALVKQPPDRWLSNARMTHYQALLLDTDRVQFGPIVALNPATLLPLPEEGLQHDCLDILAEAHGTRPDLTDQPLPDADHTWYTDGSSFLQEGQRKAGAAVTTETEVVWAKALPAGTSAQRAELIALTQALKMAEGKKLNVYTDSRYAFATAHIHGEIYRRRGWLTSEGKEIKNKDEILALLKALFLPKRLSIIHCPGHQKGNRAEARGNRMADQAAREVATRETPETSTLLAGKRTADGSEFEKRTADGSEFESPKKKAKVE

SEQ ID NO: 2449 - protein, 2098 aa, synthetic construct
MPAAKRVKLDGGDKKYSIGLDIGTNSVGWAVITDEYKVPSKKFKVLGNTDRHSIKKNLIGALLFDSGETAEATRLKRTARRRYTRRKNRICYLQEIFSNEMAKVDDSFFHRLEESFLVEEDKKHERHPIFGNIVDEVAYHEKYPTIYHLRKKLVDSTDKADLRLIYLALAHMIKFRGHFLIEGDLNPDNSDVDKLFIQLVQTYNQLFEENPINASGVDAKAILSARLSKSRRLENLIAQLPGEKKNGLFGNLIALSLGLTPNFKSNFDLAEDAKLQLSKDTYDDDLDNLLAQIGDQYADLFLAAKNLSDAILLSDILRVNTEITKAPLSASMIKRYDEHHQDLTLLKALVRQQLPEKYKEIFFDQSKNGYAGYIDGGASQEEFYKFIKPILEKMDGTEELLVKLNREDLLRKQRTFDNGSIPHQIHLGELHAILRRQEDFYPFLKDNREKIEKILTFRIPYYVGPLARGNSRFAWMTRKSEETITPWNFEEVVDKGASAQSFIERMTNFDKNLPNEKVLPKHSLLYEYFTVYNELTKVKYVTEGMRKPAFLSGEQKKAIVDLLFKTNRKVTVKQLKEDYFKKIECFDSVEISGVEDRFNASLGTYHDLLKIIKDKDFLDNEENEDILEDIVLTLTLFEDREMIEERLKTYAHLFDDKVMKQLKRRRYTGWGRLSRKLINGIRDKQSGKTILDFLKSDGFANRNFMQLIHDDSLTFKEDIQKAQVSGQGDSLHEHIANLAGSPAIKKGILQTVKVVDELVKVMGRHKPENIVIEMARENQTTQKGQKNSRERMKRIEEGIKELGSQILKEHPVENTQLQNEKLYLYYLQNGRDMYVDQELDINRLSDYDVDHIVPQSFLKDDSIDNKVLTRSDKARGKSDNVPSEEVVKKMKNYWRQLLNAKLITQRKFDNLTKAERGGLSELDKAGFIKRQLVETRQITKHVAQILDSRMNTKYDENDKLIREVKVITLKSKLVSDFRKDFQFYKVREINNYHHAHDAYLNAVVGTALIKKYPKLESEFVYGDYKVYDVRKMIAKSEQEIGKATAKYFFYSNIMNFFKTEITLANGEIRKRPLIETNGETGEIVWDKGRDFATVRKVLSMPQVNIVKKTEVQTGGFSKESILPKRNSDKLIARKKDWDPKKYGGFDSPTVAYSVLVVAKVEKGKSKKLKSVKELLGITIMERSSFEKNPIDFLEAKGYKEVKKDLIIKLPKYSLFELENGRKRMLASAGELQKGNELALPSKYVNFLYLASHYEKLKGSPEDNEQKQLFVEQHKHYLDEIIEQISEFSKRVILADANLDKVLSAYNKHRDKPIREQAENIIHLFTLTNLGAPAAFKYFDTTIDRKRYTSTKEVLDATLIHQSITGLYETRIDLSQLGGDGGPAPAPAPAPAPAPGGTLNIEDEYRLHETSKGPDVPLGSTWLSDFPQAWAETGGMGLAVRQAPLIIPLKATSTPVSIKQYPMSQEARLGIKPHIQRLLDQGILVPCQSPWNTPLLPVKKPGTNDYRPVQDLREVNKRVEDIHPTVPNPYNLLSGLPPSHQWYTVLDLKDAFFCLRLHPTSQSLFAFEWRDPEMGISGQLTWTRLPQGFKNSPTLFNEALHRDLADFRIQHPDLILLQYVDDLLLAATSELDCQQGTRALLQTLGDLGYRASAKKAQICQKQVKYLGYLLKEGQRWLTEARKETVMGQPTPKTPRQLREFLGTAGFCRLWIPGFAEMAAPLYPLTKPGTLFEWGPDQQKAYQEIKQALLTAPALGLPDLTKPFELFVDEKQGYAKGVLTQKLGPWRRPVAYLSKKLDPVAAGWPPCLRMVAAIAVLTKDAGKLTMGQPLVILAPHAVEALVKQPPDRWLSNARMTHYQALLLDTDRVQFGPIVALNPATLLPLPEEGLQHDCLDILAEAHGTRPDLTDQPLPDADHTWYTDGSSFLQEGQRKAGAAVTTETEVVWAKALPAGTSAQRAELIALTQALKMAEGKKLNVYTDSRYAFATAHIHGEIYRRRGWLTSEGKEIKNKDEILALLKALFLPKRLSIIHCPGHQKGNRAEARGNRMADQAAREVATRETPETSTLLAGKRTADGSEFEKRTADGSEFESPKKKAKVE

SEQ ID NO: 2450 - protein, 2092 aa, synthetic construct
MPAAKRVKLDGGDKKYSIGLDIGTNSVGWAVITDEYKVPSKKFKVLGNTDRHSIKKNLIGALLFDSGETAEATRLKRTARRRYTRRKNRICYLQEIFSNEMAKVDDSFFHRLEESFLVEEDKKHERHPIFGNIVDEVAYHEKYPTIYHLRKKLVDSTDKADLRLIYLALAHMIKFRGHFLIEGDLNPDNSDVDKLFIQLVQTYNQLFEENPINASGVDAKAILSARLSKSRRLENLIAQLPGEKKNGLFGNLIALSLGLTPNFKSNFDLAEDAKLQLSKDTYDDDLDNLLAQIGDQYADLFLAAKNLSDAILLSDILRVNTEITKAPLSASMIKRYDEHHQDLTLLKALVRQQLPEKYKEIFFDQSKNGYAGYIDGGASQEEFYKFIKPILEKMDGTEELLVKLNREDLLRKQRTFDNGSIPHQIHLGELHAILRRQEDFYPFLKDNREKIEKILTFRIPYYVGPLARGNSRFAWMTRKSEETITPWNFEEVVDKGASAQSFIERMTNFDKNLPNEKVLPKHSLLYEYFTVYNELTKVKYVTEGMRKPAFLSGEQKKAIVDLLFKTNRKVTVKQLKEDYFKKIECFDSVEISGVEDRFNASLGTYHDLLKIIKDKDFLDNEENEDILEDIVLTLTLFEDREMIEERLKTYAHLFDDKVMKQLKRRRYTGWGRLSRKLINGIRDKQSGKTILDFLKSDGFANRNFMQLIHDDSLTFKEDIQKAQVSGQGDSLHEHIANLAGSPAIKKGILQTVKVVDELVKVMGRHKPENIVIEMARENQTTQKGQKNSRERMKRIEEGIKELGSQILKEHPVENTQLQNEKLYLYYLQNGRDMYVDQELDINRLSDYDVDHIVPQSFLKDDSIDNKVLTRSDKARGKSDNVPSEEVVKKMKNYWRQLLNAKLITQRKFDNLTKAERGGLSELDKAGFIKRQLVETRQITKHVAQILDSRMNTKYDENDKLIREVKVITLKSKLVSDFRKDFQFYKVREINNYHHAHDAYLNAVVGTALIKKYPKLESEFVYGDYKVYDVRKMIAKSEQEIGKATAKYFFYSNIMNFFKTEITLANGEIRKRPLIETNGETGEIVWDKGRDFATVRKVLSMPQVNIVKKTEVQTGGFSKESILPKRNSDKLIARKKDWDPKKYGGFDSPTVAYSVLVVAKVEKGKSKKLKSVKELLGITIMERSSFEKNPIDFLEAKGYKEVKKDLIIKLPKYSLFELENGRKRMLASAGELQKGNELALPSKYVNFLYLASHYEKLKGSPEDNEQKQLFVEQHKHYLDEIIEQISEFSKRVILADANLDKVLSAYNKHRDKPIREQAENIIHLFTLTNLGAPAAFKYFDTTIDRKRYTSTKEVLDATLIHQSITGLYETRIDLSQLGGDGGGGGGGGGGGTLNIEDEYRLHETSKGPDVPLGSTWLSDFPQAWAETGGMGLAVRQAPLIIPLKATSTPVSIKQYPMSQEARLGIKPHIQRLLDQGILVPCQSPWNTPLLPVKKPGTNDYRPVQDLREVNKRVEDIHPTVPNPYNLLSGLPPSHQWYTVLDLKDAFFCLRLHPTSQSLFAFEWRDPEMGISGQLTWTRLPQGFKNSPTLFNEALHRDLADFRIQHPDLILLQYVDDLLLAATSELDCQQGTRALLQTLGDLGYRASAKKAQICQKQVKYLGYLLKEGQRWLTEARKETVMGQPTPKTPRQLREFLGTAGFCRLWIPGFAEMAAPLYPLTKPGTLFEWGPDQQKAYQEIKQALLTAPALGLPDLTKPFELFVDEKQGYAKGVLTQKLGPWRRPVAYLSKKLDPVAAGWPPCLRMVAAIAVLTKDAGKLTMGQPLVILAPHAVEALVKQPPDRWLSNARMTHYQALLLDTDRVQFGPIVALNPATLLPLPEEGLQHDCLDILAEAHGTRPDLTDQPLPDADHTWYTDGSSFLQEGQRKAGAAVTTETEVVWAKALPAGTSAQRAELIALTQALKMAEGKKLNVYTDSRYAFATAHIHGEIYRRRGWLTSEGKEIKNKDEILALLKALFLPKRLSIIHCPGHQKGNRAEARGNRMADQAAREVATRETPETSTLLAGKRTADGSEFEKRTADGSEFESPKKKAKVE

SEQ ID NO: 2451 - protein, 2093 aa, synthetic construct
MPAAKRVKLDGGDKKYSIGLDIGTNSVGWAVITDEYKVPSKKFKVLGNTDRHSIKKNLIGALLFDSGETAEATRLKRTARRRYTRRKNRICYLQEIFSNEMAKVDDSFFHRLEESFLVEEDKKHERHPIFGNIVDEVAYHEKYPTIYHLRKKLVDSTDKADLRLIYLALAHMIKFRGHFLIEGDLNPDNSDVDKLFIQLVQTYNQLFEENPINASGVDAKAILSARLSKSRRLENLIAQLPGEKKNGLFGNLIALSLGLTPNFKSNFDLAEDAKLQLSKDTYDDDLDNLLAQIGDQYADLFLAAKNLSDAILLSDILRVNTEITKAPLSASMIKRYDEHHQDLTLLKALVRQQLPEKYKEIFFDQSKNGYAGYIDGGASQEEFYKFIKPILEKMDGTEELLVKLNREDLLRKQRTFDNGSIPHQIHLGELHAILRRQEDFYPFLKDNREKIEKILTFRIPYYVGPLARGNSRFAWMTRKSEETITPWNFEEVVDKGASAQSFIERMTNFDKNLPNEKVLPKHSLLYEYFTVYNELTKVKYVTEGMRKPAFLSGEQKKAIVDLLFKTNRKVTVKQLKEDYFKKIECFDSVEISGVEDRFNASLGTYHDLLKIIKDKDFLDNEENEDILEDIVLTLTLFEDREMIEERLKTYAHLFDDKVMKQLKRRRYTGWGRLSRKLINGIRDKQSGKTILDFLKSDGFANRNFMQLIHDDSLTFKEDIQKAQVSGQGDSLHEHIANLAGSPAIKKGILQTVKVVDELVKVMGRHKPENIVIEMARENQTTQKGQKNSRERMKRIEEGIKELGSQILKEHPVENTQLQNEKLYLYYLQNGRDMYVDQELDINRLSDYDVDHIVPQSFLKDDSIDNKVLTRSDKARGKSDNVPSEEVVKKMKNYWRQLLNAKLITQRKFDNLTKAERGGLSELDKAGFIKRQLVETRQITKHVAQILDSRMNTKYDENDKLIREVKVITLKSKLVSDFRKDFQFYKVREINNYHHAHDAYLNAVVGTALIKKYPKLESEFVYGDYKVYDVRKMIAKSEQEIGKATAKYFFYSNIMNFFKTEITLANGEIRKRPLIETNGETGEIVWDKGRDFATVRKVLSMPQVNIVKKTEVQTGGFSKESILPKRNSDKLIARKKDWDPKKYGGFDSPTVAYSVLVVAKVEKGKSKKLKSVKELLGITIMERSSFEKNPIDFLEAKGYKEVKKDLIIKLPKYSLFELENGRKRMLASAGELQKGNELALPSKYVNFLYLASHYEKLKGSPEDNEQKQLFVEQHKHYLDEIIEQISEFSKRVILADANLDKVLSAYNKHRDKPIREQAENIIHLFTLTNLGAPAAFKYFDTTIDRKRYTSTKEVLDATLIHQSITGLYETRIDLSQLGGDGGEAAAKGSSGGTLNIEDEYRLHETSKGPDVPLGSTWLSDFPQAWAETGGMGLAVRQAPLIIPLKATSTPVSIKQYPMSQEARLGIKPHIQRLLDQGILVPCQSPWNTPLLPVKKPGTNDYRPVQDLREVNKRVEDIHPTVPNPYNLLSGLPPSHQWYTVLDLKDAFFCLRLHPTSQSLFAFEWRDPEMGISGQLTWTRLPQGFKNSPTLFNEALHRDLADFRIQHPDLILLQYVDDLLLAATSELDCQQGTRALLQTLGDLGYRASAKKAQICQKQVKYLGYLLKEGQRWLTEARKETVMGQPTPKTPRQLREFLGTAGFCRLWIPGFAEMAAPLYPLTKPGTLFEWGPDQQKAYQEIKQALLTAPALGLPDLTKPFELFVDEKQGYAKGVLTQKLGPWRRPVAYLSKKLDPVAAGWPPCLRMVAAIAVLTKDAGKLTMGQPLVILAPHAVEALVKQPPDRWLSNARMTHYQALLLDTDRVQFGPIVALNPATLLPLPEEGLQHDCLDILAEAHGTRPDLTDQPLPDADHTWYTDGSSFLQEGQRKAGAAVTTETEVVWAKALPAGTSAQRAELIALTQALKMAEGKKLNVYTDSRYAFATAHIHGEIYRRRGWLTSEGKEIKNKDEILALLKALFLPKRLSIIHCPGHQKGNRAEARGNRMADQAAREVATRETPETSTLLAGKRTADGSEFEKRTADGSEFESPKKKAKVE

SEQ ID NO: 2452 - protein, 2096 aa, synthetic construct
MPAAKRVKLDGGDKKYSIGLDIGTNSVGWAVITDEYKVPSKKFKVLGNTDRHSIKKNLIGALLFDSGETAEATRLKRTARRRYTRRKNRICYLQEIFSNEMAKVDDSFFHRLEESFLVEEDKKHERHPIFGNIVDEVAYHEKYPTIYHLRKKLVDSTDKADLRLIYLALAHMIKFRGHFLIEGDLNPDNSDVDKLFIQLVQTYNQLFEENPINASGVDAKAILSARLSKSRRLENLIAQLPGEKKNGLFGNLIALSLGLTPNFKSNFDLAEDAKLQLSKDTYDDDLDNLLAQIGDQYADLFLAAKNLSDAILLSDILRVNTEITKAPLSASMIKRYDEHHQDLTLLKALVRQQLPEKYKEIFFDQSKNGYAGYIDGGASQEEFYKFIKPILEKMDGTEELLVKLNREDLLRKQRTFDNGSIPHQIHLGELHAILRRQEDFYPFLKDNREKIEKILTFRIPYYVGPLARGNSRFAWMTRKSEETITPWNFEEVVDKGASAQSFIERMTNFDKNLPNEKVLPKHSLLYEYFTVYNELTKVKYVTEGMRKPAFLSGEQKKAIVDLLFKTNRKVTVKQLKEDYFKKIECFDSVEISGVEDRFNASLGTYHDLLKIIKDKDFLDNEENEDILEDIVLTLTLFEDREMIEERLKTYAHLFDDKVMKQLKRRRYTGWGRLSRKLINGIRDKQSGKTILDFLKSDGFANRNFMQLIHDDSLTFKEDIQKAQVSGQGDSLHEHIANLAGSPAIKKGILQTVKVVDELVKVMGRHKPENIVIEMARENQTTQKGQKNSRERMKRIEEGIKELGSQILKEHPVENTQLQNEKLYLYYLQNGRDMYVDQELDINRLSDYDVDHIVPQSFLKDDSIDNKVLTRSDKARGKSDNVPSEEVVKKMKNYWRQLLNAKLITQRKFDNLTKAERGGLSELDKAGFIKRQLVETRQITKHVAQILDSRMNTKYDENDKLIREVKVITLKSKLVSDFRKDFQFYKVREINNYHHAHDAYLNAVVGTALIKKYPKLESEFVYGDYKVYDVRKMIAKSEQEIGKATAKYFFYSNIMNFFKTEITLANGEIRKRPLIETNGETGEIVWDKGRDFATVRKVLSMPQVNIVKKTEVQTGGFSKESILPKRNSDKLIARKKDWDPKKYGGFDSPTVAYSVLVVAKVEKGKSKKLKSVKELLGITIMERSSFEKNPIDFLEAKGYKEVKKDLIIKLPKYSLFELENGRKRMLASAGELQKGNELALPSKYVNFLYLASHYEKLKGSPEDNEQKQLFVEQHKHYLDEIIEQISEFSKRVILADANLDKVLSAYNKHRDKPIREQAENIIHLFTLTNLGAPAAFKYFDTTIDRKRYTSTKEVLDATLIHQSITGLYETRIDLSQLGGDGGEAAAKGSSGGGGGTLNIEDEYRLHETSKGPDVPLGSTWLSDFPQAWAETGGMGLAVRQAPLIIPLKATSTPVSIKQYPMSQEARLGIKPHIQRLLDQGILVPCQSPWNTPLLPVKKPGTNDYRPVQDLREVNKRVEDIHPTVPNPYNLLSGLPPSHQWYTVLDLKDAFFCLRLHPTSQSLFAFEWRDPEMGISGQLTWTRLPQGFKNSPTLFNEALHRDLADFRIQHPDLILLQYVDDLLLAATSELDCQQGTRALLQTLGDLGYRASAKKAQICQKQVKYLGYLLKEGQRWLTEARKETVMGQPTPKTPRQLREFLGTAGFCRLWIPGFAEMAAPLYPLTKPGTLFEWGPDQQKAYQEIKQALLTAPALGLPDLTKPFELFVDEKQGYAKGVLTQKLGPWRRPVAYLSKKLDPVAAGWPPCLRMVAAIAVLTKDAGKLTMGQPLVILAPHAVEALVKQPPDRWLSNARMTHYQALLLDTDRVQFGPIVALNPATLLPLPEEGLQHDCLDILAEAHGTRPDLTDQPLPDADHTWYTDGSSFLQEGQRKAGAAVTTETEVVWAKALPAGTSAQRAELIALTQALKMAEGKKLNVYTDSRYAFATAHIHGEIYRRRGWLTSEGKEIKNKDEILALLKALFLPKRLSIIHCPGHQKGNRAEARGNRMADQAAREVATRETPETSTLLAGKRTADGSEFEKRTADGSEFESPKKKAKVE

SEQ ID NO: 2453 - protein, 2096 aa, synthetic construct
MPAAKRVKLDGGDKKYSIGLDIGTNSVGWAVITDEYKVPSKKFKVLGNTDRHSIKKNLIGALLFDSGETAEATRLKRTARRRYTRRKNRICYLQEIFSNEMAKVDDSFFHRLEESFLVEEDKKHERHPIFGNIVDEVAYHEKYPTIYHLRKKLVDSTDKADLRLIYLALAHMIKFRGHFLIEGDLNPDNSDVDKLFIQLVQTYNQLFEENPINASGVDAKAILSARLSKSRRLENLIAQLPGEKKNGLFGNLIALSLGLTPNFKSNFDLAEDAKLQLSKDTYDDDLDNLLAQIGDQYADLFLAAKNLSDAILLSDILRVNTEITKAPLSASMIKRYDEHHQDLTLLKALVRQQLPEKYKEIFFDQSKNGYAGYIDGGASQEEFYKFIKPILEKMDGTEELLVKLNREDLLRKQRTFDNGSIPHQIHLGELHAILRRQEDFYPFLKDNREKIEKILTFRIPYYVGPLARGNSRFAWMTRKSEETITPWNFEEVVDKGASAQSFIERMTNFDKNLPNEKVLPKHSLLYEYFTVYNELTKVKYVTEGMRKPAFLSGEQKKAIVDLLFKTNRKVTVKQLKEDYFKKIECFDSVEISGVEDRFNASLGTYHDLLKIIKDKDFLDNEENEDILEDIVLTLTLFEDREMIEERLKTYAHLFDDKVMKQLKRRRYTGWGRLSRKLINGIRDKQSGKTILDFLKSDGFANRNFMQLIHDDSLTFKEDIQKAQVSGQGDSLHEHIANLAGSPAIKKGILQTVKVVDELVKVMGRHKPENIVIEMARENQTTQKGQKNSRERMKRIEEGIKELGSQILKEHPVENTQLQNEKLYLYYLQNGRDMYVDQELDINRLSDYDVDHIVPQSFLKDDSIDNKVLTRSDKARGKSDNVPSEEVVKKMKNYWRQLLNAKLITQRKFDNLTKAERGGLSELDKAGFIKRQLVETRQITKHVAQILDSRMNTKYDENDKLIREVKVITLKSKLVSDFRKDFQFYKVREINNYHHAHDAYLNAVVGTALIKKYPKLESEFVYGDYKVYDVRKMIAKSEQEIGKATAKYFFYSNIMNFFKTEITLANGEIRKRPLIETNGETGEIVWDKGRDFATVRKVLSMPQVNIVKKTEVQTGGFSKESILPKRNSDKLIARKKDWDPKKYGGFDSPTVAYSVLVVAKVEKGKSKKLKSVKELLGITIMERSSFEKNPIDFLEAKGYKEVKKDLIIKLPKYSLFELENGRKRMLASAGELQKGNELALPSKYVNFLYLASHYEKLKGSPEDNEQKQLFVEQHKHYLDEIIEQISEFSKRVILADANLDKVLSAYNKHRDKPIREQAENIIHLFTLTNLGAPAAFKYFDTTIDRKRYTSTKEVLDATLIHQSITGLYETRIDLSQLGGDGGPAPGSSEAAAKGGTLNIEDEYRLHETSKGPDVPLGSTWLSDFPQAWAETGGMGLAVRQAPLIIPLKATSTPVSIKQYPMSQEARLGIKPHIQRLLDQGILVPCQSPWNTPLLPVKKPGTNDYRPVQDLREVNKRVEDIHPTVPNPYNLLSGLPPSHQWYTVLDLKDAFFCLRLHPTSQSLFAFEWRDPEMGISGQLTWTRLPQGFKNSPTLFNEALHRDLADFRIQHPDLILLQYVDDLLLAATSELDCQQGTRALLQTLGDLGYRASAKKAQICQKQVKYLGYLLKEGQRWLTEARKETVMGQPTPKTPRQLREFLGTAGFCRLWIPGFAEMAAPLYPLTKPGTLFEWGPDQQKAYQEIKQALLTAPALGLPDLTKPFELFVDEKQGYAKGVLTQKLGPWRRPVAYLSKKLDPVAAGWPPCLRMVAAIAVLTKDAGKLTMGQPLVILAPHAVEALVKQPPDRWLSNARMTHYQALLLDTDRVQFGPIVALNPATLLPLPEEGLQHDCLDILAEAHGTRPDLTDQPLPDADHTWYTDGSSFLQEGQRKAGAAVTTETEVVWAKALPAGTSAQRAELIALTQALKMAEGKKLNVYTDSRYAFATAHIHGEIYRRRGWLTSEGKEIKNKDEILALLKALFLPKRLSIIHCPGHQKGNRAEARGNRMADQAAREVATRETPETSTLLAGKRTADGSEFEKRTADGSEFESPKKKAKVE

SEQ ID NO: 2454 - protein, 2110 aa, synthetic construct
MPAAKRVKLDGGDKKYSIGLDIGTNSVGWAVITDEYKVPSKKFKVLGNTDRHSIKKNLIGALLFDSGETAEATRLKRTARRRYTRRKNRICYLQEIFSNEMAKVDDSFFHRLEESFLVEEDKKHERHPIFGNIVDEVAYHEKYPTIYHLRKKLVDSTDKADLRLIYLALAHMIKFRGHFLIEGDLNPDNSDVDKLFIQLVQTYNQLFEENPINASGVDAKAILSARLSKSRRLENLIAQLPGEKKNGLFGNLIALSLGLTPNFKSNFDLAEDAKLQLSKDTYDDDLDNLLAQIGDQYADLFLAAKNLSDAILLSDILRVNTEITKAPLSASMIKRYDEHHQDLTLLKALVRQQLPEKYKEIFFDQSKNGYAGYIDGGASQEEFYKFIKPILEKMDGTEELLVKLNREDLLRKQRTFDNGSIPHQIHLGELHAILRRQEDFYPFLKDNREKIEKILTFRIPYYVGPLARGNSRFAWMTRKSEETITPWNFEEVVDKGASAQSFIERMTNFDKNLPNEKVLPKHSLLYEYFTVYNELTKVKYVTEGMRKPAFLSGEQKKAIVDLLFKTNRKVTVKQLKEDYFKKIECFDSVEISGVEDRFNASLGTYHDLLKIIKDKDFLDNEENEDILEDIVLTLTLFEDREMIEERLKTYAHLFDDKVMKQLKRRRYTGWGRLSRKLINGIRDKQSGKTILDFLKSDGFANRNFMQLIHDDSLTFKEDIQKAQVSGQGDSLHEHIANLAGSPAIKKGILQTVKVVDELVKVMGRHKPENIVIEMARENQTTQKGQKNSRERMKRIEEGIKELGSQILKEHPVENTQLQNEKLYLYYLQNGRDMYVDQELDINRLSDYDVDHIVPQSFLKDDSIDNKVLTRSDKARGKSDNVPSEEVVKKMKNYWRQLLNAKLITQRKFDNLTKAERGGLSELDKAGFIKRQLVETRQITKHVAQILDSRMNTKYDENDKLIREVKVITLKSKLVSDFRKDFQFYKVREINNYHHAHDAYLNAVVGTALIKKYPKLESEFVYGDYKVYDVRKMIAKSEQEIGKATAKYFFYSNIMNFFKTEITLANGEIRKRPLIETNGETGEIVWDKGRDFATVRKVLSMPQVNIVKKTEVQTGGFSKESILPKRNSDKLIARKKDWDPKKYGGFDSPTVAYSVLVVAKVEKGKSKKLKSVKELLGITIMERSSFEKNPIDFLEAKGYKEVKKDLIIKLPKYSLFELENGRKRMLASAGELQKGNELALPSKYVNFLYLASHYEKLKGSPEDNEQKQLFVEQHKHYLDEIIEQISEFSKRVILADANLDKVLSAYNKHRDKPIREQAENIIHLFTLTNLGAPAAFKYFDTTIDRKRYTSTKEVLDATLIHQSITGLYETRIDLSQLGGDGGEAAAKEAAAKEAAAKEAAAKEAAAKGGTLNIEDEYRLHETSKGPDVPLGSTWLSDFPQAWAETGGMGLAVRQAPLIIPLKATSTPVSIKQYPMSQEARLGIKPHIQRLLDQGILVPCQSPWNTPLLPVKKPGTNDYRPVQDLREVNKRVEDIHPTVPNPYNLLSGLPPSHQWYTVLDLKDAFFCLRLHPTSQSLFAFEWRDPEMGISGQLTWTRLPQGFKNSPTLFNEALHRDLADFRIQHPDLILLQYVDDLLLAATSELDCQQGTRALLQTLGDLGYRASAKKAQICQKQVKYLGYLLKEGQRWLTEARKETVMGQPTPKTPRQLREFLGTAGFCRLWIPGFAEMAAPLYPLTKPGTLFEWGPDQQKAYQEIKQALLTAPALGLPDLTKPFELFVDEKQGYAKGVLTQKLGPWRRPVAYLSKKLDPVAAGWPPCLRMVAAIAVLTKDAGKLTMGQPLVILAPHAVEALVKQPPDRWLSNARMTHYQALLLDTDRVQFGPIVALNPATLLPLPEEGLQHDCLDILAEAHGTRPDLTDQPLPDADHTWYTDGSSFLQEGQRKAGAAVTTETEVVWAKALPAGTSAQRAELIALTQALKMAEGKKLNVYTDSRYAFATAHIHGEIYRRRGWLTSEGKEIKNKDEILALLKALFLPKRLSIIHCPGHQKGNRAEARGNRMADQAAREVATRETPETSTLLAGKRTADGSEFEKRTADGSEFESPKKKAKVE

SEQ ID NO: 2455 - protein, 2115 aa, synthetic construct
MPAAKRVKLDGGDKKYSIGLDIGTNSVGWAVITDEYKVPSKKFKVLGNTDRHSIKKNLIGALLFDSGETAEATRLKRTARRRYTRRKNRICYLQEIFSNEMAKVDDSFFHRLEESFLVEEDKKHERHPIFGNIVDEVAYHEKYPTIYHLRKKLVDSTDKADLRLIYLALAHMIKFRGHFLIEGDLNPDNSDVDKLFIQLVQTYNQLFEENPINASGVDAKAILSARLSKSRRLENLIAQLPGEKKNGLFGNLIALSLGLTPNFKSNFDLAEDAKLQLSKDTYDDDLDNLLAQIGDQYADLFLAAKNLSDAILLSDILRVNTEITKAPLSASMIKRYDEHHQDLTLLKALVRQQLPEKYKEIFFDQSKNGYAGYIDGGASQEEFYKFIKPILEKMDGTEELLVKLNREDLLRKQRTFDNGSIPHQIHLGELHAILRRQEDFYPFLKDNREKIEKILTFRIPYYVGPLARGNSRFAWMTRKSEETITPWNFEEVVDKGASAQSFIERMTNFDKNLPNEKVLPKHSLLYEYFTVYNELTKVKYVTEGMRKPAFLSGEQKKAIVDLLFKTNRKVTVKQLKEDYFKKIECFDSVEISGVEDRFNASLGTYHDLLKIIKDKDFLDNEENEDILEDIVLTLTLFEDREMIEERLKTYAHLFDDKVMKQLKRRRYTGWGRLSRKLINGIRDKQSGKTILDFLKSDGFANRNFMQLIHDDSLTFKEDIQKAQVSGQGDSLHEHIANLAGSPAIKKGILQTVKVVDELVKVMGRHKPENIVIEMARENQTTQKGQKNSRERMKRIEEGIKELGSQILKEHPVENTQLQNEKLYLYYLQNGRDMYVDQELDINRLSDYDVDHIVPQSFLKDDSIDNKVLTRSDKARGKSDNVPSEEVVKKMKNYWRQLLNAKLITQRKFDNLTKAERGGLSELDKAGFIKRQLVETRQITKHVAQILDSRMNTKYDENDKLIREVKVITLKSKLVSDFRKDFQFYKVREINNYHHAHDAYLNAVVGTALIKKYPKLESEFVYGDYKVYDVRKMIAKSEQEIGKATAKYFFYSNIMNFFKTEITLANGEIRKRPLIETNGETGEIVWDKGRDFATVRKVLSMPQVNIVKKTEVQTGGFSKESILPKRNSDKLIARKKDWDPKKYGGFDSPTVAYSVLVVAKVEKGKSKKLKSVKELLGITIMERSSFEKNPIDFLEAKGYKEVKKDLIIKLPKYSLFELENGRKRMLASAGELQKGNELALPSKYVNFLYLASHYEKLKGSPEDNEQKQLFVEQHKHYLDEIIEQISEFSKRVILADANLDKVLSAYNKHRDKPIREQAENIIHLFTLTNLGAPAAFKYFDTTIDRKRYTSTKEVLDATLIHQSITGLYETRIDLSQLGGDGGEAAAKEAAAKEAAAKEAAAKEAAAKEAAAKGGTLNIEDEYRLHETSKGPDVPLGSTWLSDFPQAWAETGGMGLAVRQAPLIIPLKATSTPVSIKQYPMSQEARLGIKPHIQRLLDQGILVPCQSPWNTPLLPVKKPGTNDYRPVQDLREVNKRVEDIHPTVPNPYNLLSGLPPSHQWYTVLDLKDAFFCLRLHPTSQSLFAFEWRDPEMGISGQLTWTRLPQGFKNSPTLFNEALHRDLADFRIQHPDLILLQYVDDLLLAATSELDCQQGTRALLQTLGDLGYRASAKKAQICQKQVKYLGYLLKEGQRWLTEARKETVMGQPTPKTPRQLREFLGTAGFCRLWIPGFAEMAAPLYPLTKPGTLFEWGPDQQKAYQEIKQALLTAPALGLPDLTKPFELFVDEKQGYAKGVLTQKLGPWRRPVAYLSKKLDPVAAGWPPCLRMVAAIAVLTKDAGKLTMGQPLVILAPHAVEALVKQPPDRWLSNARMTHYQALLLDTDRVQFGPIVALNPATLLPLPEEGLQHDCLDILAEAHGTRPDLTDQPLPDADHTWYTDGSSFLQEGQRKAGAAVTTETEVVWAKALPAGTSAQRAELIALTQALKMAEGKKLNVYTDSRYAFATAHIHGEIYRRRGWLTSEGKEIKNKDEILALLKALFLPKRLSIIHCPGHQKGNRAEARGNRMADQAAREVATRETPETSTLLAGKRTADGSEFEKRTADGSEFESPKKKAKVE

SEQ ID NO: 2456 - protein, 2093 aa, synthetic construct
MPAAKRVKLDGGDKKYSIGLDIGTNSVGWAVITDEYKVPSKKFKVLGNTDRHSIKKNLIGALLFDSGETAEATRLKRTARRRYTRRKNRICYLQEIFSNEMAKVDDSFFHRLEESFLVEEDKKHERHPIFGNIVDEVAYHEKYPTIYHLRKKLVDSTDKADLRLIYLALAHMIKFRGHFLIEGDLNPDNSDVDKLFIQLVQTYNQLFEENPINASGVDAKAILSARLSKSRRLENLIAQLPGEKKNGLFGNLIALSLGLTPNFKSNFDLAEDAKLQLSKDTYDDDLDNLLAQIGDQYADLFLAAKNLSDAILLSDILRVNTEITKAPLSASMIKRYDEHHQDLTLLKALVRQQLPEKYKEIFFDQSKNGYAGYIDGGASQEEFYKFIKPILEKMDGTEELLVKLNREDLLRKQRTFDNGSIPHQIHLGELHAILRRQEDFYPFLKDNREKIEKILTFRIPYYVGPLARGNSRFAWMTRKSEETITPWNFEEVVDKGASAQSFIERMTNFDKNLPNEKVLPKHSLLYEYFTVYNELTKVKYVTEGMRKPAFLSGEQKKAIVDLLFKTNRKVTVKQLKEDYFKKIECFDSVEISGVEDRFNASLGTYHDLLKIIKDKDFLDNEENEDILEDIVLTLTLFEDREMIEERLKTYAHLFDDKVMKQLKRRRYTGWGRLSRKLINGIRDKQSGKTILDFLKSDGFANRNFMQLIHDDSLTFKEDIQKAQVSGQGDSLHEHIANLAGSPAIKKGILQTVKVVDELVKVMGRHKPENIVIEMARENQTTQKGQKNSRERMKRIEEGIKELGSQILKEHPVENTQLQNEKLYLYYLQNGRDMYVDQELDINRLSDYDVDHIVPQSFLKDDSIDNKVLTRSDKARGKSDNVPSEEVVKKMKNYWRQLLNAKLITQRKFDNLTKAERGGLSELDKAGFIKRQLVETRQITKHVAQILDSRMNTKYDENDKLIREVKVITLKSKLVSDFRKDFQFYKVREINNYHHAHDAYLNAVVGTALIKKYPKLESEFVYGDYKVYDVRKMIAKSEQEIGKATAKYFFYSNIMNFFKTEITLANGEIRKRPLIETNGETGEIVWDKGRDFATVRKVLSMPQVNIVKKTEVQTGGFSKESILPKRNSDKLIARKKDWDPKKYGGFDSPTVAYSVLVVAKVEKGKSKKLKSVKELLGITIMERSSFEKNPIDFLEAKGYKEVKKDLIIKLPKYSLFELENGRKRMLASAGELQKGNELALPSKYVNFLYLASHYEKLKGSPEDNEQKQLFVEQHKHYLDEIIEQISEFSKRVILADANLDKVLSAYNKHRDKPIREQAENIIHLFTLTNLGAPAAFKYFDTTIDRKRYTSTKEVLDATLIHQSITGLYETRIDLSQLGGDGGEAAAKGGSGGTLNIEDEYRLHETSKGPDVPLGSTWLSDFPQAWAETGGMGLAVRQAPLIIPLKATSTPVSIKQYPMSQEARLGIKPHIQRLLDQGILVPCQSPWNTPLLPVKKPGTNDYRPVQDLREVNKRVEDIHPTVPNPYNLLSGLPPSHQWYTVLDLKDAFFCLRLHPTSQSLFAFEWRDPEMGISGQLTWTRLPQGFKNSPTLFNEALHRDLADFRIQHPDLILLQYVDDLLLAATSELDCQQGTRALLQTLGDLGYRASAKKAQICQKQVKYLGYLLKEGQRWLTEARKETVMGQPTPKTPRQLREFLGTAGFCRLWIPGFAEMAAPLYPLTKPGTLFEWGPDQQKAYQEIKQALLTAPALGLPDLTKPFELFVDEKQGYAKGVLTQKLGPWRRPVAYLSKKLDPVAAGWPPCLRMVAAIAVLTKDAGKLTMGQPLVILAPHAVEALVKQPPDRWLSNARMTHYQALLLDTDRVQFGPIVALNPATLLPLPEEGLQHDCLDILAEAHGTRPDLTDQPLPDADHTWYTDGSSFLQEGQRKAGAAVTTETEVVWAKALPAGTSAQRAELIALTQALKMAEGKKLNVYTDSRYAFATAHIHGEIYRRRGWLTSEGKEIKNKDEILALLKALFLPKRLSIIHCPGHQKGNRAEARGNRMADQAAREVATRETPETSTLLAGKRTADGSEFEKRTADGSEFESPKKKAKVE

SEQ ID NO: 2457 - protein, 2096 aa, synthetic construct
MPAAKRVKLDGGDKKYSIGLDIGTNSVGWAVITDEYKVPSKKFKVLGNTDRHSIKKNLIGALLFDSGETAEATRLKRTARRRYTRRKNRICYLQEIFSNEMAKVDDSFFHRLEESFLVEEDKKHERHPIFGNIVDEVAYHEKYPTIYHLRKKLVDSTDKADLRLIYLALAHMIKFRGHFLIEGDLNPDNSDVDKLFIQLVQTYNQLFEENPINASGVDAKAILSARLSKSRRLENLIAQLPGEKKNGLFGNLIALSLGLTPNFKSNFDLAEDAKLQLSKDTYDDDLDNLLAQIGDQYADLFLAAKNLSDAILLSDILRVNTEITKAPLSASMIKRYDEHHQDLTLLKALVRQQLPEKYKEIFFDQSKNGYAGYIDGGASQEEFYKFIKPILEKMDGTEELLVKLNREDLLRKQRTFDNGSIPHQIHLGELHAILRRQEDFYPFLKDNREKIEKILTFRIPYYVGPLARGNSRFAWMTRKSEETITPWNFEEVVDKGASAQSFIERMTNFDKNLPNEKVLPKHSLLYEYFTVYNELTKVKYVTEGMRKPAFLSGEQKKAIVDLLFKTNRKVTVKQLKEDYFKKIECFDSVEISGVEDRFNASLGTYHDLLKIIKDKDFLDNEENEDILEDIVLTLTLFEDREMIEERLKTYAHLFDDKVMKQLKRRRYTGWGRLSRKLINGIRDKQSGKTILDFLKSDGFANRNFMQLIHDDSLTFKEDIQKAQVSGQGDSLHEHIANLAGSPAIKKGILQTVKVVDELVKVMGRHKPENIVIEMARENQTTQKGQKNSRERMKRIEEGIKELGSQILKEHPVENTQLQNEKLYLYYLQNGRDMYVDQELDINRLSDYDVDHIVPQSFLKDDSIDNKVLTRSDKARGKSDNVPSEEVVKKMKNYWRQLLNAKLITQRKFDNLTKAERGGLSELDKAGFIKRQLVETRQITKHVAQILDSRMNTKYDENDKLIREVKVITLKSKLVSDFRKDFQFYKVREINNYHHAHDAYLNAVVGTALIKKYPKLESEFVYGDYKVYDVRKMIAKSEQEIGKATAKYFFYSNIMNFFKTEITLANGEIRKRPLIETNGETGEIVWDKGRDFATVRKVLSMPQVNIVKKTEVQTGGFSKESILPKRNSDKLIARKKDWDPKKYGGFDSPTVAYSVLVVAKVEKGKSKKLKSVKELLGITIMERSSFEKNPIDFLEAKGYKEVKKDLIIKLPKYSLFELENGRKRMLASAGELQKGNELALPSKYVNFLYLASHYEKLKGSPEDNEQKQLFVEQHKHYLDEIIEQISEFSKRVILADANLDKVLSAYNKHRDKPIREQAENIIHLFTLTNLGAPAAFKYFDTTIDRKRYTSTKEVLDATLIHQSITGLYETRIDLSQLGGDGGEAAAKGGGPAPGGTLNIEDEYRLHETSKGPDVPLGSTWLSDFPQAWAETGGMGLAVRQAPLIIPLKATSTPVSIKQYPMSQEARLGIKPHIQRLLDQGILVPCQSPWNTPLLPVKKPGTNDYRPVQDLREVNKRVEDIHPTVPNPYNLLSGLPPSHQWYTVLDLKDAFFCLRLHPTSQSLFAFEWRDPEMGISGQLTWTRLPQGFKNSPTLFNEALHRDLADFRIQHPDLILLQYVDDLLLAATSELDCQQGTRALLQTLGDLGYRASAKKAQICQKQVKYLGYLLKEGQRWLTEARKETVMGQPTPKTPRQLREFLGTAGFCRLWIPGFAEMAAPLYPLTKPGTLFEWGPDQQKAYQEIKQALLTAPALGLPDLTKPFELFVDEKQGYAKGVLTQKLGPWRRPVAYLSKKLDPVAAGWPPCLRMVAAIAVLTKDAGKLTMGQPLVILAPHAVEALVKQPPDRWLSNARMTHYQALLLDTDRVQFGPIVALNPATLLPLPEEGLQHDCLDILAEAHGTRPDLTDQPLPDADHTWYTDGSSFLQEGQRKAGAAVTTETEVVWAKALPAGTSAQRAELIALTQALKMAEGKKLNVYTDSRYAFATAHIHGEIYRRRGWLTSEGKEIKNKDEILALLKALFLPKRLSIIHCPGHQKGNRAEARGNRMADQAAREVATRETPETSTLLAGKRTADGSEFEKRTADGSEFESPKKKAKVE

SEQ ID NO: 2458 - protein, 2096 aa, synthetic construct
MPAAKRVKLDGGDKKYSIGLDIGTNSVGWAVITDEYKVPSKKFKVLGNTDRHSIKKNLIGALLFDSGETAEATRLKRTARRRYTRRKNRICYLQEIFSNEMAKVDDSFFHRLEESFLVEEDKKHERHPIFGNIVDEVAYHEKYPTIYHLRKKLVDSTDKADLRLIYLALAHMIKFRGHFLIEGDLNPDNSDVDKLFIQLVQTYNQLFEENPINASGVDAKAILSARLSKSRRLENLIAQLPGEKKNGLFGNLIALSLGLTPNFKSNFDLAEDAKLQLSKDTYDDDLDNLLAQIGDQYADLFLAAKNLSDAILLSDILRVNTEITKAPLSASMIKRYDEHHQDLTLLKALVRQQLPEKYKEIFFDQSKNGYAGYIDGGASQEEFYKFIKPILEKMDGTEELLVKLNREDLLRKQRTFDNGSIPHQIHLGELHAILRRQEDFYPFLKDNREKIEKILTFRIPYYVGPLARGNSRFAWMTRKSEETITPWNFEEVVDKGASAQSFIERMTNFDKNLPNEKVLPKHSLLYEYFTVYNELTKVKYVTEGMRKPAFLSGEQKKAIVDLLFKTNRKVTVKQLKEDYFKKIECFDSVEISGVEDRFNASLGTYHDLLKIIKDKDFLDNEENEDILEDIVLTLTLFEDREMIEERLKTYAHLFDDKVMKQLKRRRYTGWGRLSRKLINGIRDKQSGKTILDFLKSDGFANRNFMQLIHDDSLTFKEDIQKAQVSGQGDSLHEHIANLAGSPAIKKGILQTVKVVDELVKVMGRHKPENIVIEMARENQTTQKGQKNSRERMKRIEEGIKELGSQILKEHPVENTQLQNEKLYLYYLQNGRDMYVDQELDINRLSDYDVDHIVPQSFLKDDSIDNKVLTRSDKARGKSDNVPSEEVVKKMKNYWRQLLNAKLITQRKFDNLTKAERGGLSELDKAGFIKRQLVETRQITKHVAQILDSRMNTKYDENDKLIREVKVITLKSKLVSDFRKDFQFYKVREINNYHHAHDAYLNAVVGTALIKKYPKLESEFVYGDYKVYDVRKMIAKSEQEIGKATAKYFFYSNIMNFFKTEITLANGEIRKRPLIETNGETGEIVWDKGRDFATVRKVLSMPQVNIVKKTEVQTGGFSKESILPKRNSDKLIARKKDWDPKKYGGFDSPTVAYSVLVVAKVEKGKSKKLKSVKELLGITIMERSSFEKNPIDFLEAKGYKEVKKDLIIKLPKYSLFELENGRKRMLASAGELQKGNELALPSKYVNFLYLASHYEKLKGSPEDNEQKQLFVEQHKHYLDEIIEQISEFSKRVILADANLDKVLSAYNKHRDKPIREQAENIIHLFTLTNLGAPAAFKYFDTTIDRKRYTSTKEVLDATLIHQSITGLYETRIDLSQLGGDGGGSSEAAAKGGGGGTLNIEDEYRLHETSKGPDVPLGSTWLSDFPQAWAETGGMGLAVRQAPLIIPLKATSTPVSIKQYPMSQEARLGIKPHIQRLLDQGILVPCQSPWNTPLLPVKKPGTNDYRPVQDLREVNKRVEDIHPTVPNPYNLLSGLPPSHQWYTVLDLKDAFFCLRLHPTSQSLFAFEWRDPEMGISGQLTWTRLPQGFKNSPTLFNEALHRDLADFRIQHPDLILLQYVDDLLLAATSELDCQQGTRALLQTLGDLGYRASAKKAQICQKQVKYLGYLLKEGQRWLTEARKETVMGQPTPKTPRQLREFLGTAGFCRLWIPGFAEMAAPLYPLTKPGTLFEWGPDQQKAYQEIKQALLTAPALGLPDLTKPFELFVDEKQGYAKGVLTQKLGPWRRPVAYLSKKLDPVAAGWPPCLRMVAAIAVLTKDAGKLTMGQPLVILAPHAVEALVKQPPDRWLSNARMTHYQALLLDTDRVQFGPIVALNPATLLPLPEEGLQHDCLDILAEAHGTRPDLTDQPLPDADHTWYTDGSSFLQEGQRKAGAAVTTETEVVWAKALPAGTSAQRAELIALTQALKMAEGKKLNVYTDSRYAFATAHIHGEIYRRRGWLTSEGKEIKNKDEILALLKALFLPKRLSIIHCPGHQKGNRAEARGNRMADQAAREVATRETPETSTLLAGKRTADGSEFEKRTADGSEFESPKKKAKVE

SEQ ID NO: 2459 - protein, 2096 aa, synthetic construct
MPAAKRVKLDGGDKKYSIGLDIGTNSVGWAVITDEYKVPSKKFKVLGNTDRHSIKKNLIGALLFDSGETAEATRLKRTARRRYTRRKNRICYLQEIFSNEMAKVDDSFFHRLEESFLVEEDKKHERHPIFGNIVDEVAYHEKYPTIYHLRKKLVDSTDKADLRLIYLALAHMIKFRGHFLIEGDLNPDNSDVDKLFIQLVQTYNQLFEENPINASGVDAKAILSARLSKSRRLENLIAQLPGEKKNGLFGNLIALSLGLTPNFKSNFDLAEDAKLQLSKDTYDDDLDNLLAQIGDQYADLFLAAKNLSDAILLSDILRVNTEITKAPLSASMIKRYDEHHQDLTLLKALVRQQLPEKYKEIFFDQSKNGYAGYIDGGASQEEFYKFIKPILEKMDGTEELLVKLNREDLLRKQRTFDNGSIPHQIHLGELHAILRRQEDFYPFLKDNREKIEKILTFRIPYYVGPLARGNSRFAWMTRKSEETITPWNFEEVVDKGASAQSFIERMTNFDKNLPNEKVLPKHSLLYEYFTVYNELTKVKYVTEGMRKPAFLSGEQKKAIVDLLFKTNRKVTVKQLKEDYFKKIECFDSVEISGVEDRFNASLGTYHDLLKIIKDKDFLDNEENEDILEDIVLTLTLFEDREMIEERLKTYAHLFDDKVMKQLKRRRYTGWGRLSRKLINGIRDKQSGKTILDFLKSDGFANRNFMQLIHDDSLTFKEDIQKAQVSGQGDSLHEHIANLAGSPAIKKGILQTVKVVDELVKVMGRHKPENIVIEMARENQTTQKGQKNSRERMKRIEEGIKELGSQILKEHPVENTQLQNEKLYLYYLQNGRDMYVDQELDINRLSDYDVDHIVPQSFLKDDSIDNKVLTRSDKARGKSDNVPSEEVVKKMKNYWRQLLNAKLITQRKFDNLTKAERGGLSELDKAGFIKRQLVETRQITKHVAQILDSRMNTKYDENDKLIREVKVITLKSKLVSDFRKDFQFYKVREINNYHHAHDAYLNAVVGTALIKKYPKLESEFVYGDYKVYDVRKMIAKSEQEIGKATAKYFFYSNIMNFFKTEITLANGEIRKRPLIETNGETGEIVWDKGRDFATVRKVLSMPQVNIVKKTEVQTGGFSKESILPKRNSDKLIARKKDWDPKKYGGFDSPTVAYSVLVVAKVEKGKSKKLKSVKELLGITIMERSSFEKNPIDFLEAKGYKEVKKDLIIKLPKYSLFELENGRKRMLASAGELQKGNELALPSKYVNFLYLASHYEKLKGSPEDNEQKQLFVEQHKHYLDEIIEQISEFSKRVILADANLDKVLSAYNKHRDKPIREQAENIIHLFTLTNLGAPAAFKYFDTTIDRKRYTSTKEVLDATLIHQSITGLYETRIDLSQLGGDGGGGSGGGEAAAKGGTLNIEDEYRLHETSKGPDVPLGSTWLSDFPQAWAETGGMGLAVRQAPLIIPLKATSTPVSIKQYPMSQEARLGIKPHIQRLLDQGILVPCQSPWNTPLLPVKKPGTNDYRPVQDLREVNKRVEDIHPTVPNPYNLLSGLPPSHQWYTVLDLKDAFFCLRLHPTSQSLFAFEWRDPEMGISGQLTWTRLPQGFKNSPTLFNEALHRDLADFRIQHPDLILLQYVDDLLLAATSELDCQQGTRALLQTLGDLGYRASAKKAQICQKQVKYLGYLLKEGQRWLTEARKETVMGQPTPKTPRQLREFLGTAGFCRLWIPGFAEMAAPLYPLTKPGTLFEWGPDQQKAYQEIKQALLTAPALGLPDLTKPFELFVDEKQGYAKGVLTQKLGPWRRPVAYLSKKLDPVAAGWPPCLRMVAAIAVLTKDAGKLTMGQPLVILAPHAVEALVKQPPDRWLSNARMTHYQALLLDTDRVQFGPIVALNPATLLPLPEEGLQHDCLDILAEAHGTRPDLTDQPLPDADHTWYTDGSSFLQEGQRKAGAAVTTETEVVWAKALPAGTSAQRAELIALTQALKMAEGKKLNVYTDSRYAFATAHIHGEIYRRRGWLTSEGKEIKNKDEILALLKALFLPKRLSIIHCPGHQKGNRAEARGNRMADQAAREVATRETPETSTLLAGKRTADGSEFEKRTADGSEFESPKKKAKVE

SEQ ID NO: 2460 - protein, 2096 aa, synthetic construct
MPAAKRVKLDGGDKKYSIGLDIGTNSVGWAVITDEYKVPSKKFKVLGNTDRHSIKKNLIGALLFDSGETAEATRLKRTARRRYTRRKNRICYLQEIFSNEMAKVDDSFFHRLEESFLVEEDKKHERHPIFGNIVDEVAYHEKYPTIYHLRKKLVDSTDKADLRLIYLALAHMIKFRGHFLIEGDLNPDNSDVDKLFIQLVQTYNQLFEENPINASGVDAKAILSARLSKSRRLENLIAQLPGEKKNGLFGNLIALSLGLTPNFKSNFDLAEDAKLQLSKDTYDDDLDNLLAQIGDQYADLFLAAKNLSDAILLSDILRVNTEITKAPLSASMIKRYDEHHQDLTLLKALVRQQLPEKYKEIFFDQSKNGYAGYIDGGASQEEFYKFIKPILEKMDGTEELLVKLNREDLLRKQRTFDNGSIPHQIHLGELHAILRRQEDFYPFLKDNREKIEKILTFRIPYYVGPLARGNSRFAWMTRKSEETITPWNFEEVVDKGASAQSFIERMTNFDKNLPNEKVLPKHSLLYEYFTVYNELTKVKYVTEGMRKPAFLSGEQKKAIVDLLFKTNRKVTVKQLKEDYFKKIECFDSVEISGVEDRFNASLGTYHDLLKIIKDKDFLDNEENEDILEDIVLTLTLFEDREMIEERLKTYAHLFDDKVMKQLKRRRYTGWGRLSRKLINGIRDKQSGKTILDFLKSDGFANRNFMQLIHDDSLTFKEDIQKAQVSGQGDSLHEHIANLAGSPAIKKGILQTVKVVDELVKVMGRHKPENIVIEMARENQTTQKGQKNSRERMKRIEEGIKELGSQILKEHPVENTQLQNEKLYLYYLQNGRDMYVDQELDINRLSDYDVDHIVPQSFLKDDSIDNKVLTRSDKARGKSDNVPSEEVVKKMKNYWRQLLNAKLITQRKFDNLTKAERGGLSELDKAGFIKRQLVETRQITKHVAQILDSRMNTKYDENDKLIREVKVITLKSKLVSDFRKDFQFYKVREINNYHHAHDAYLNAVVGTALIKKYPKLESEFVYGDYKVYDVRKMIAKSEQEIGKATAKYFFYSNIMNFFKTEITLANGEIRKRPLIETNGETGEIVWDKGRDFATVRKVLSMPQVNIVKKTEVQTGGFSKESILPKRNSDKLIARKKDWDPKKYGGFDSPTVAYSVLVVAKVEKGKSKKLKSVKELLGITIMERSSFEKNPIDFLEAKGYKEVKKDLIIKLPKYSLFELENGRKRMLASAGELQKGNELALPSKYVNFLYLASHYEKLKGSPEDNEQKQLFVEQHKHYLDEIIEQISEFSKRVILADANLDKVLSAYNKHRDKPIREQAENIIHLFTLTNLGAPAAFKYFDTTIDRKRYTSTKEVLDATLIHQSITGLYETRIDLSQLGGDGGEAAAKGGSGSSGGTLNIEDEYRLHETSKGPDVPLGSTWLSDFPQAWAETGGMGLAVRQAPLIIPLKATSTPVSIKQYPMSQEARLGIKPHIQRLLDQGILVPCQSPWNTPLLPVKKPGTNDYRPVQDLREVNKRVEDIHPTVPNPYNLLSGLPPSHQWYTVLDLKDAFFCLRLHPTSQSLFAFEWRDPEMGISGQLTWTRLPQGFKNSPTLFNEALHRDLADFRIQHPDLILLQYVDDLLLAATSELDCQQGTRALLQTLGDLGYRASAKKAQICQKQVKYLGYLLKEGQRWLTEARKETVMGQPTPKTPRQLREFLGTAGFCRLWIPGFAEMAAPLYPLTKPGTLFEWGPDQQKAYQEIKQALLTAPALGLPDLTKPFELFVDEKQGYAKGVLTQKLGPWRRPVAYLSKKLDPVAAGWPPCLRMVAAIAVLTKDAGKLTMGQPLVILAPHAVEALVKQPPDRWLSNARMTHYQALLLDTDRVQFGPIVALNPATLLPLPEEGLQHDCLDILAEAHGTRPDLTDQPLPDADHTWYTDGSSFLQEGQRKAGAAVTTETEVVWAKALPAGTSAQRAELIALTQALKMAEGKKLNVYTDSRYAFATAHIHGEIYRRRGWLTSEGKEIKNKDEILALLKALFLPKRLSIIHCPGHQKGNRAEARGNRMADQAAREVATRETPETSTLLAGKRTADGSEFEKRTADGSEFESPKKKAKVE

SEQ ID NO: 2461 - protein, 2096 aa, synthetic construct
MPAAKRVKLDGGDKKYSIGLDIGTNSVGWAVITDEYKVPSKKFKVLGNTDRHSIKKNLIGALLFDSGETAEATRLKRTARRRYTRRKNRICYLQEIFSNEMAKVDDSFFHRLEESFLVEEDKKHERHPIFGNIVDEVAYHEKYPTIYHLRKKLVDSTDKADLRLIYLALAHMIKFRGHFLIEGDLNPDNSDVDKLFIQLVQTYNQLFEENPINASGVDAKAILSARLSKSRRLENLIAQLPGEKKNGLFGNLIALSLGLTPNFKSNFDLAEDAKLQLSKDTYDDDLDNLLAQIGDQYADLFLAAKNLSDAILLSDILRVNTEITKAPLSASMIKRYDEHHQDLTLLKALVRQQLPEKYKEIFFDQSKNGYAGYIDGGASQEEFYKFIKPILEKMDGTEELLVKLNREDLLRKQRTFDNGSIPHQIHLGELHAILRRQEDFYPFLKDNREKIEKILTFRIPYYVGPLARGNSRFAWMTRKSEETITPWNFEEVVDKGASAQSFIERMTNFDKNLPNEKVLPKHSLLYEYFTVYNELTKVKYVTEGMRKPAFLSGEQKKAIVDLLFKTNRKVTVKQLKEDYFKKIECFDSVEISGVEDRFNASLGTYHDLLKIIKDKDFLDNEENEDILEDIVLTLTLFEDREMIEERLKTYAHLFDDKVMKQLKRRRYTGWGRLSRKLINGIRDKQSGKTILDFLKSDGFANRNFMQLIHDDSLTFKEDIQKAQVSGQGDSLHEHIANLAGSPAIKKGILQTVKVVDELVKVMGRHKPENIVIEMARENQTTQKGQKNSRERMKRIEEGIKELGSQILKEHPVENTQLQNEKLYLYYLQNGRDMYVDQELDINRLSDYDVDHIVPQSFLKDDSIDNKVLTRSDKARGKSDNVPSEEVVKKMKNYWRQLLNAKLITQRKFDNLTKAERGGLSELDKAGFIKRQLVETRQITKHVAQILDSRMNTKYDENDKLIREVKVITLKSKLVSDFRKDFQFYKVREINNYHHAHDAYLNAVVGTALIKKYPKLESEFVYGDYKVYDVRKMIAKSEQEIGKATAKYFFYSNIMNFFKTEITLANGEIRKRPLIETNGETGEIVWDKGRDFATVRKVLSMPQVNIVKKTEVQTGGFSKESILPKRNSDKLIARKKDWDPKKYGGFDSPTVAYSVLVVAKVEKGKSKKLKSVKELLGITIMERSSFEKNPIDFLEAKGYKEVKKDLIIKLPKYSLFELENGRKRMLASAGELQKGNELALPSKYVNFLYLASHYEKLKGSPEDNEQKQLFVEQHKHYLDEIIEQISEFSKRVILADANLDKVLSAYNKHRDKPIREQAENIIHLFTLTNLGAPAAFKYFDTTIDRKRYTSTKEVLDATLIHQSITGLYETRIDLSQLGGDGGGGGGSSEAAAKGGTLNIEDEYRLHETSKGPDVPLGSTWLSDFPQAWAETGGMGLAVRQAPLIIPLKATSTPVSIKQYPMSQEARLGIKPHIQRLLDQGILVPCQSPWNTPLLPVKKPGTNDYRPVQDLREVNKRVEDIHPTVPNPYNLLSGLPPSHQWYTVLDLKDAFFCLRLHPTSQSLFAFEWRDPEMGISGQLTWTRLPQGFKNSPTLFNEALHRDLADFRIQHPDLILLQYVDDLLLAATSELDCQQGTRALLQTLGDLGYRASAKKAQICQKQVKYLGYLLKEGQRWLTEARKETVMGQPTPKTPRQLREFLGTAGFCRLWIPGFAEMAAPLYPLTKPGTLFEWGPDQQKAYQEIKQALLTAPALGLPDLTKPFELFVDEKQGYAKGVLTQKLGPWRRPVAYLSKKLDPVAAGWPPCLRMVAAIAVLTKDAGKLTMGQPLVILAPHAVEALVKQPPDRWLSNARMTHYQALLLDTDRVQFGPIVALNPATLLPLPEEGLQHDCLDILAEAHGTRPDLTDQPLPDADHTWYTDGSSFLQEGQRKAGAAVTTETEVVWAKALPAGTSAQRAELIALTQALKMAEGKKLNVYTDSRYAFATAHIHGEIYRRRGWLTSEGKEIKNKDEILALLKALFLPKRLSIIHCPGHQKGNRAEARGNRMADQAAREVATRETPETSTLLAGKRTADGSEFEKRTADGSEFESPKKKAKVE

SEQ ID NO: 2462 - protein, 2096 aa, synthetic construct
MPAAKRVKLDGGDKKYSIGLDIGTNSVGWAVITDEYKVPSKKFKVLGNTDRHSIKKNLIGALLFDSGETAEATRLKRTARRRYTRRKNRICYLQEIFSNEMAKVDDSFFHRLEESFLVEEDKKHERHPIFGNIVDEVAYHEKYPTIYHLRKKLVDSTDKADLRLIYLALAHMIKFRGHFLIEGDLNPDNSDVDKLFIQLVQTYNQLFEENPINASGVDAKAILSARLSKSRRLENLIAQLPGEKKNGLFGNLIALSLGLTPNFKSNFDLAEDAKLQLSKDTYDDDLDNLLAQIGDQYADLFLAAKNLSDAILLSDILRVNTEITKAPLSASMIKRYDEHHQDLTLLKALVRQQLPEKYKEIFFDQSKNGYAGYIDGGASQEEFYKFIKPILEKMDGTEELLVKLNREDLLRKQRTFDNGSIPHQIHLGELHAILRRQEDFYPFLKDNREKIEKILTFRIPYYVGPLARGNSRFAWMTRKSEETITPWNFEEVVDKGASAQSFIERMTNFDKNLPNEKVLPKHSLLYEYFTVYNELTKVKYVTEGMRKPAFLSGEQKKAIVDLLFKTNRKVTVKQLKEDYFKKIECFDSVEISGVEDRFNASLGTYHDLLKIIKDKDFLDNEENEDILEDIVLTLTLFEDREMIEERLKTYAHLFDDKVMKQLKRRRYTGWGRLSRKLINGIRDKQSGKTILDFLKSDGFANRNFMQLIHDDSLTFKEDIQKAQVSGQGDSLHEHIANLAGSPAIKKGILQTVKVVDELVKVMGRHKPENIVIEMARENQTTQKGQKNSRERMKRIEEGIKELGSQILKEHPVENTQLQNEKLYLYYLQNGRDMYVDQELDINRLSDYDVDHIVPQSFLKDDSIDNKVLTRSDKARGKSDNVPSEEVVKKMKNYWRQLLNAKLITQRKFDNLTKAERGGLSELDKAGFIKRQLVETRQITKHVAQILDSRMNTKYDENDKLIREVKVITLKSKLVSDFRKDFQFYKVREINNYHHAHDAYLNAVVGTALIKKYPKLESEFVYGDYKVYDVRKMIAKSEQEIGKATAKYFFYSNIMNFFKTEITLANGEIRKRPLIETNGETGEIVWDKGRDFATVRKVLSMPQVNIVKKTEVQTGGFSKESILPKRNSDKLIARKKDWDPKKYGGFDSPTVAYSVLVVAKVEKGKSKKLKSVKELLGITIMERSSFEKNPIDFLEAKGYKEVKKDLIIKLPKYSLFELENGRKRMLASAGELQKGNELALPSKYVNFLYLASHYEKLKGSPEDNEQKQLFVEQHKHYLDEIIEQISEFSKRVILADANLDKVLSAYNKHRDKPIREQAENIIHLFTLTNLGAPAAFKYFDTTIDRKRYTSTKEVLDATLIHQSITGLYETRIDLSQLGGDGGEAAAKGGGGSSGGTLNIEDEYRLHETSKGPDVPLGSTWLSDFPQAWAETGGMGLAVRQAPLIIPLKATSTPVSIKQYPMSQEARLGIKPHIQRLLDQGILVPCQSPWNTPLLPVKKPGTNDYRPVQDLREVNKRVEDIHPTVPNPYNLLSGLPPSHQWYTVLDLKDAFFCLRLHPTSQSLFAFEWRDPEMGISGQLTWTRLPQGFKNSPTLFNEALHRDLADFRIQHPDLILLQYVDDLLLAATSELDCQQGTRALLQTLGDLGYRASAKKAQICQKQVKYLGYLLKEGQRWLTEARKETVMGQPTPKTPRQLREFLGTAGFCRLWIPGFAEMAAPLYPLTKPGTLFEWGPDQQKAYQEIKQALLTAPALGLPDLTKPFELFVDEKQGYAKGVLTQKLGPWRRPVAYLSKKLDPVAAGWPPCLRMVAAIAVLTKDAGKLTMGQPLVILAPHAVEALVKQPPDRWLSNARMTHYQALLLDTDRVQFGPIVALNPATLLPLPEEGLQHDCLDILAEAHGTRPDLTDQPLPDADHTWYTDGSSFLQEGQRKAGAAVTTETEVVWAKALPAGTSAQRAELIALTQALKMAEGKKLNVYTDSRYAFATAHIHGEIYRRRGWLTSEGKEIKNKDEILALLKALFLPKRLSIIHCPGHQKGNRAEARGNRMADQAAREVATRETPETSTLLAGKRTADGSEFEKRTADGSEFESPKKKAKVE

SEQ ID NO: 2463 - protein, 2094 aa, synthetic construct
MPAAKRVKLDGGDKKYSIGLDIGTNSVGWAVITDEYKVPSKKFKVLGNTDRHSIKKNLIGALLFDSGETAEATRLKRTARRRYTRRKNRICYLQEIFSNEMAKVDDSFFHRLEESFLVEEDKKHERHPIFGNIVDEVAYHEKYPTIYHLRKKLVDSTDKADLRLIYLALAHMIKFRGHFLIEGDLNPDNSDVDKLFIQLVQTYNQLFEENPINASGVDAKAILSARLSKSRRLENLIAQLPGEKKNGLFGNLIALSLGLTPNFKSNFDLAEDAKLQLSKDTYDDDLDNLLAQIGDQYADLFLAAKNLSDAILLSDILRVNTEITKAPLSASMIKRYDEHHQDLTLLKALVRQQLPEKYKEIFFDQSKNGYAGYIDGGASQEEFYKFIKPILEKMDGTEELLVKLNREDLLRKQRTFDNGSIPHQIHLGELHAILRRQEDFYPFLKDNREKIEKILTFRIPYYVGPLARGNSRFAWMTRKSEETITPWNFEEVVDKGASAQSFIERMTNFDKNLPNEKVLPKHSLLYEYFTVYNELTKVKYVTEGMRKPAFLSGEQKKAIVDLLFKTNRKVTVKQLKEDYFKKIECFDSVEISGVEDRFNASLGTYHDLLKIIKDKDFLDNEENEDILEDIVLTLTLFEDREMIEERLKTYAHLFDDKVMKQLKRRRYTGWGRLSRKLINGIRDKQSGKTILDFLKSDGFANRNFMQLIHDDSLTFKEDIQKAQVSGQGDSLHEHIANLAGSPAIKKGILQTVKVVDELVKVMGRHKPENIVIEMARENQTTQKGQKNSRERMKRIEEGIKELGSQILKEHPVENTQLQNEKLYLYYLQNGRDMYVDQELDINRLSDYDVDHIVPQSFLKDDSIDNKVLTRSDKARGKSDNVPSEEVVKKMKNYWRQLLNAKLITQRKFDNLTKAERGGLSELDKAGFIKRQLVETRQITKHVAQILDSRMNTKYDENDKLIREVKVITLKSKLVSDFRKDFQFYKVREINNYHHAHDAYLNAVVGTALIKKYPKLESEFVYGDYKVYDVRKMIAKSEQEIGKATAKYFFYSNIMNFFKTEITLANGEIRKRPLIETNGETGEIVWDKGRDFATVRKVLSMPQVNIVKKTEVQTGGFSKESILPKRNSDKLIARKKDWDPKKYGGFDSPTVAYSVLVVAKVEKGKSKKLKSVKELLGITIMERSSFEKNPIDFLEAKGYKEVKKDLIIKLPKYSLFELENGRKRMLASAGELQKGNELALPSKYVNFLYLASHYEKLKGSPEDNEQKQLFVEQHKHYLDEIIEQISEFSKRVILADANLDKVLSAYNKHRDKPIREQAENIIHLFTLTNLGAPAAFKYFDTTIDRKRYTSTKEVLDATLIHQSITGLYETRIDLSQLGGDGGGSSGGSGGGGGTLNIEDEYRLHETSKGPDVPLGSTWLSDFPQAWAETGGMGLAVRQAPLIIPLKATSTPVSIKQYPMSQEARLGIKPHIQRLLDQGILVPCQSPWNTPLLPVKKPGTNDYRPVQDLREVNKRVEDIHPTVPNPYNLLSGLPPSHQWYTVLDLKDAFFCLRLHPTSQSLFAFEWRDPEMGISGQLTWTRLPQGFKNSPTLFNEALHRDLADFRIQHPDLILLQYVDDLLLAATSELDCQQGTRALLQTLGDLGYRASAKKAQICQKQVKYLGYLLKEGQRWLTEARKETVMGQPTPKTPRQLREFLGTAGFCRLWIPGFAEMAAPLYPLTKPGTLFEWGPDQQKAYQEIKQALLTAPALGLPDLTKPFELFVDEKQGYAKGVLTQKLGPWRRPVAYLSKKLDPVAAGWPPCLRMVAAIAVLTKDAGKLTMGQPLVILAPHAVEALVKQPPDRWLSNARMTHYQALLLDTDRVQFGPIVALNPATLLPLPEEGLQHDCLDILAEAHGTRPDLTDQPLPDADHTWYTDGSSFLQEGQRKAGAAVTTETEVVWAKALPAGTSAQRAELIALTQALKMAEGKKLNVYTDSRYAFATAHIHGEIYRRRGWLTSEGKEIKNKDEILALLKALFLPKRLSIIHCPGHQKGNRAEARGNRMADQAAREVATRETPETSTLLAGKRTADGSEFEKRTADGSEFESPKKKAKVE

SEQ ID NO: 2464 - protein, 2105 aa, synthetic construct
MPAAKRVKLDGGDKKYSIGLDIGTNSVGWAVITDEYKVPSKKFKVLGNTDRHSIKKNLIGALLFDSGETAEATRLKRTARRRYTRRKNRICYLQEIFSNEMAKVDDSFFHRLEESFLVEEDKKHERHPIFGNIVDEVAYHEKYPTIYHLRKKLVDSTDKADLRLIYLALAHMIKFRGHFLIEGDLNPDNSDVDKLFIQLVQTYNQLFEENPINASGVDAKAILSARLSKSRRLENLIAQLPGEKKNGLFGNLIALSLGLTPNFKSNFDLAEDAKLQLSKDTYDDDLDNLLAQIGDQYADLFLAAKNLSDAILLSDILRVNTEITKAPLSASMIKRYDEHHQDLTLLKALVRQQLPEKYKEIFFDQSKNGYAGYIDGGASQEEFYKFIKPILEKMDGTEELLVKLNREDLLRKQRTFDNGSIPHQIHLGELHAILRRQEDFYPFLKDNREKIEKILTFRIPYYVGPLARGNSRFAWMTRKSEETITPWNFEEVVDKGASAQSFIERMTNFDKNLPNEKVLPKHSLLYEYFTVYNELTKVKYVTEGMRKPAFLSGEQKKAIVDLLFKTNRKVTVKQLKEDYFKKIECFDSVEISGVEDRFNASLGTYHDLLKIIKDKDFLDNEENEDILEDIVLTLTLFEDREMIEERLKTYAHLFDDKVMKQLKRRRYTGWGRLSRKLINGIRDKQSGKTILDFLKSDGFANRNFMQLIHDDSLTFKEDIQKAQVSGQGDSLHEHIANLAGSPAIKKGILQTVKVVDELVKVMGRHKPENIVIEMARENQTTQKGQKNSRERMKRIEEGIKELGSQILKEHPVENTQLQNEKLYLYYLQNGRDMYVDQELDINRLSDYDVDHIVPQSFLKDDSIDNKVLTRSDKARGKSDNVPSEEVVKKMKNYWRQLLNAKLITQRKFDNLTKAERGGLSELDKAGFIKRQLVETRQITKHVAQILDSRMNTKYDENDKLIREVKVITLKSKLVSDFRKDFQFYKVREINNYHHAHDAYLNAVVGTALIKKYPKLESEFVYGDYKVYDVRKMIAKSEQEIGKATAKYFFYSNIMNFFKTEITLANGEIRKRPLIETNGETGEIVWDKGRDFATVRKVLSMPQVNIVKKTEVQTGGFSKESILPKRNSDKLIARKKDWDPKKYGGFDSPTVAYSVLVVAKVEKGKSKKLKSVKELLGITIMERSSFEKNPIDFLEAKGYKEVKKDLIIKLPKYSLFELENGRKRMLASAGELQKGNELALPSKYVNFLYLASHYEKLKGSPEDNEQKQLFVEQHKHYLDEIIEQISEFSKRVILADANLDKVLSAYNKHRDKPIREQAENIIHLFTLTNLGAPAAFKYFDTTIDRKRYTSTKEVLDATLIHQSITGLYETRIDLSQLGGDGGGGGGSGGGGSGGGGSGGGGSGGTLNIEDEYRLHETSKGPDVPLGSTWLSDFPQAWAETGGMGLAVRQAPLIIPLKATSTPVSIKQYPMSQEARLGIKPHIQRLLDQGILVPCQSPWNTPLLPVKKPGTNDYRPVQDLREVNKRVEDIHPTVPNPYNLLSGLPPSHQWYTVLDLKDAFFCLRLHPTSQSLFAFEWRDPEMGISGQLTWTRLPQGFKNSPTLFNEALHRDLADFRIQHPDLILLQYVDDLLLAATSELDCQQGTRALLQTLGDLGYRASAKKAQICQKQVKYLGYLLKEGQRWLTEARKETVMGQPTPKTPRQLREFLGTAGFCRLWIPGFAEMAAPLYPLTKPGTLFEWGPDQQKAYQEIKQALLTAPALGLPDLTKPFELFVDEKQGYAKGVLTQKLGPWRRPVAYLSKKLDPVAAGWPPCLRMVAAIAVLTKDAGKLTMGQPLVILAPHAVEALVKQPPDRWLSNARMTHYQALLLDTDRVQFGPIVALNPATLLPLPEEGLQHDCLDILAEAHGTRPDLTDQPLPDADHTWYTDGSSFLQEGQRKAGAAVTTETEVVWAKALPAGTSAQRAELIALTQALKMAEGKKLNVYTDSRYAFATAHIHGEIYRRRGWLTSEGKEIKNKDEILALLKALFLPKRLSIIHCPGHQKGNRAEARGNRMADQAAREVATRETPETSTLLAGKRTADGSEFEKRTADGSEFESPKKKAKVE

SEQ ID NO: 2465 - protein, 2100 aa, synthetic construct
MPAAKRVKLDGGDKKYSIGLDIGTNSVGWAVITDEYKVPSKKFKVLGNTDRHSIKKNLIGALLFDSGETAEATRLKRTARRRYTRRKNRICYLQEIFSNEMAKVDDSFFHRLEESFLVEEDKKHERHPIFGNIVDEVAYHEKYPTIYHLRKKLVDSTDKADLRLIYLALAHMIKFRGHFLIEGDLNPDNSDVDKLFIQLVQTYNQLFEENPINASGVDAKAILSARLSKSRRLENLIAQLPGEKKNGLFGNLIALSLGLTPNFKSNFDLAEDAKLQLSKDTYDDDLDNLLAQIGDQYADLFLAAKNLSDAILLSDILRVNTEITKAPLSASMIKRYDEHHQDLTLLKALVRQQLPEKYKEIFFDQSKNGYAGYIDGGASQEEFYKFIKPILEKMDGTEELLVKLNREDLLRKQRTFDNGSIPHQIHLGELHAILRRQEDFYPFLKDNREKIEKILTFRIPYYVGPLARGNSRFAWMTRKSEETITPWNFEEVVDKGASAQSFIERMTNFDKNLPNEKVLPKHSLLYEYFTVYNELTKVKYVTEGMRKPAFLSGEQKKAIVDLLFKTNRKVTVKQLKEDYFKKIECFDSVEISGVEDRFNASLGTYHDLLKIIKDKDFLDNEENEDILEDIVLTLTLFEDREMIEERLKTYAHLFDDKVMKQLKRRRYTGWGRLSRKLINGIRDKQSGKTILDFLKSDGFANRNFMQLIHDDSLTFKEDIQKAQVSGQGDSLHEHIANLAGSPAIKKGILQTVKVVDELVKVMGRHKPENIVIEMARENQTTQKGQKNSRERMKRIEEGIKELGSQILKEHPVENTQLQNEKLYLYYLQNGRDMYVDQELDINRLSDYDVDHIVPQSFLKDDSIDNKVLTRSDKARGKSDNVPSEEVVKKMKNYWRQLLNAKLITQRKFDNLTKAERGGLSELDKAGFIKRQLVETRQITKHVAQILDSRMNTKYDENDKLIREVKVITLKSKLVSDFRKDFQFYKVREINNYHHAHDAYLNAVVGTALIKKYPKLESEFVYGDYKVYDVRKMIAKSEQEIGKATAKYFFYSNIMNFFKTEITLANGEIRKRPLIETNGETGEIVWDKGRDFATVRKVLSMPQVNIVKKTEVQTGGFSKESILPKRNSDKLIARKKDWDPKKYGGFDSPTVAYSVLVVAKVEKGKSKKLKSVKELLGITIMERSSFEKNPIDFLEAKGYKEVKKDLIIKLPKYSLFELENGRKRMLASAGELQKGNELALPSKYVNFLYLASHYEKLKGSPEDNEQKQLFVEQHKHYLDEIIEQISEFSKRVILADANLDKVLSAYNKHRDKPIREQAENIIHLFTLTNLGAPAAFKYFDTTIDRKRYTSTKEVLDATLIHQSITGLYETRIDLSQLGGDGGGGSGGSGGSGGSGGSGGTLNIEDEYRLHETSKGPDVPLGSTWLSDFPQAWAETGGMGLAVRQAPLIIPLKATSTPVSIKQYPMSQEARLGIKPHIQRLLDQGILVPCQSPWNTPLLPVKKPGTNDYRPVQDLREVNKRVEDIHPTVPNPYNLLSGLPPSHQWYTVLDLKDAFFCLRLHPTSQSLFAFEWRDPEMGISGQLTWTRLPQGFKNSPTLFNEALHRDLADFRIQHPDLILLQYVDDLLLAATSELDCQQGTRALLQTLGDLGYRASAKKAQICQKQVKYLGYLLKEGQRWLTEARKETVMGQPTPKTPRQLREFLGTAGFCRLWIPGFAEMAAPLYPLTKPGTLFEWGPDQQKAYQEIKQALLTAPALGLPDLTKPFELFVDEKQGYAKGVLTQKLGPWRRPVAYLSKKLDPVAAGWPPCLRMVAAIAVLTKDAGKLTMGQPLVILAPHAVEALVKQPPDRWLSNARMTHYQALLLDTDRVQFGPIVALNPATLLPLPEEGLQHDCLDILAEAHGTRPDLTDQPLPDADHTWYTDGSSFLQEGQRKAGAAVTTETEVVWAKALPAGTSAQRAELIALTQALKMAEGKKLNVYTDSRYAFATAHIHGEIYRRRGWLTSEGKEIKNKDEILALLKALFLPKRLSIIHCPGHQKGNRAEARGNRMADQAAREVATRETPETSTLLAGKRTADGSEFEKRTADGSEFESPKKKAKVE

SEQ ID NO: 2466 - protein, 2096 aa, synthetic construct
MPAAKRVKLDGGDKKYSIGLDIGTNSVGWAVITDEYKVPSKKFKVLGNTDRHSIKKNLIGALLFDSGETAEATRLKRTARRRYTRRKNRICYLQEIFSNEMAKVDDSFFHRLEESFLVEEDKKHERHPIFGNIVDEVAYHEKYPTIYHLRKKLVDSTDKADLRLIYLALAHMIKFRGHFLIEGDLNPDNSDVDKLFIQLVQTYNQLFEENPINASGVDAKAILSARLSKSRRLENLIAQLPGEKKNGLFGNLIALSLGLTPNFKSNFDLAEDAKLQLSKDTYDDDLDNLLAQIGDQYADLFLAAKNLSDAILLSDILRVNTEITKAPLSASMIKRYDEHHQDLTLLKALVRQQLPEKYKEIFFDQSKNGYAGYIDGGASQEEFYKFIKPILEKMDGTEELLVKLNREDLLRKQRTFDNGSIPHQIHLGELHAILRRQEDFYPFLKDNREKIEKILTFRIPYYVGPLARGNSRFAWMTRKSEETITPWNFEEVVDKGASAQSFIERMTNFDKNLPNEKVLPKHSLLYEYFTVYNELTKVKYVTEGMRKPAFLSGEQKKAIVDLLFKTNRKVTVKQLKEDYFKKIECFDSVEISGVEDRFNASLGTYHDLLKIIKDKDFLDNEENEDILEDIVLTLTLFEDREMIEERLKTYAHLFDDKVMKQLKRRRYTGWGRLSRKLINGIRDKQSGKTILDFLKSDGFANRNFMQLIHDDSLTFKEDIQKAQVSGQGDSLHEHIANLAGSPAIKKGILQTVKVVDELVKVMGRHKPENIVIEMARENQTTQKGQKNSRERMKRIEEGIKELGSQILKEHPVENTQLQNEKLYLYYLQNGRDMYVDQELDINRLSDYDVDHIVPQSFLKDDSIDNKVLTRSDKARGKSDNVPSEEVVKKMKNYWRQLLNAKLITQRKFDNLTKAERGGLSELDKAGFIKRQLVETRQITKHVAQILDSRMNTKYDENDKLIREVKVITLKSKLVSDFRKDFQFYKVREINNYHHAHDAYLNAVVGTALIKKYPKLESEFVYGDYKVYDVRKMIAKSEQEIGKATAKYFFYSNIMNFFKTEITLANGEIRKRPLIETNGETGEIVWDKGRDFATVRKVLSMPQVNIVKKTEVQTGGFSKESILPKRNSDKLIARKKDWDPKKYGGFDSPTVAYSVLVVAKVEKGKSKKLKSVKELLGITIMERSSFEKNPIDFLEAKGYKEVKKDLIIKLPKYSLFELENGRKRMLASAGELQKGNELALPSKYVNFLYLASHYEKLKGSPEDNEQKQLFVEQHKHYLDEIIEQISEFSKRVILADANLDKVLSAYNKHRDKPIREQAENIIHLFTLTNLGAPAAFKYFDTTIDRKRYTSTKEVLDATLIHQSITGLYETRIDLSQLGGDGGPAPEAAAKGSSGGTLNIEDEYRLHETSKGPDVPLGSTWLSDFPQAWAETGGMGLAVRQAPLIIPLKATSTPVSIKQYPMSQEARLGIKPHIQRLLDQGILVPCQSPWNTPLLPVKKPGTNDYRPVQDLREVNKRVEDIHPTVPNPYNLLSGLPPSHQWYTVLDLKDAFFCLRLHPTSQSLFAFEWRDPEMGISGQLTWTRLPQGFKNSPTLFNEALHRDLADFRIQHPDLILLQYVDDLLLAATSELDCQQGTRALLQTLGDLGYRASAKKAQICQKQVKYLGYLLKEGQRWLTEARKETVMGQPTPKTPRQLREFLGTAGFCRLWIPGFAEMAAPLYPLTKPGTLFEWGPDQQKAYQEIKQALLTAPALGLPDLTKPFELFVDEKQGYAKGVLTQKLGPWRRPVAYLSKKLDPVAAGWPPCLRMVAAIAVLTKDAGKLTMGQPLVILAPHAVEALVKQPPDRWLSNARMTHYQALLLDTDRVQFGPIVALNPATLLPLPEEGLQHDCLDILAEAHGTRPDLTDQPLPDADHTWYTDGSSFLQEGQRKAGAAVTTETEVVWAKALPAGTSAQRAELIALTQALKMAEGKKLNVYTDSRYAFATAHIHGEIYRRRGWLTSEGKEIKNKDEILALLKALFLPKRLSIIHCPGHQKGNRAEARGNRMADQAAREVATRETPETSTLLAGKRTADGSEFEKRTADGSEFESPKKKAKVE

SEQ ID NO: 2467 - protein, 2094 aa, synthetic construct
MPAAKRVKLDGGDKKYSIGLDIGTNSVGWAVITDEYKVPSKKFKVLGNTDRHSIKKNLIGALLFDSGETAEATRLKRTARRRYTRRKNRICYLQEIFSNEMAKVDDSFFHRLEESFLVEEDKKHERHPIFGNIVDEVAYHEKYPTIYHLRKKLVDSTDKADLRLIYLALAHMIKFRGHFLIEGDLNPDNSDVDKLFIQLVQTYNQLFEENPINASGVDAKAILSARLSKSRRLENLIAQLPGEKKNGLFGNLIALSLGLTPNFKSNFDLAEDAKLQLSKDTYDDDLDNLLAQIGDQYADLFLAAKNLSDAILLSDILRVNTEITKAPLSASMIKRYDEHHQDLTLLKALVRQQLPEKYKEIFFDQSKNGYAGYIDGGASQEEFYKFIKPILEKMDGTEELLVKLNREDLLRKQRTFDNGSIPHQIHLGELHAILRRQEDFYPFLKDNREKIEKILTFRIPYYVGPLARGNSRFAWMTRKSEETITPWNFEEVVDKGASAQSFIERMTNFDKNLPNEKVLPKHSLLYEYFTVYNELTKVKYVTEGMRKPAFLSGEQKKAIVDLLFKTNRKVTVKQLKEDYFKKIECFDSVEISGVEDRFNASLGTYHDLLKIIKDKDFLDNEENEDILEDIVLTLTLFEDREMIEERLKTYAHLFDDKVMKQLKRRRYTGWGRLSRKLINGIRDKQSGKTILDFLKSDGFANRNFMQLIHDDSLTFKEDIQKAQVSGQGDSLHEHIANLAGSPAIKKGILQTVKVVDELVKVMGRHKPENIVIEMARENQTTQKGQKNSRERMKRIEEGIKELGSQILKEHPVENTQLQNEKLYLYYLQNGRDMYVDQELDINRLSDYDVDHIVPQSFLKDDSIDNKVLTRSDKARGKSDNVPSEEVVKKMKNYWRQLLNAKLITQRKFDNLTKAERGGLSELDKAGFIKRQLVETRQITKHVAQILDSRMNTKYDENDKLIREVKVITLKSKLVSDFRKDFQFYKVREINNYHHAHDAYLNAVVGTALIKKYPKLESEFVYGDYKVYDVRKMIAKSEQEIGKATAKYFFYSNIMNFFKTEITLANGEIRKRPLIETNGETGEIVWDKGRDFATVRKVLSMPQVNIVKKTEVQTGGFSKESILPKRNSDKLIARKKDWDPKKYGGFDSPTVAYSVLVVAKVEKGKSKKLKSVKELLGITIMERSSFEKNPIDFLEAKGYKEVKKDLIIKLPKYSLFELENGRKRMLASAGELQKGNELALPSKYVNFLYLASHYEKLKGSPEDNEQKQLFVEQHKHYLDEIIEQISEFSKRVILADANLDKVLSAYNKHRDKPIREQAENIIHLFTLTNLGAPAAFKYFDTTIDRKRYTSTKEVLDATLIHQSITGLYETRIDLSQLGGDGGPAPGGSGSSGGTLNIEDEYRLHETSKGPDVPLGSTWLSDFPQAWAETGGMGLAVRQAPLIIPLKATSTPVSIKQYPMSQEARLGIKPHIQRLLDQGILVPCQSPWNTPLLPVKKPGTNDYRPVQDLREVNKRVEDIHPTVPNPYNLLSGLPPSHQWYTVLDLKDAFFCLRLHPTSQSLFAFEWRDPEMGISGQLTWTRLPQGFKNSPTLFNEALHRDLADFRIQHPDLILLQYVDDLLLAATSELDCQQGTRALLQTLGDLGYRASAKKAQICQKQVKYLGYLLKEGQRWLTEARKETVMGQPTPKTPRQLREFLGTAGFCRLWIPGFAEMAAPLYPLTKPGTLFEWGPDQQKAYQEIKQALLTAPALGLPDLTKPFELFVDEKQGYAKGVLTQKLGPWRRPVAYLSKKLDPVAAGWPPCLRMVAAIAVLTKDAGKLTMGQPLVILAPHAVEALVKQPPDRWLSNARMTHYQALLLDTDRVQFGPIVALNPATLLPLPEEGLQHDCLDILAEAHGTRPDLTDQPLPDADHTWYTDGSSFLQEGQRKAGAAVTTETEVVWAKALPAGTSAQRAELIALTQALKMAEGKKLNVYTDSRYAFATAHIHGEIYRRRGWLTSEGKEIKNKDEILALLKALFLPKRLSIIHCPGHQKGNRAEARGNRMADQAAREVATRETPETSTLLAGKRTADGSEFEKRTADGSEFESPKKKAKVE

SEQ ID NO: 2468 - protein, 2091 aa, synthetic construct
MPAAKRVKLDGGDKKYSIGLDIGTNSVGWAVITDEYKVPSKKFKVLGNTDRHSIKKNLIGALLFDSGETAEATRLKRTARRRYTRRKNRICYLQEIFSNEMAKVDDSFFHRLEESFLVEEDKKHERHPIFGNIVDEVAYHEKYPTIYHLRKKLVDSTDKADLRLIYLALAHMIKFRGHFLIEGDLNPDNSDVDKLFIQLVQTYNQLFEENPINASGVDAKAILSARLSKSRRLENLIAQLPGEKKNGLFGNLIALSLGLTPNFKSNFDLAEDAKLQLSKDTYDDDLDNLLAQIGDQYADLFLAAKNLSDAILLSDILRVNTEITKAPLSASMIKRYDEHHQDLTLLKALVRQQLPEKYKEIFFDQSKNGYAGYIDGGASQEEFYKFIKPILEKMDGTEELLVKLNREDLLRKQRTFDNGSIPHQIHLGELHAILRRQEDFYPFLKDNREKIEKILTFRIPYYVGPLARGNSRFAWMTRKSEETITPWNFEEVVDKGASAQSFIERMTNFDKNLPNEKVLPKHSLLYEYFTVYNELTKVKYVTEGMRKPAFLSGEQKKAIVDLLFKTNRKVTVKQLKEDYFKKIECFDSVEISGVEDRFNASLGTYHDLLKIIKDKDFLDNEENEDILEDIVLTLTLFEDREMIEERLKTYAHLFDDKVMKQLKRRRYTGWGRLSRKLINGIRDKQSGKTILDFLKSDGFANRNFMQLIHDDSLTFKEDIQKAQVSGQGDSLHEHIANLAGSPAIKKGILQTVKVVDELVKVMGRHKPENIVIEMARENQTTQKGQKNSRERMKRIEEGIKELGSQILKEHPVENTQLQNEKLYLYYLQNGRDMYVDQELDINRLSDYDVDHIVPQSFLKDDSIDNKVLTRSDKARGKSDNVPSEEVVKKMKNYWRQLLNAKLITQRKFDNLTKAERGGLSELDKAGFIKRQLVETRQITKHVAQILDSRMNTKYDENDKLIREVKVITLKSKLVSDFRKDFQFYKVREINNYHHAHDAYLNAVVGTALIKKYPKLESEFVYGDYKVYDVRKMIAKSEQEIGKATAKYFFYSNIMNFFKTEITLANGEIRKRPLIETNGETGEIVWDKGRDFATVRKVLSMPQVNIVKKTEVQTGGFSKESILPKRNSDKLIARKKDWDPKKYGGFDSPTVAYSVLVVAKVEKGKSKKLKSVKELLGITIMERSSFEKNPIDFLEAKGYKEVKKDLIIKLPKYSLFELENGRKRMLASAGELQKGNELALPSKYVNFLYLASHYEKLKGSPEDNEQKQLFVEQHKHYLDEIIEQISEFSKRVILADANLDKVLSAYNKHRDKPIREQAENIIHLFTLTNLGAPAAFKYFDTTIDRKRYTSTKEVLDATLIHQSITGLYETRIDLSQLGGDGGGGGGSSGGTLNIEDEYRLHETSKGPDVPLGSTWLSDFPQAWAETGGMGLAVRQAPLIIPLKATSTPVSIKQYPMSQEARLGIKPHIQRLLDQGILVPCQSPWNTPLLPVKKPGTNDYRPVQDLREVNKRVEDIHPTVPNPYNLLSGLPPSHQWYTVLDLKDAFFCLRLHPTSQSLFAFEWRDPEMGISGQLTWTRLPQGFKNSPTLFNEALHRDLADFRIQHPDLILLQYVDDLLLAATSELDCQQGTRALLQTLGDLGYRASAKKAQICQKQVKYLGYLLKEGQRWLTEARKETVMGQPTPKTPRQLREFLGTAGFCRLWIPGFAEMAAPLYPLTKPGTLFEWGPDQQKAYQEIKQALLTAPALGLPDLTKPFELFVDEKQGYAKGVLTQKLGPWRRPVAYLSKKLDPVAAGWPPCLRMVAAIAVLTKDAGKLTMGQPLVILAPHAVEALVKQPPDRWLSNARMTHYQALLLDTDRVQFGPIVALNPATLLPLPEEGLQHDCLDILAEAHGTRPDLTDQPLPDADHTWYTDGSSFLQEGQRKAGAAVTTETEVVWAKALPAGTSAQRAELIALTQALKMAEGKKLNVYTDSRYAFATAHIHGEIYRRRGWLTSEGKEIKNKDEILALLKALFLPKRLSIIHCPGHQKGNRAEARGNRMADQAAREVATRETPETSTLLAGKRTADGSEFEKRTADGSEFESPKKKAKVE

SEQ ID NO: 2469 - protein, 2096 aa, synthetic construct
MPAAKRVKLDGGDKKYSIGLDIGTNSVGWAVITDEYKVPSKKFKVLGNTDRHSIKKNLIGALLFDSGETAEATRLKRTARRRYTRRKNRICYLQEIFSNEMAKVDDSFFHRLEESFLVEEDKKHERHPIFGNIVDEVAYHEKYPTIYHLRKKLVDSTDKADLRLIYLALAHMIKFRGHFLIEGDLNPDNSDVDKLFIQLVQTYNQLFEENPINASGVDAKAILSARLSKSRRLENLIAQLPGEKKNGLFGNLIALSLGLTPNFKSNFDLAEDAKLQLSKDTYDDDLDNLLAQIGDQYADLFLAAKNLSDAILLSDILRVNTEITKAPLSASMIKRYDEHHQDLTLLKALVRQQLPEKYKEIFFDQSKNGYAGYIDGGASQEEFYKFIKPILEKMDGTEELLVKLNREDLLRKQRTFDNGSIPHQIHLGELHAILRRQEDFYPFLKDNREKIEKILTFRIPYYVGPLARGNSRFAWMTRKSEETITPWNFEEVVDKGASAQSFIERMTNFDKNLPNEKVLPKHSLLYEYFTVYNELTKVKYVTEGMRKPAFLSGEQKKAIVDLLFKTNRKVTVKQLKEDYFKKIECFDSVEISGVEDRFNASLGTYHDLLKIIKDKDFLDNEENEDILEDIVLTLTLFEDREMIEERLKTYAHLFDDKVMKQLKRRRYTGWGRLSRKLINGIRDKQSGKTILDFLKSDGFANRNFMQLIHDDSLTFKEDIQKAQVSGQGDSLHEHIANLAGSPAIKKGILQTVKVVDELVKVMGRHKPENIVIEMARENQTTQKGQKNSRERMKRIEEGIKELGSQILKEHPVENTQLQNEKLYLYYLQNGRDMYVDQELDINRLSDYDVDHIVPQSFLKDDSIDNKVLTRSDKARGKSDNVPSEEVVKKMKNYWRQLLNAKLITQRKFDNLTKAERGGLSELDKAGFIKRQLVETRQITKHVAQILDSRMNTKYDENDKLIREVKVITLKSKLVSDFRKDFQFYKVREINNYHHAHDAYLNAVVGTALIKKYPKLESEFVYGDYKVYDVRKMIAKSEQEIGKATAKYFFYSNIMNFFKTEITLANGEIRKRPLIETNGETGEIVWDKGRDFATVRKVLSMPQVNIVKKTEVQTGGFSKESILPKRNSDKLIARKKDWDPKKYGGFDSPTVAYSVLVVAKVEKGKSKKLKSVKELLGITIMERSSFEKNPIDFLEAKGYKEVKKDLIIKLPKYSLFELENGRKRMLASAGELQKGNELALPSKYVNFLYLASHYEKLKGSPEDNEQKQLFVEQHKHYLDEIIEQISEFSKRVILADANLDKVLSAYNKHRDKPIREQAENIIHLFTLTNLGAPAAFKYFDTTIDRKRYTSTKEVLDATLIHQSITGLYETRIDLSQLGGDGGEAAAKGSSPAPGGTLNIEDEYRLHETSKGPDVPLGSTWLSDFPQAWAETGGMGLAVRQAPLIIPLKATSTPVSIKQYPMSQEARLGIKPHIQRLLDQGILVPCQSPWNTPLLPVKKPGTNDYRPVQDLREVNKRVEDIHPTVPNPYNLLSGLPPSHQWYTVLDLKDAFFCLRLHPTSQSLFAFEWRDPEMGISGQLTWTRLPQGFKNSPTLFNEALHRDLADFRIQHPDLILLQYVDDLLLAATSELDCQQGTRALLQTLGDLGYRASAKKAQICQKQVKYLGYLLKEGQRWLTEARKETVMGQPTPKTPRQLREFLGTAGFCRLWIPGFAEMAAPLYPLTKPGTLFEWGPDQQKAYQEIKQALLTAPALGLPDLTKPFELFVDEKQGYAKGVLTQKLGPWRRPVAYLSKKLDPVAAGWPPCLRMVAAIAVLTKDAGKLTMGQPLVILAPHAVEALVKQPPDRWLSNARMTHYQALLLDTDRVQFGPIVALNPATLLPLPEEGLQHDCLDILAEAHGTRPDLTDQPLPDADHTWYTDGSSFLQEGQRKAGAAVTTETEVVWAKALPAGTSAQRAELIALTQALKMAEGKKLNVYTDSRYAFATAHIHGEIYRRRGWLTSEGKEIKNKDEILALLKALFLPKRLSIIHCPGHQKGNRAEARGNRMADQAAREVATRETPETSTLLAGKRTADGSEFEKRTADGSEFESPKKKAKVE

SEQ ID NO: 2470 - protein, 2096 aa, synthetic construct
MPAAKRVKLDGGDKKYSIGLDIGTNSVGWAVITDEYKVPSKKFKVLGNTDRHSIKKNLIGALLFDSGETAEATRLKRTARRRYTRRKNRICYLQEIFSNEMAKVDDSFFHRLEESFLVEEDKKHERHPIFGNIVDEVAYHEKYPTIYHLRKKLVDSTDKADLRLIYLALAHMIKFRGHFLIEGDLNPDNSDVDKLFIQLVQTYNQLFEENPINASGVDAKAILSARLSKSRRLENLIAQLPGEKKNGLFGNLIALSLGLTPNFKSNFDLAEDAKLQLSKDTYDDDLDNLLAQIGDQYADLFLAAKNLSDAILLSDILRVNTEITKAPLSASMIKRYDEHHQDLTLLKALVRQQLPEKYKEIFFDQSKNGYAGYIDGGASQEEFYKFIKPILEKMDGTEELLVKLNREDLLRKQRTFDNGSIPHQIHLGELHAILRRQEDFYPFLKDNREKIEKILTFRIPYYVGPLARGNSRFAWMTRKSEETITPWNFEEVVDKGASAQSFIERMTNFDKNLPNEKVLPKHSLLYEYFTVYNELTKVKYVTEGMRKPAFLSGEQKKAIVDLLFKTNRKVTVKQLKEDYFKKIECFDSVEISGVEDRFNASLGTYHDLLKIIKDKDFLDNEENEDILEDIVLTLTLFEDREMIEERLKTYAHLFDDKVMKQLKRRRYTGWGRLSRKLINGIRDKQSGKTILDFLKSDGFANRNFMQLIHDDSLTFKEDIQKAQVSGQGDSLHEHIANLAGSPAIKKGILQTVKVVDELVKVMGRHKPENIVIEMARENQTTQKGQKNSRERMKRIEEGIKELGSQILKEHPVENTQLQNEKLYLYYLQNGRDMYVDQELDINRLSDYDVDHIVPQSFLKDDSIDNKVLTRSDKARGKSDNVPSEEVVKKMKNYWRQLLNAKLITQRKFDNLTKAERGGLSELDKAGFIKRQLVETRQITKHVAQILDSRMNTKYDENDKLIREVKVITLKSKLVSDFRKDFQFYKVREINNYHHAHDAYLNAVVGTALIKKYPKLESEFVYGDYKVYDVRKMIAKSEQEIGKATAKYFFYSNIMNFFKTEITLANGEIRKRPLIETNGETGEIVWDKGRDFATVRKVLSMPQVNIVKKTEVQTGGFSKESILPKRNSDKLIARKKDWDPKKYGGFDSPTVAYSVLVVAKVEKGKSKKLKSVKELLGITIMERSSFEKNPIDFLEAKGYKEVKKDLIIKLPKYSLFELENGRKRMLASAGELQKGNELALPSKYVNFLYLASHYEKLKGSPEDNEQKQLFVEQHKHYLDEIIEQISEFSKRVILADANLDKVLSAYNKHRDKPIREQAENIIHLFTLTNLGAPAAFKYFDTTIDRKRYTSTKEVLDATLIHQSITGLYETRIDLSQLGGDGGGGSGSSEAAAKGGTLNIEDEYRLHETSKGPDVPLGSTWLSDFPQAWAETGGMGLAVRQAPLIIPLKATSTPVSIKQYPMSQEARLGIKPHIQRLLDQGILVPCQSPWNTPLLPVKKPGTNDYRPVQDLREVNKRVEDIHPTVPNPYNLLSGLPPSHQWYTVLDLKDAFFCLRLHPTSQSLFAFEWRDPEMGISGQLTWTRLPQGFKNSPTLFNEALHRDLADFRIQHPDLILLQYVDDLLLAATSELDCQQGTRALLQTLGDLGYRASAKKAQICQKQVKYLGYLLKEGQRWLTEARKETVMGQPTPKTPRQLREFLGTAGFCRLWIPGFAEMAAPLYPLTKPGTLFEWGPDQQKAYQEIKQALLTAPALGLPDLTKPFELFVDEKQGYAKGVLTQKLGPWRRPVAYLSKKLDPVAAGWPPCLRMVAAIAVLTKDAGKLTMGQPLVILAPHAVEALVKQPPDRWLSNARMTHYQALLLDTDRVQFGPIVALNPATLLPLPEEGLQHDCLDILAEAHGTRPDLTDQPLPDADHTWYTDGSSFLQEGQRKAGAAVTTETEVVWAKALPAGTSAQRAELIALTQALKMAEGKKLNVYTDSRYAFATAHIHGEIYRRRGWLTSEGKEIKNKDEILALLKALFLPKRLSIIHCPGHQKGNRAEARGNRMADQAAREVATRETPETSTLLAGKRTADGSEFEKRTADGSEFESPKKKAKVE

SEQ ID NO: 2471 - protein, 2094 aa, synthetic construct
MPAAKRVKLDGGDKKYSIGLDIGTNSVGWAVITDEYKVPSKKFKVLGNTDRHSIKKNLIGALLFDSGETAEATRLKRTARRRYTRRKNRICYLQEIFSNEMAKVDDSFFHRLEESFLVEEDKKHERHPIFGNIVDEVAYHEKYPTIYHLRKKLVDSTDKADLRLIYLALAHMIKFRGHFLIEGDLNPDNSDVDKLFIQLVQTYNQLFEENPINASGVDAKAILSARLSKSRRLENLIAQLPGEKKNGLFGNLIALSLGLTPNFKSNFDLAEDAKLQLSKDTYDDDLDNLLAQIGDQYADLFLAAKNLSDAILLSDILRVNTEITKAPLSASMIKRYDEHHQDLTLLKALVRQQLPEKYKEIFFDQSKNGYAGYIDGGASQEEFYKFIKPILEKMDGTEELLVKLNREDLLRKQRTFDNGSIPHQIHLGELHAILRRQEDFYPFLKDNREKIEKILTFRIPYYVGPLARGNSRFAWMTRKSEETITPWNFEEVVDKGASAQSFIERMTNFDKNLPNEKVLPKHSLLYEYFTVYNELTKVKYVTEGMRKPAFLSGEQKKAIVDLLFKTNRKVTVKQLKEDYFKKIECFDSVEISGVEDRFNASLGTYHDLLKIIKDKDFLDNEENEDILEDIVLTLTLFEDREMIEERLKTYAHLFDDKVMKQLKRRRYTGWGRLSRKLINGIRDKQSGKTILDFLKSDGFANRNFMQLIHDDSLTFKEDIQKAQVSGQGDSLHEHIANLAGSPAIKKGILQTVKVVDELVKVMGRHKPENIVIEMARENQTTQKGQKNSRERMKRIEEGIKELGSQILKEHPVENTQLQNEKLYLYYLQNGRDMYVDQELDINRLSDYDVDHIVPQSFLKDDSIDNKVLTRSDKARGKSDNVPSEEVVKKMKNYWRQLLNAKLITQRKFDNLTKAERGGLSELDKAGFIKRQLVETRQITKHVAQILDSRMNTKYDENDKLIREVKVITLKSKLVSDFRKDFQFYKVREINNYHHAHDAYLNAVVGTALIKKYPKLESEFVYGDYKVYDVRKMIAKSEQEIGKATAKYFFYSNIMNFFKTEITLANGEIRKRPLIETNGETGEIVWDKGRDFATVRKVLSMPQVNIVKKTEVQTGGFSKESILPKRNSDKLIARKKDWDPKKYGGFDSPTVAYSVLVVAKVEKGKSKKLKSVKELLGITIMERSSFEKNPIDFLEAKGYKEVKKDLIIKLPKYSLFELENGRKRMLASAGELQKGNELALPSKYVNFLYLASHYEKLKGSPEDNEQKQLFVEQHKHYLDEIIEQISEFSKRVILADANLDKVLSAYNKHRDKPIREQAENIIHLFTLTNLGAPAAFKYFDTTIDRKRYTSTKEVLDATLIHQSITGLYETRIDLSQLGGDGGGSSGSSGSSGGTLNIEDEYRLHETSKGPDVPLGSTWLSDFPQAWAETGGMGLAVRQAPLIIPLKATSTPVSIKQYPMSQEARLGIKPHIQRLLDQGILVPCQSPWNTPLLPVKKPGTNDYRPVQDLREVNKRVEDIHPTVPNPYNLLSGLPPSHQWYTVLDLKDAFFCLRLHPTSQSLFAFEWRDPEMGISGQLTWTRLPQGFKNSPTLFNEALHRDLADFRIQHPDLILLQYVDDLLLAATSELDCQQGTRALLQTLGDLGYRASAKKAQICQKQVKYLGYLLKEGQRWLTEARKETVMGQPTPKTPRQLREFLGTAGFCRLWIPGFAEMAAPLYPLTKPGTLFEWGPDQQKAYQEIKQALLTAPALGLPDLTKPFELFVDEKQGYAKGVLTQKLGPWRRPVAYLSKKLDPVAAGWPPCLRMVAAIAVLTKDAGKLTMGQPLVILAPHAVEALVKQPPDRWLSNARMTHYQALLLDTDRVQFGPIVALNPATLLPLPEEGLQHDCLDILAEAHGTRPDLTDQPLPDADHTWYTDGSSFLQEGQRKAGAAVTTETEVVWAKALPAGTSAQRAELIALTQALKMAEGKKLNVYTDSRYAFATAHIHGEIYRRRGWLTSEGKEIKNKDEILALLKALFLPKRLSIIHCPGHQKGNRAEARGNRMADQAAREVATRETPETSTLLAGKRTADGSEFEKRTADGSEFESPKKKAKVE

SEQ ID NO: 2472 - protein, 2096 aa, synthetic construct
MPAAKRVKLDGGDKKYSIGLDIGTNSVGWAVITDEYKVPSKKFKVLGNTDRHSIKKNLIGALLFDSGETAEATRLKRTARRRYTRRKNRICYLQEIFSNEMAKVDDSFFHRLEESFLVEEDKKHERHPIFGNIVDEVAYHEKYPTIYHLRKKLVDSTDKADLRLIYLALAHMIKFRGHFLIEGDLNPDNSDVDKLFIQLVQTYNQLFEENPINASGVDAKAILSARLSKSRRLENLIAQLPGEKKNGLFGNLIALSLGLTPNFKSNFDLAEDAKLQLSKDTYDDDLDNLLAQIGDQYADLFLAAKNLSDAILLSDILRVNTEITKAPLSASMIKRYDEHHQDLTLLKALVRQQLPEKYKEIFFDQSKNGYAGYIDGGASQEEFYKFIKPILEKMDGTEELLVKLNREDLLRKQRTFDNGSIPHQIHLGELHAILRRQEDFYPFLKDNREKIEKILTFRIPYYVGPLARGNSRFAWMTRKSEETITPWNFEEVVDKGASAQSFIERMTNFDKNLPNEKVLPKHSLLYEYFTVYNELTKVKYVTEGMRKPAFLSGEQKKAIVDLLFKTNRKVTVKQLKEDYFKKIECFDSVEISGVEDRFNASLGTYHDLLKIIKDKDFLDNEENEDILEDIVLTLTLFEDREMIEERLKTYAHLFDDKVMKQLKRRRYTGWGRLSRKLINGIRDKQSGKTILDFLKSDGFANRNFMQLIHDDSLTFKEDIQKAQVSGQGDSLHEHIANLAGSPAIKKGILQTVKVVDELVKVMGRHKPENIVIEMARENQTTQKGQKNSRERMKRIEEGIKELGSQILKEHPVENTQLQNEKLYLYYLQNGRDMYVDQELDINRLSDYDVDHIVPQSFLKDDSIDNKVLTRSDKARGKSDNVPSEEVVKKMKNYWRQLLNAKLITQRKFDNLTKAERGGLSELDKAGFIKRQLVETRQITKHVAQILDSRMNTKYDENDKLIREVKVITLKSKLVSDFRKDFQFYKVREINNYHHAHDAYLNAVVGTALIKKYPKLESEFVYGDYKVYDVRKMIAKSEQEIGKATAKYFFYSNIMNFFKTEITLANGEIRKRPLIETNGETGEIVWDKGRDFATVRKVLSMPQVNIVKKTEVQTGGFSKESILPKRNSDKLIARKKDWDPKKYGGFDSPTVAYSVLVVAKVEKGKSKKLKSVKELLGITIMERSSFEKNPIDFLEAKGYKEVKKDLIIKLPKYSLFELENGRKRMLASAGELQKGNELALPSKYVNFLYLASHYEKLKGSPEDNEQKQLFVEQHKHYLDEIIEQISEFSKRVILADANLDKVLSAYNKHRDKPIREQAENIIHLFTLTNLGAPAAFKYFDTTIDRKRYTSTKEVLDATLIHQSITGLYETRIDLSQLGGDGGGGGPAPEAAAKGGTLNIEDEYRLHETSKGPDVPLGSTWLSDFPQAWAETGGMGLAVRQAPLIIPLKATSTPVSIKQYPMSQEARLGIKPHIQRLLDQGILVPCQSPWNTPLLPVKKPGTNDYRPVQDLREVNKRVEDIHPTVPNPYNLLSGLPPSHQWYTVLDLKDAFFCLRLHPTSQSLFAFEWRDPEMGISGQLTWTRLPQGFKNSPTLFNEALHRDLADFRIQHPDLILLQYVDDLLLAATSELDCQQGTRALLQTLGDLGYRASAKKAQICQKQVKYLGYLLKEGQRWLTEARKETVMGQPTPKTPRQLREFLGTAGFCRLWIPGFAEMAAPLYPLTKPGTLFEWGPDQQKAYQEIKQALLTAPALGLPDLTKPFELFVDEKQGYAKGVLTQKLGPWRRPVAYLSKKLDPVAAGWPPCLRMVAAIAVLTKDAGKLTMGQPLVILAPHAVEALVKQPPDRWLSNARMTHYQALLLDTDRVQFGPIVALNPATLLPLPEEGLQHDCLDILAEAHGTRPDLTDQPLPDADHTWYTDGSSFLQEGQRKAGAAVTTETEVVWAKALPAGTSAQRAELIALTQALKMAEGKKLNVYTDSRYAFATAHIHGEIYRRRGWLTSEGKEIKNKDEILALLKALFLPKRLSIIHCPGHQKGNRAEARGNRMADQAAREVATRETPETSTLLAGKRTADGSEFEKRTADGSEFESPKKKAKVE

SEQ ID NO: 2473 - protein, 2096 aa, synthetic construct
MPAAKRVKLDGGDKKYSIGLDIGTNSVGWAVITDEYKVPSKKFKVLGNTDRHSIKKNLIGALLFDSGETAEATRLKRTARRRYTRRKNRICYLQEIFSNEMAKVDDSFFHRLEESFLVEEDKKHERHPIFGNIVDEVAYHEKYPTIYHLRKKLVDSTDKADLRLIYLALAHMIKFRGHFLIEGDLNPDNSDVDKLFIQLVQTYNQLFEENPINASGVDAKAILSARLSKSRRLENLIAQLPGEKKNGLFGNLIALSLGLTPNFKSNFDLAEDAKLQLSKDTYDDDLDNLLAQIGDQYADLFLAAKNLSDAILLSDILRVNTEITKAPLSASMIKRYDEHHQDLTLLKALVRQQLPEKYKEIFFDQSKNGYAGYIDGGASQEEFYKFIKPILEKMDGTEELLVKLNREDLLRKQRTFDNGSIPHQIHLGELHAILRRQEDFYPFLKDNREKIEKILTFRIPYYVGPLARGNSRFAWMTRKSEETITPWNFEEVVDKGASAQSFIERMTNFDKNLPNEKVLPKHSLLYEYFTVYNELTKVKYVTEGMRKPAFLSGEQKKAIVDLLFKTNRKVTVKQLKEDYFKKIECFDSVEISGVEDRFNASLGTYHDLLKIIKDKDFLDNEENEDILEDIVLTLTLFEDREMIEERLKTYAHLFDDKVMKQLKRRRYTGWGRLSRKLINGIRDKQSGKTILDFLKSDGFANRNFMQLIHDDSLTFKEDIQKAQVSGQGDSLHEHIANLAGSPAIKKGILQTVKVVDELVKVMGRHKPENIVIEMARENQTTQKGQKNSRERMKRIEEGIKELGSQILKEHPVENTQLQNEKLYLYYLQNGRDMYVDQELDINRLSDYDVDHIVPQSFLKDDSIDNKVLTRSDKARGKSDNVPSEEVVKKMKNYWRQLLNAKLITQRKFDNLTKAERGGLSELDKAGFIKRQLVETRQITKHVAQILDSRMNTKYDENDKLIREVKVITLKSKLVSDFRKDFQFYKVREINNYHHAHDAYLNAVVGTALIKKYPKLESEFVYGDYKVYDVRKMIAKSEQEIGKATAKYFFYSNIMNFFKTEITLANGEIRKRPLIETNGETGEIVWDKGRDFATVRKVLSMPQVNIVKKTEVQTGGFSKESILPKRNSDKLIARKKDWDPKKYGGFDSPTVAYSVLVVAKVEKGKSKKLKSVKELLGITIMERSSFEKNPIDFLEAKGYKEVKKDLIIKLPKYSLFELENGRKRMLASAGELQKGNELALPSKYVNFLYLASHYEKLKGSPEDNEQKQLFVEQHKHYLDEIIEQISEFSKRVILADANLDKVLSAYNKHRDKPIREQAENIIHLFTLTNLGAPAAFKYFDTTIDRKRYTSTKEVLDATLIHQSITGLYETRIDLSQLGGDGGEAAAKPAPGSSGGTLNIEDEYRLHETSKGPDVPLGSTWLSDFPQAWAETGGMGLAVRQAPLIIPLKATSTPVSIKQYPMSQEARLGIKPHIQRLLDQGILVPCQSPWNTPLLPVKKPGTNDYRPVQDLREVNKRVEDIHPTVPNPYNLLSGLPPSHQWYTVLDLKDAFFCLRLHPTSQSLFAFEWRDPEMGISGQLTWTRLPQGFKNSPTLFNEALHRDLADFRIQHPDLILLQYVDDLLLAATSELDCQQGTRALLQTLGDLGYRASAKKAQICQKQVKYLGYLLKEGQRWLTEARKETVMGQPTPKTPRQLREFLGTAGFCRLWIPGFAEMAAPLYPLTKPGTLFEWGPDQQKAYQEIKQALLTAPALGLPDLTKPFELFVDEKQGYAKGVLTQKLGPWRRPVAYLSKKLDPVAAGWPPCLRMVAAIAVLTKDAGKLTMGQPLVILAPHAVEALVKQPPDRWLSNARMTHYQALLLDTDRVQFGPIVALNPATLLPLPEEGLQHDCLDILAEAHGTRPDLTDQPLPDADHTWYTDGSSFLQEGQRKAGAAVTTETEVVWAKALPAGTSAQRAELIALTQALKMAEGKKLNVYTDSRYAFATAHIHGEIYRRRGWLTSEGKEIKNKDEILALLKALFLPKRLSIIHCPGHQKGNRAEARGNRMADQAAREVATRETPETSTLLAGKRTADGSEFEKRTADGSEFESPKKKAKVE

SEQ ID NO: 2474 - protein, 2096 aa, synthetic construct
MPAAKRVKLDGGDKKYSIGLDIGTNSVGWAVITDEYKVPSKKFKVLGNTDRHSIKKNLIGALLFDSGETAEATRLKRTARRRYTRRKNRICYLQEIFSNEMAKVDDSFFHRLEESFLVEEDKKHERHPIFGNIVDEVAYHEKYPTIYHLRKKLVDSTDKADLRLIYLALAHMIKFRGHFLIEGDLNPDNSDVDKLFIQLVQTYNQLFEENPINASGVDAKAILSARLSKSRRLENLIAQLPGEKKNGLFGNLIALSLGLTPNFKSNFDLAEDAKLQLSKDTYDDDLDNLLAQIGDQYADLFLAAKNLSDAILLSDILRVNTEITKAPLSASMIKRYDEHHQDLTLLKALVRQQLPEKYKEIFFDQSKNGYAGYIDGGASQEEFYKFIKPILEKMDGTEELLVKLNREDLLRKQRTFDNGSIPHQIHLGELHAILRRQEDFYPFLKDNREKIEKILTFRIPYYVGPLARGNSRFAWMTRKSEETITPWNFEEVVDKGASAQSFIERMTNFDKNLPNEKVLPKHSLLYEYFTVYNELTKVKYVTEGMRKPAFLSGEQKKAIVDLLFKTNRKVTVKQLKEDYFKKIECFDSVEISGVEDRFNASLGTYHDLLKIIKDKDFLDNEENEDILEDIVLTLTLFEDREMIEERLKTYAHLFDDKVMKQLKRRRYTGWGRLSRKLINGIRDKQSGKTILDFLKSDGFANRNFMQLIHDDSLTFKEDIQKAQVSGQGDSLHEHIANLAGSPAIKKGILQTVKVVDELVKVMGRHKPENIVIEMARENQTTQKGQKNSRERMKRIEEGIKELGSQILKEHPVENTQLQNEKLYLYYLQNGRDMYVDQELDINRLSDYDVDHIVPQSFLKDDSIDNKVLTRSDKARGKSDNVPSEEVVKKMKNYWRQLLNAKLITQRKFDNLTKAERGGLSELDKAGFIKRQLVETRQITKHVAQILDSRMNTKYDENDKLIREVKVITLKSKLVSDFRKDFQFYKVREINNYHHAHDAYLNAVVGTALIKKYPKLESEFVYGDYKVYDVRKMIAKSEQEIGKATAKYFFYSNIMNFFKTEITLANGEIRKRPLIETNGETGEIVWDKGRDFATVRKVLSMPQVNIVKKTEVQTGGFSKESILPKRNSDKLIARKKDWDPKKYGGFDSPTVAYSVLVVAKVEKGKSKKLKSVKELLGITIMERSSFEKNPIDFLEAKGYKEVKKDLIIKLPKYSLFELENGRKRMLASAGELQKGNELALPSKYVNFLYLASHYEKLKGSPEDNEQKQLFVEQHKHYLDEIIEQISEFSKRVILADANLDKVLSAYNKHRDKPIREQAENIIHLFTLTNLGAPAAFKYFDTTIDRKRYTSTKEVLDATLIHQSITGLYETRIDLSQLGGDGGEAAAKGGSPAPGGTLNIEDEYRLHETSKGPDVPLGSTWLSDFPQAWAETGGMGLAVRQAPLIIPLKATSTPVSIKQYPMSQEARLGIKPHIQRLLDQGILVPCQSPWNTPLLPVKKPGTNDYRPVQDLREVNKRVEDIHPTVPNPYNLLSGLPPSHQWYTVLDLKDAFFCLRLHPTSQSLFAFEWRDPEMGISGQLTWTRLPQGFKNSPTLFNEALHRDLADFRIQHPDLILLQYVDDLLLAATSELDCQQGTRALLQTLGDLGYRASAKKAQICQKQVKYLGYLLKEGQRWLTEARKETVMGQPTPKTPRQLREFLGTAGFCRLWIPGFAEMAAPLYPLTKPGTLFEWGPDQQKAYQEIKQALLTAPALGLPDLTKPFELFVDEKQGYAKGVLTQKLGPWRRPVAYLSKKLDPVAAGWPPCLRMVAAIAVLTKDAGKLTMGQPLVILAPHAVEALVKQPPDRWLSNARMTHYQALLLDTDRVQFGPIVALNPATLLPLPEEGLQHDCLDILAEAHGTRPDLTDQPLPDADHTWYTDGSSFLQEGQRKAGAAVTTETEVVWAKALPAGTSAQRAELIALTQALKMAEGKKLNVYTDSRYAFATAHIHGEIYRRRGWLTSEGKEIKNKDEILALLKALFLPKRLSIIHCPGHQKGNRAEARGNRMADQAAREVATRETPETSTLLAGKRTADGSEFEKRTADGSEFESPKKKAKVE

SEQ ID NO: 2475 - protein, 2093 aa, synthetic construct
MPAAKRVKLDGGDKKYSIGLDIGTNSVGWAVITDEYKVPSKKFKVLGNTDRHSIKKNLIGALLFDSGETAEATRLKRTARRRYTRRKNRICYLQEIFSNEMAKVDDSFFHRLEESFLVEEDKKHERHPIFGNIVDEVAYHEKYPTIYHLRKKLVDSTDKADLRLIYLALAHMIKFRGHFLIEGDLNPDNSDVDKLFIQLVQTYNQLFEENPINASGVDAKAILSARLSKSRRLENLIAQLPGEKKNGLFGNLIALSLGLTPNFKSNFDLAEDAKLQLSKDTYDDDLDNLLAQIGDQYADLFLAAKNLSDAILLSDILRVNTEITKAPLSASMIKRYDEHHQDLTLLKALVRQQLPEKYKEIFFDQSKNGYAGYIDGGASQEEFYKFIKPILEKMDGTEELLVKLNREDLLRKQRTFDNGSIPHQIHLGELHAILRRQEDFYPFLKDNREKIEKILTFRIPYYVGPLARGNSRFAWMTRKSEETITPWNFEEVVDKGASAQSFIERMTNFDKNLPNEKVLPKHSLLYEYFTVYNELTKVKYVTEGMRKPAFLSGEQKKAIVDLLFKTNRKVTVKQLKEDYFKKIECFDSVEISGVEDRFNASLGTYHDLLKIIKDKDFLDNEENEDILEDIVLTLTLFEDREMIEERLKTYAHLFDDKVMKQLKRRRYTGWGRLSRKLINGIRDKQSGKTILDFLKSDGFANRNFMQLIHDDSLTFKEDIQKAQVSGQGDSLHEHIANLAGSPAIKKGILQTVKVVDELVKVMGRHKPENIVIEMARENQTTQKGQKNSRERMKRIEEGIKELGSQILKEHPVENTQLQNEKLYLYYLQNGRDMYVDQELDINRLSDYDVDHIVPQSFLKDDSIDNKVLTRSDKARGKSDNVPSEEVVKKMKNYWRQLLNAKLITQRKFDNLTKAERGGLSELDKAGFIKRQLVETRQITKHVAQILDSRMNTKYDENDKLIREVKVITLKSKLVSDFRKDFQFYKVREINNYHHAHDAYLNAVVGTALIKKYPKLESEFVYGDYKVYDVRKMIAKSEQEIGKATAKYFFYSNIMNFFKTEITLANGEIRKRPLIETNGETGEIVWDKGRDFATVRKVLSMPQVNIVKKTEVQTGGFSKESILPKRNSDKLIARKKDWDPKKYGGFDSPTVAYSVLVVAKVEKGKSKKLKSVKELLGITIMERSSFEKNPIDFLEAKGYKEVKKDLIIKLPKYSLFELENGRKRMLASAGELQKGNELALPSKYVNFLYLASHYEKLKGSPEDNEQKQLFVEQHKHYLDEIIEQISEFSKRVILADANLDKVLSAYNKHRDKPIREQAENIIHLFTLTNLGAPAAFKYFDTTIDRKRYTSTKEVLDATLIHQSITGLYETRIDLSQLGGDGGGSSEAAAKGGTLNIEDEYRLHETSKGPDVPLGSTWLSDFPQAWAETGGMGLAVRQAPLIIPLKATSTPVSIKQYPMSQEARLGIKPHIQRLLDQGILVPCQSPWNTPLLPVKKPGTNDYRPVQDLREVNKRVEDIHPTVPNPYNLLSGLPPSHQWYTVLDLKDAFFCLRLHPTSQSLFAFEWRDPEMGISGQLTWTRLPQGFKNSPTLFNEALHRDLADFRIQHPDLILLQYVDDLLLAATSELDCQQGTRALLQTLGDLGYRASAKKAQICQKQVKYLGYLLKEGQRWLTEARKETVMGQPTPKTPRQLREFLGTAGFCRLWIPGFAEMAAPLYPLTKPGTLFEWGPDQQKAYQEIKQALLTAPALGLPDLTKPFELFVDEKQGYAKGVLTQKLGPWRRPVAYLSKKLDPVAAGWPPCLRMVAAIAVLTKDAGKLTMGQPLVILAPHAVEALVKQPPDRWLSNARMTHYQALLLDTDRVQFGPIVALNPATLLPLPEEGLQHDCLDILAEAHGTRPDLTDQPLPDADHTWYTDGSSFLQEGQRKAGAAVTTETEVVWAKALPAGTSAQRAELIALTQALKMAEGKKLNVYTDSRYAFATAHIHGEIYRRRGWLTSEGKEIKNKDEILALLKALFLPKRLSIIHCPGHQKGNRAEARGNRMADQAAREVATRETPETSTLLAGKRTADGSEFEKRTADGSEFESPKKKAKVE

SEQ ID NO: 2476 - protein, 2094 aa, synthetic construct
MPAAKRVKLDGGDKKYSIGLDIGTNSVGWAVITDEYKVPSKKFKVLGNTDRHSIKKNLIGALLFDSGETAEATRLKRTARRRYTRRKNRICYLQEIFSNEMAKVDDSFFHRLEESFLVEEDKKHERHPIFGNIVDEVAYHEKYPTIYHLRKKLVDSTDKADLRLIYLALAHMIKFRGHFLIEGDLNPDNSDVDKLFIQLVQTYNQLFEENPINASGVDAKAILSARLSKSRRLENLIAQLPGEKKNGLFGNLIALSLGLTPNFKSNFDLAEDAKLQLSKDTYDDDLDNLLAQIGDQYADLFLAAKNLSDAILLSDILRVNTEITKAPLSASMIKRYDEHHQDLTLLKALVRQQLPEKYKEIFFDQSKNGYAGYIDGGASQEEFYKFIKPILEKMDGTEELLVKLNREDLLRKQRTFDNGSIPHQIHLGELHAILRRQEDFYPFLKDNREKIEKILTFRIPYYVGPLARGNSRFAWMTRKSEETITPWNFEEVVDKGASAQSFIERMTNFDKNLPNEKVLPKHSLLYEYFTVYNELTKVKYVTEGMRKPAFLSGEQKKAIVDLLFKTNRKVTVKQLKEDYFKKIECFDSVEISGVEDRFNASLGTYHDLLKIIKDKDFLDNEENEDILEDIVLTLTLFEDREMIEERLKTYAHLFDDKVMKQLKRRRYTGWGRLSRKLINGIRDKQSGKTILDFLKSDGFANRNFMQLIHDDSLTFKEDIQKAQVSGQGDSLHEHIANLAGSPAIKKGILQTVKVVDELVKVMGRHKPENIVIEMARENQTTQKGQKNSRERMKRIEEGIKELGSQILKEHPVENTQLQNEKLYLYYLQNGRDMYVDQELDINRLSDYDVDHIVPQSFLKDDSIDNKVLTRSDKARGKSDNVPSEEVVKKMKNYWRQLLNAKLITQRKFDNLTKAERGGLSELDKAGFIKRQLVETRQITKHVAQILDSRMNTKYDENDKLIREVKVITLKSKLVSDFRKDFQFYKVREINNYHHAHDAYLNAVVGTALIKKYPKLESEFVYGDYKVYDVRKMIAKSEQEIGKATAKYFFYSNIMNFFKTEITLANGEIRKRPLIETNGETGEIVWDKGRDFATVRKVLSMPQVNIVKKTEVQTGGFSKESILPKRNSDKLIARKKDWDPKKYGGFDSPTVAYSVLVVAKVEKGKSKKLKSVKELLGITIMERSSFEKNPIDFLEAKGYKEVKKDLIIKLPKYSLFELENGRKRMLASAGELQKGNELALPSKYVNFLYLASHYEKLKGSPEDNEQKQLFVEQHKHYLDEIIEQISEFSKRVILADANLDKVLSAYNKHRDKPIREQAENIIHLFTLTNLGAPAAFKYFDTTIDRKRYTSTKEVLDATLIHQSITGLYETRIDLSQLGGDGGGGSPAPGGGGGTLNIEDEYRLHETSKGPDVPLGSTWLSDFPQAWAETGGMGLAVRQAPLIIPLKATSTPVSIKQYPMSQEARLGIKPHIQRLLDQGILVPCQSPWNTPLLPVKKPGTNDYRPVQDLREVNKRVEDIHPTVPNPYNLLSGLPPSHQWYTVLDLKDAFFCLRLHPTSQSLFAFEWRDPEMGISGQLTWTRLPQGFKNSPTLFNEALHRDLADFRIQHPDLILLQYVDDLLLAATSELDCQQGTRALLQTLGDLGYRASAKKAQICQKQVKYLGYLLKEGQRWLTEARKETVMGQPTPKTPRQLREFLGTAGFCRLWIPGFAEMAAPLYPLTKPGTLFEWGPDQQKAYQEIKQALLTAPALGLPDLTKPFELFVDEKQGYAKGVLTQKLGPWRRPVAYLSKKLDPVAAGWPPCLRMVAAIAVLTKDAGKLTMGQPLVILAPHAVEALVKQPPDRWLSNARMTHYQALLLDTDRVQFGPIVALNPATLLPLPEEGLQHDCLDILAEAHGTRPDLTDQPLPDADHTWYTDGSSFLQEGQRKAGAAVTTETEVVWAKALPAGTSAQRAELIALTQALKMAEGKKLNVYTDSRYAFATAHIHGEIYRRRGWLTSEGKEIKNKDEILALLKALFLPKRLSIIHCPGHQKGNRAEARGNRMADQAAREVATRETPETSTLLAGKRTADGSEFEKRTADGSEFESPKKKAKVE

SEQ ID NO: 2477 - protein, 2091 aa, synthetic construct
MPAAKRVKLDGGDKKYSIGLDIGTNSVGWAVITDEYKVPSKKFKVLGNTDRHSIKKNLIGALLFDSGETAEATRLKRTARRRYTRRKNRICYLQEIFSNEMAKVDDSFFHRLEESFLVEEDKKHERHPIFGNIVDEVAYHEKYPTIYHLRKKLVDSTDKADLRLIYLALAHMIKFRGHFLIEGDLNPDNSDVDKLFIQLVQTYNQLFEENPINASGVDAKAILSARLSKSRRLENLIAQLPGEKKNGLFGNLIALSLGLTPNFKSNFDLAEDAKLQLSKDTYDDDLDNLLAQIGDQYADLFLAAKNLSDAILLSDILRVNTEITKAPLSASMIKRYDEHHQDLTLLKALVRQQLPEKYKEIFFDQSKNGYAGYIDGGASQEEFYKFIKPILEKMDGTEELLVKLNREDLLRKQRTFDNGSIPHQIHLGELHAILRRQEDFYPFLKDNREKIEKILTFRIPYYVGPLARGNSRFAWMTRKSEETITPWNFEEVVDKGASAQSFIERMTNFDKNLPNEKVLPKHSLLYEYFTVYNELTKVKYVTEGMRKPAFLSGEQKKAIVDLLFKTNRKVTVKQLKEDYFKKIECFDSVEISGVEDRFNASLGTYHDLLKIIKDKDFLDNEENEDILEDIVLTLTLFEDREMIEERLKTYAHLFDDKVMKQLKRRRYTGWGRLSRKLINGIRDKQSGKTILDFLKSDGFANRNFMQLIHDDSLTFKEDIQKAQVSGQGDSLHEHIANLAGSPAIKKGILQTVKVVDELVKVMGRHKPENIVIEMARENQTTQKGQKNSRERMKRIEEGIKELGSQILKEHPVENTQLQNEKLYLYYLQNGRDMYVDQELDINRLSDYDVDHIVPQSFLKDDSIDNKVLTRSDKARGKSDNVPSEEVVKKMKNYWRQLLNAKLITQRKFDNLTKAERGGLSELDKAGFIKRQLVETRQITKHVAQILDSRMNTKYDENDKLIREVKVITLKSKLVSDFRKDFQFYKVREINNYHHAHDAYLNAVVGTALIKKYPKLESEFVYGDYKVYDVRKMIAKSEQEIGKATAKYFFYSNIMNFFKTEITLANGEIRKRPLIETNGETGEIVWDKGRDFATVRKVLSMPQVNIVKKTEVQTGGFSKESILPKRNSDKLIARKKDWDPKKYGGFDSPTVAYSVLVVAKVEKGKSKKLKSVKELLGITIMERSSFEKNPIDFLEAKGYKEVKKDLIIKLPKYSLFELENGRKRMLASAGELQKGNELALPSKYVNFLYLASHYEKLKGSPEDNEQKQLFVEQHKHYLDEIIEQISEFSKRVILADANLDKVLSAYNKHRDKPIREQAENIIHLFTLTNLGAPAAFKYFDTTIDRKRYTSTKEVLDATLIHQSITGLYETRIDLSQLGGDGGGSSPAPGGTLNIEDEYRLHETSKGPDVPLGSTWLSDFPQAWAETGGMGLAVRQAPLIIPLKATSTPVSIKQYPMSQEARLGIKPHIQRLLDQGILVPCQSPWNTPLLPVKKPGTNDYRPVQDLREVNKRVEDIHPTVPNPYNLLSGLPPSHQWYTVLDLKDAFFCLRLHPTSQSLFAFEWRDPEMGISGQLTWTRLPQGFKNSPTLFNEALHRDLADFRIQHPDLILLQYVDDLLLAATSELDCQQGTRALLQTLGDLGYRASAKKAQICQKQVKYLGYLLKEGQRWLTEARKETVMGQPTPKTPRQLREFLGTAGFCRLWIPGFAEMAAPLYPLTKPGTLFEWGPDQQKAYQEIKQALLTAPALGLPDLTKPFELFVDEKQGYAKGVLTQKLGPWRRPVAYLSKKLDPVAAGWPPCLRMVAAIAVLTKDAGKLTMGQPLVILAPHAVEALVKQPPDRWLSNARMTHYQALLLDTDRVQFGPIVALNPATLLPLPEEGLQHDCLDILAEAHGTRPDLTDQPLPDADHTWYTDGSSFLQEGQRKAGAAVTTETEVVWAKALPAGTSAQRAELIALTQALKMAEGKKLNVYTDSRYAFATAHIHGEIYRRRGWLTSEGKEIKNKDEILALLKALFLPKRLSIIHCPGHQKGNRAEARGNRMADQAAREVATRETPETSTLLAGKRTADGSEFEKRTADGSEFESPKKKAKVE

SEQ ID NO: 2478 - protein, 2091 aa, synthetic construct
MPAAKRVKLDGGDKKYSIGLDIGTNSVGWAVITDEYKVPSKKFKVLGNTDRHSIKKNLIGALLFDSGETAEATRLKRTARRRYTRRKNRICYLQEIFSNEMAKVDDSFFHRLEESFLVEEDKKHERHPIFGNIVDEVAYHEKYPTIYHLRKKLVDSTDKADLRLIYLALAHMIKFRGHFLIEGDLNPDNSDVDKLFIQLVQTYNQLFEENPINASGVDAKAILSARLSKSRRLENLIAQLPGEKKNGLFGNLIALSLGLTPNFKSNFDLAEDAKLQLSKDTYDDDLDNLLAQIGDQYADLFLAAKNLSDAILLSDILRVNTEITKAPLSASMIKRYDEHHQDLTLLKALVRQQLPEKYKEIFFDQSKNGYAGYIDGGASQEEFYKFIKPILEKMDGTEELLVKLNREDLLRKQRTFDNGSIPHQIHLGELHAILRRQEDFYPFLKDNREKIEKILTFRIPYYVGPLARGNSRFAWMTRKSEETITPWNFEEVVDKGASAQSFIERMTNFDKNLPNEKVLPKHSLLYEYFTVYNELTKVKYVTEGMRKPAFLSGEQKKAIVDLLFKTNRKVTVKQLKEDYFKKIECFDSVEISGVEDRFNASLGTYHDLLKIIKDKDFLDNEENEDILEDIVLTLTLFEDREMIEERLKTYAHLFDDKVMKQLKRRRYTGWGRLSRKLINGIRDKQSGKTILDFLKSDGFANRNFMQLIHDDSLTFKEDIQKAQVSGQGDSLHEHIANLAGSPAIKKGILQTVKVVDELVKVMGRHKPENIVIEMARENQTTQKGQKNSRERMKRIEEGIKELGSQILKEHPVENTQLQNEKLYLYYLQNGRDMYVDQELDINRLSDYDVDHIVPQSFLKDDSIDNKVLTRSDKARGKSDNVPSEEVVKKMKNYWRQLLNAKLITQRKFDNLTKAERGGLSELDKAGFIKRQLVETRQITKHVAQILDSRMNTKYDENDKLIREVKVITLKSKLVSDFRKDFQFYKVREINNYHHAHDAYLNAVVGTALIKKYPKLESEFVYGDYKVYDVRKMIAKSEQEIGKATAKYFFYSNIMNFFKTEITLANGEIRKRPLIETNGETGEIVWDKGRDFATVRKVLSMPQVNIVKKTEVQTGGFSKESILPKRNSDKLIARKKDWDPKKYGGFDSPTVAYSVLVVAKVEKGKSKKLKSVKELLGITIMERSSFEKNPIDFLEAKGYKEVKKDLIIKLPKYSLFELENGRKRMLASAGELQKGNELALPSKYVNFLYLASHYEKLKGSPEDNEQKQLFVEQHKHYLDEIIEQISEFSKRVILADANLDKVLSAYNKHRDKPIREQAENIIHLFTLTNLGAPAAFKYFDTTIDRKRYTSTKEVLDATLIHQSITGLYETRIDLSQLGGDGGGGSGGGGGTLNIEDEYRLHETSKGPDVPLGSTWLSDFPQAWAETGGMGLAVRQAPLIIPLKATSTPVSIKQYPMSQEARLGIKPHIQRLLDQGILVPCQSPWNTPLLPVKKPGTNDYRPVQDLREVNKRVEDIHPTVPNPYNLLSGLPPSHQWYTVLDLKDAFFCLRLHPTSQSLFAFEWRDPEMGISGQLTWTRLPQGFKNSPTLFNEALHRDLADFRIQHPDLILLQYVDDLLLAATSELDCQQGTRALLQTLGDLGYRASAKKAQICQKQVKYLGYLLKEGQRWLTEARKETVMGQPTPKTPRQLREFLGTAGFCRLWIPGFAEMAAPLYPLTKPGTLFEWGPDQQKAYQEIKQALLTAPALGLPDLTKPFELFVDEKQGYAKGVLTQKLGPWRRPVAYLSKKLDPVAAGWPPCLRMVAAIAVLTKDAGKLTMGQPLVILAPHAVEALVKQPPDRWLSNARMTHYQALLLDTDRVQFGPIVALNPATLLPLPEEGLQHDCLDILAEAHGTRPDLTDQPLPDADHTWYTDGSSFLQEGQRKAGAAVTTETEVVWAKALPAGTSAQRAELIALTQALKMAEGKKLNVYTDSRYAFATAHIHGEIYRRRGWLTSEGKEIKNKDEILALLKALFLPKRLSIIHCPGHQKGNRAEARGNRMADQAAREVATRETPETSTLLAGKRTADGSEFEKRTADGSEFESPKKKAKVE

SEQ ID NO: 2479 - protein, 2094 aa, synthetic construct
MPAAKRVKLDGGDKKYSIGLDIGTNSVGWAVITDEYKVPSKKFKVLGNTDRHSIKKNLIGALLFDSGETAEATRLKRTARRRYTRRKNRICYLQEIFSNEMAKVDDSFFHRLEESFLVEEDKKHERHPIFGNIVDEVAYHEKYPTIYHLRKKLVDSTDKADLRLIYLALAHMIKFRGHFLIEGDLNPDNSDVDKLFIQLVQTYNQLFEENPINASGVDAKAILSARLSKSRRLENLIAQLPGEKKNGLFGNLIALSLGLTPNFKSNFDLAEDAKLQLSKDTYDDDLDNLLAQIGDQYADLFLAAKNLSDAILLSDILRVNTEITKAPLSASMIKRYDEHHQDLTLLKALVRQQLPEKYKEIFFDQSKNGYAGYIDGGASQEEFYKFIKPILEKMDGTEELLVKLNREDLLRKQRTFDNGSIPHQIHLGELHAILRRQEDFYPFLKDNREKIEKILTFRIPYYVGPLARGNSRFAWMTRKSEETITPWNFEEVVDKGASAQSFIERMTNFDKNLPNEKVLPKHSLLYEYFTVYNELTKVKYVTEGMRKPAFLSGEQKKAIVDLLFKTNRKVTVKQLKEDYFKKIECFDSVEISGVEDRFNASLGTYHDLLKIIKDKDFLDNEENEDILEDIVLTLTLFEDREMIEERLKTYAHLFDDKVMKQLKRRRYTGWGRLSRKLINGIRDKQSGKTILDFLKSDGFANRNFMQLIHDDSLTFKEDIQKAQVSGQGDSLHEHIANLAGSPAIKKGILQTVKVVDELVKVMGRHKPENIVIEMARENQTTQKGQKNSRERMKRIEEGIKELGSQILKEHPVENTQLQNEKLYLYYLQNGRDMYVDQELDINRLSDYDVDHIVPQSFLKDDSIDNKVLTRSDKARGKSDNVPSEEVVKKMKNYWRQLLNAKLITQRKFDNLTKAERGGLSELDKAGFIKRQLVETRQITKHVAQILDSRMNTKYDENDKLIREVKVITLKSKLVSDFRKDFQFYKVREINNYHHAHDAYLNAVVGTALIKKYPKLESEFVYGDYKVYDVRKMIAKSEQEIGKATAKYFFYSNIMNFFKTEITLANGEIRKRPLIETNGETGEIVWDKGRDFATVRKVLSMPQVNIVKKTEVQTGGFSKESILPKRNSDKLIARKKDWDPKKYGGFDSPTVAYSVLVVAKVEKGKSKKLKSVKELLGITIMERSSFEKNPIDFLEAKGYKEVKKDLIIKLPKYSLFELENGRKRMLASAGELQKGNELALPSKYVNFLYLASHYEKLKGSPEDNEQKQLFVEQHKHYLDEIIEQISEFSKRVILADANLDKVLSAYNKHRDKPIREQAENIIHLFTLTNLGAPAAFKYFDTTIDRKRYTSTKEVLDATLIHQSITGLYETRIDLSQLGGDGGGGSGGGGSSGGTLNIEDEYRLHETSKGPDVPLGSTWLSDFPQAWAETGGMGLAVRQAPLIIPLKATSTPVSIKQYPMSQEARLGIKPHIQRLLDQGILVPCQSPWNTPLLPVKKPGTNDYRPVQDLREVNKRVEDIHPTVPNPYNLLSGLPPSHQWYTVLDLKDAFFCLRLHPTSQSLFAFEWRDPEMGISGQLTWTRLPQGFKNSPTLFNEALHRDLADFRIQHPDLILLQYVDDLLLAATSELDCQQGTRALLQTLGDLGYRASAKKAQICQKQVKYLGYLLKEGQRWLTEARKETVMGQPTPKTPRQLREFLGTAGFCRLWIPGFAEMAAPLYPLTKPGTLFEWGPDQQKAYQEIKQALLTAPALGLPDLTKPFELFVDEKQGYAKGVLTQKLGPWRRPVAYLSKKLDPVAAGWPPCLRMVAAIAVLTKDAGKLTMGQPLVILAPHAVEALVKQPPDRWLSNARMTHYQALLLDTDRVQFGPIVALNPATLLPLPEEGLQHDCLDILAEAHGTRPDLTDQPLPDADHTWYTDGSSFLQEGQRKAGAAVTTETEVVWAKALPAGTSAQRAELIALTQALKMAEGKKLNVYTDSRYAFATAHIHGEIYRRRGWLTSEGKEIKNKDEILALLKALFLPKRLSIIHCPGHQKGNRAEARGNRMADQAAREVATRETPETSTLLAGKRTADGSEFEKRTADGSEFESPKKKAKVE

SEQ ID NO: 2480 - protein, 2096 aa, synthetic construct
MPAAKRVKLDGGDKKYSIGLDIGTNSVGWAVITDEYKVPSKKFKVLGNTDRHSIKKNLIGALLFDSGETAEATRLKRTARRRYTRRKNRICYLQEIFSNEMAKVDDSFFHRLEESFLVEEDKKHERHPIFGNIVDEVAYHEKYPTIYHLRKKLVDSTDKADLRLIYLALAHMIKFRGHFLIEGDLNPDNSDVDKLFIQLVQTYNQLFEENPINASGVDAKAILSARLSKSRRLENLIAQLPGEKKNGLFGNLIALSLGLTPNFKSNFDLAEDAKLQLSKDTYDDDLDNLLAQIGDQYADLFLAAKNLSDAILLSDILRVNTEITKAPLSASMIKRYDEHHQDLTLLKALVRQQLPEKYKEIFFDQSKNGYAGYIDGGASQEEFYKFIKPILEKMDGTEELLVKLNREDLLRKQRTFDNGSIPHQIHLGELHAILRRQEDFYPFLKDNREKIEKILTFRIPYYVGPLARGNSRFAWMTRKSEETITPWNFEEVVDKGASAQSFIERMTNFDKNLPNEKVLPKHSLLYEYFTVYNELTKVKYVTEGMRKPAFLSGEQKKAIVDLLFKTNRKVTVKQLKEDYFKKIECFDSVEISGVEDRFNASLGTYHDLLKIIKDKDFLDNEENEDILEDIVLTLTLFEDREMIEERLKTYAHLFDDKVMKQLKRRRYTGWGRLSRKLINGIRDKQSGKTILDFLKSDGFANRNFMQLIHDDSLTFKEDIQKAQVSGQGDSLHEHIANLAGSPAIKKGILQTVKVVDELVKVMGRHKPENIVIEMARENQTTQKGQKNSRERMKRIEEGIKELGSQILKEHPVENTQLQNEKLYLYYLQNGRDMYVDQELDINRLSDYDVDHIVPQSFLKDDSIDNKVLTRSDKARGKSDNVPSEEVVKKMKNYWRQLLNAKLITQRKFDNLTKAERGGLSELDKAGFIKRQLVETRQITKHVAQILDSRMNTKYDENDKLIREVKVITLKSKLVSDFRKDFQFYKVREINNYHHAHDAYLNAVVGTALIKKYPKLESEFVYGDYKVYDVRKMIAKSEQEIGKATAKYFFYSNIMNFFKTEITLANGEIRKRPLIETNGETGEIVWDKGRDFATVRKVLSMPQVNIVKKTEVQTGGFSKESILPKRNSDKLIARKKDWDPKKYGGFDSPTVAYSVLVVAKVEKGKSKKLKSVKELLGITIMERSSFEKNPIDFLEAKGYKEVKKDLIIKLPKYSLFELENGRKRMLASAGELQKGNELALPSKYVNFLYLASHYEKLKGSPEDNEQKQLFVEQHKHYLDEIIEQISEFSKRVILADANLDKVLSAYNKHRDKPIREQAENIIHLFTLTNLGAPAAFKYFDTTIDRKRYTSTKEVLDATLIHQSITGLYETRIDLSQLGGDGGGSSPAPEAAAKGGTLNIEDEYRLHETSKGPDVPLGSTWLSDFPQAWAETGGMGLAVRQAPLIIPLKATSTPVSIKQYPMSQEARLGIKPHIQRLLDQGILVPCQSPWNTPLLPVKKPGTNDYRPVQDLREVNKRVEDIHPTVPNPYNLLSGLPPSHQWYTVLDLKDAFFCLRLHPTSQSLFAFEWRDPEMGISGQLTWTRLPQGFKNSPTLFNEALHRDLADFRIQHPDLILLQYVDDLLLAATSELDCQQGTRALLQTLGDLGYRASAKKAQICQKQVKYLGYLLKEGQRWLTEARKETVMGQPTPKTPRQLREFLGTAGFCRLWIPGFAEMAAPLYPLTKPGTLFEWGPDQQKAYQEIKQALLTAPALGLPDLTKPFELFVDEKQGYAKGVLTQKLGPWRRPVAYLSKKLDPVAAGWPPCLRMVAAIAVLTKDAGKLTMGQPLVILAPHAVEALVKQPPDRWLSNARMTHYQALLLDTDRVQFGPIVALNPATLLPLPEEGLQHDCLDILAEAHGTRPDLTDQPLPDADHTWYTDGSSFLQEGQRKAGAAVTTETEVVWAKALPAGTSAQRAELIALTQALKMAEGKKLNVYTDSRYAFATAHIHGEIYRRRGWLTSEGKEIKNKDEILALLKALFLPKRLSIIHCPGHQKGNRAEARGNRMADQAAREVATRETPETSTLLAGKRTADGSEFEKRTADGSEFESPKKKAKVE

SEQ ID NO: 2481 - protein, 2091 aa, synthetic construct
MPAAKRVKLDGGDKKYSIGLDIGTNSVGWAVITDEYKVPSKKFKVLGNTDRHSIKKNLIGALLFDSGETAEATRLKRTARRRYTRRKNRICYLQEIFSNEMAKVDDSFFHRLEESFLVEEDKKHERHPIFGNIVDEVAYHEKYPTIYHLRKKLVDSTDKADLRLIYLALAHMIKFRGHFLIEGDLNPDNSDVDKLFIQLVQTYNQLFEENPINASGVDAKAILSARLSKSRRLENLIAQLPGEKKNGLFGNLIALSLGLTPNFKSNFDLAEDAKLQLSKDTYDDDLDNLLAQIGDQYADLFLAAKNLSDAILLSDILRVNTEITKAPLSASMIKRYDEHHQDLTLLKALVRQQLPEKYKEIFFDQSKNGYAGYIDGGASQEEFYKFIKPILEKMDGTEELLVKLNREDLLRKQRTFDNGSIPHQIHLGELHAILRRQEDFYPFLKDNREKIEKILTFRIPYYVGPLARGNSRFAWMTRKSEETITPWNFEEVVDKGASAQSFIERMTNFDKNLPNEKVLPKHSLLYEYFTVYNELTKVKYVTEGMRKPAFLSGEQKKAIVDLLFKTNRKVTVKQLKEDYFKKIECFDSVEISGVEDRFNASLGTYHDLLKIIKDKDFLDNEENEDILEDIVLTLTLFEDREMIEERLKTYAHLFDDKVMKQLKRRRYTGWGRLSRKLINGIRDKQSGKTILDFLKSDGFANRNFMQLIHDDSLTFKEDIQKAQVSGQGDSLHEHIANLAGSPAIKKGILQTVKVVDELVKVMGRHKPENIVIEMARENQTTQKGQKNSRERMKRIEEGIKELGSQILKEHPVENTQLQNEKLYLYYLQNGRDMYVDQELDINRLSDYDVDHIVPQSFLKDDSIDNKVLTRSDKARGKSDNVPSEEVVKKMKNYWRQLLNAKLITQRKFDNLTKAERGGLSELDKAGFIKRQLVETRQITKHVAQILDSRMNTKYDENDKLIREVKVITLKSKLVSDFRKDFQFYKVREINNYHHAHDAYLNAVVGTALIKKYPKLESEFVYGDYKVYDVRKMIAKSEQEIGKATAKYFFYSNIMNFFKTEITLANGEIRKRPLIETNGETGEIVWDKGRDFATVRKVLSMPQVNIVKKTEVQTGGFSKESILPKRNSDKLIARKKDWDPKKYGGFDSPTVAYSVLVVAKVEKGKSKKLKSVKELLGITIMERSSFEKNPIDFLEAKGYKEVKKDLIIKLPKYSLFELENGRKRMLASAGELQKGNELALPSKYVNFLYLASHYEKLKGSPEDNEQKQLFVEQHKHYLDEIIEQISEFSKRVILADANLDKVLSAYNKHRDKPIREQAENIIHLFTLTNLGAPAAFKYFDTTIDRKRYTSTKEVLDATLIHQSITGLYETRIDLSQLGGDGGGGSPAPGGTLNIEDEYRLHETSKGPDVPLGSTWLSDFPQAWAETGGMGLAVRQAPLIIPLKATSTPVSIKQYPMSQEARLGIKPHIQRLLDQGILVPCQSPWNTPLLPVKKPGTNDYRPVQDLREVNKRVEDIHPTVPNPYNLLSGLPPSHQWYTVLDLKDAFFCLRLHPTSQSLFAFEWRDPEMGISGQLTWTRLPQGFKNSPTLFNEALHRDLADFRIQHPDLILLQYVDDLLLAATSELDCQQGTRALLQTLGDLGYRASAKKAQICQKQVKYLGYLLKEGQRWLTEARKETVMGQPTPKTPRQLREFLGTAGFCRLWIPGFAEMAAPLYPLTKPGTLFEWGPDQQKAYQEIKQALLTAPALGLPDLTKPFELFVDEKQGYAKGVLTQKLGPWRRPVAYLSKKLDPVAAGWPPCLRMVAAIAVLTKDAGKLTMGQPLVILAPHAVEALVKQPPDRWLSNARMTHYQALLLDTDRVQFGPIVALNPATLLPLPEEGLQHDCLDILAEAHGTRPDLTDQPLPDADHTWYTDGSSFLQEGQRKAGAAVTTETEVVWAKALPAGTSAQRAELIALTQALKMAEGKKLNVYTDSRYAFATAHIHGEIYRRRGWLTSEGKEIKNKDEILALLKALFLPKRLSIIHCPGHQKGNRAEARGNRMADQAAREVATRETPETSTLLAGKRTADGSEFEKRTADGSEFESPKKKAKVE

SEQ ID NO: 2482 - protein, 2090 aa, synthetic construct
MPAAKRVKLDGGDKKYSIGLDIGTNSVGWAVITDEYKVPSKKFKVLGNTDRHSIKKNLIGALLFDSGETAEATRLKRTARRRYTRRKNRICYLQEIFSNEMAKVDDSFFHRLEESFLVEEDKKHERHPIFGNIVDEVAYHEKYPTIYHLRKKLVDSTDKADLRLIYLALAHMIKFRGHFLIEGDLNPDNSDVDKLFIQLVQTYNQLFEENPINASGVDAKAILSARLSKSRRLENLIAQLPGEKKNGLFGNLIALSLGLTPNFKSNFDLAEDAKLQLSKDTYDDDLDNLLAQIGDQYADLFLAAKNLSDAILLSDILRVNTEITKAPLSASMIKRYDEHHQDLTLLKALVRQQLPEKYKEIFFDQSKNGYAGYIDGGASQEEFYKFIKPILEKMDGTEELLVKLNREDLLRKQRTFDNGSIPHQIHLGELHAILRRQEDFYPFLKDNREKIEKILTFRIPYYVGPLARGNSRFAWMTRKSEETITPWNFEEVVDKGASAQSFIERMTNFDKNLPNEKVLPKHSLLYEYFTVYNELTKVKYVTEGMRKPAFLSGEQKKAIVDLLFKTNRKVTVKQLKEDYFKKIECFDSVEISGVEDRFNASLGTYHDLLKIIKDKDFLDNEENEDILEDIVLTLTLFEDREMIEERLKTYAHLFDDKVMKQLKRRRYTGWGRLSRKLINGIRDKQSGKTILDFLKSDGFANRNFMQLIHDDSLTFKEDIQKAQVSGQGDSLHEHIANLAGSPAIKKGILQTVKVVDELVKVMGRHKPENIVIEMARENQTTQKGQKNSRERMKRIEEGIKELGSQILKEHPVENTQLQNEKLYLYYLQNGRDMYVDQELDINRLSDYDVDHIVPQSFLKDDSIDNKVLTRSDKARGKSDNVPSEEVVKKMKNYWRQLLNAKLITQRKFDNLTKAERGGLSELDKAGFIKRQLVETRQITKHVAQILDSRMNTKYDENDKLIREVKVITLKSKLVSDFRKDFQFYKVREINNYHHAHDAYLNAVVGTALIKKYPKLESEFVYGDYKVYDVRKMIAKSEQEIGKATAKYFFYSNIMNFFKTEITLANGEIRKRPLIETNGETGEIVWDKGRDFATVRKVLSMPQVNIVKKTEVQTGGFSKESILPKRNSDKLIARKKDWDPKKYGGFDSPTVAYSVLVVAKVEKGKSKKLKSVKELLGITIMERSSFEKNPIDFLEAKGYKEVKKDLIIKLPKYSLFELENGRKRMLASAGELQKGNELALPSKYVNFLYLASHYEKLKGSPEDNEQKQLFVEQHKHYLDEIIEQISEFSKRVILADANLDKVLSAYNKHRDKPIREQAENIIHLFTLTNLGAPAAFKYFDTTIDRKRYTSTKEVLDATLIHQSITGLYETRIDLSQLGGDGGGGGGSGGTLNIEDEYRLHETSKGPDVPLGSTWLSDFPQAWAETGGMGLAVRQAPLIIPLKATSTPVSIKQYPMSQEARLGIKPHIQRLLDQGILVPCQSPWNTPLLPVKKPGTNDYRPVQDLREVNKRVEDIHPTVPNPYNLLSGLPPSHQWYTVLDLKDAFFCLRLHPTSQSLFAFEWRDPEMGISGQLTWTRLPQGFKNSPTLFNEALHRDLADFRIQHPDLILLQYVDDLLLAATSELDCQQGTRALLQTLGDLGYRASAKKAQICQKQVKYLGYLLKEGQRWLTEARKETVMGQPTPKTPRQLREFLGTAGFCRLWIPGFAEMAAPLYPLTKPGTLFEWGPDQQKAYQEIKQALLTAPALGLPDLTKPFELFVDEKQGYAKGVLTQKLGPWRRPVAYLSKKLDPVAAGWPPCLRMVAAIAVLTKDAGKLTMGQPLVILAPHAVEALVKQPPDRWLSNARMTHYQALLLDTDRVQFGPIVALNPATLLPLPEEGLQHDCLDILAEAHGTRPDLTDQPLPDADHTWYTDGSSFLQEGQRKAGAAVTTETEVVWAKALPAGTSAQRAELIALTQALKMAEGKKLNVYTDSRYAFATAHIHGEIYRRRGWLTSEGKEIKNKDEILALLKALFLPKRLSIIHCPGHQKGNRAEARGNRMADQAAREVATRETPETSTLLAGKRTADGSEFEKRTADGSEFESPKKKAKVE

SEQ ID NO: 2483 - protein, 2096 aa, synthetic construct
MPAAKRVKLDGGDKKYSIGLDIGTNSVGWAVITDEYKVPSKKFKVLGNTDRHSIKKNLIGALLFDSGETAEATRLKRTARRRYTRRKNRICYLQEIFSNEMAKVDDSFFHRLEESFLVEEDKKHERHPIFGNIVDEVAYHEKYPTIYHLRKKLVDSTDKADLRLIYLALAHMIKFRGHFLIEGDLNPDNSDVDKLFIQLVQTYNQLFEENPINASGVDAKAILSARLSKSRRLENLIAQLPGEKKNGLFGNLIALSLGLTPNFKSNFDLAEDAKLQLSKDTYDDDLDNLLAQIGDQYADLFLAAKNLSDAILLSDILRVNTEITKAPLSASMIKRYDEHHQDLTLLKALVRQQLPEKYKEIFFDQSKNGYAGYIDGGASQEEFYKFIKPILEKMDGTEELLVKLNREDLLRKQRTFDNGSIPHQIHLGELHAILRRQEDFYPFLKDNREKIEKILTFRIPYYVGPLARGNSRFAWMTRKSEETITPWNFEEVVDKGASAQSFIERMTNFDKNLPNEKVLPKHSLLYEYFTVYNELTKVKYVTEGMRKPAFLSGEQKKAIVDLLFKTNRKVTVKQLKEDYFKKIECFDSVEISGVEDRFNASLGTYHDLLKIIKDKDFLDNEENEDILEDIVLTLTLFEDREMIEERLKTYAHLFDDKVMKQLKRRRYTGWGRLSRKLINGIRDKQSGKTILDFLKSDGFANRNFMQLIHDDSLTFKEDIQKAQVSGQGDSLHEHIANLAGSPAIKKGILQTVKVVDELVKVMGRHKPENIVIEMARENQTTQKGQKNSRERMKRIEEGIKELGSQILKEHPVENTQLQNEKLYLYYLQNGRDMYVDQELDINRLSDYDVDHIVPQSFLKDDSIDNKVLTRSDKARGKSDNVPSEEVVKKMKNYWRQLLNAKLITQRKFDNLTKAERGGLSELDKAGFIKRQLVETRQITKHVAQILDSRMNTKYDENDKLIREVKVITLKSKLVSDFRKDFQFYKVREINNYHHAHDAYLNAVVGTALIKKYPKLESEFVYGDYKVYDVRKMIAKSEQEIGKATAKYFFYSNIMNFFKTEITLANGEIRKRPLIETNGETGEIVWDKGRDFATVRKVLSMPQVNIVKKTEVQTGGFSKESILPKRNSDKLIARKKDWDPKKYGGFDSPTVAYSVLVVAKVEKGKSKKLKSVKELLGITIMERSSFEKNPIDFLEAKGYKEVKKDLIIKLPKYSLFELENGRKRMLASAGELQKGNELALPSKYVNFLYLASHYEKLKGSPEDNEQKQLFVEQHKHYLDEIIEQISEFSKRVILADANLDKVLSAYNKHRDKPIREQAENIIHLFTLTNLGAPAAFKYFDTTIDRKRYTSTKEVLDATLIHQSITGLYETRIDLSQLGGDGGEAAAKGGGGGSGGTLNIEDEYRLHETSKGPDVPLGSTWLSDFPQAWAETGGMGLAVRQAPLIIPLKATSTPVSIKQYPMSQEARLGIKPHIQRLLDQGILVPCQSPWNTPLLPVKKPGTNDYRPVQDLREVNKRVEDIHPTVPNPYNLLSGLPPSHQWYTVLDLKDAFFCLRLHPTSQSLFAFEWRDPEMGISGQLTWTRLPQGFKNSPTLFNEALHRDLADFRIQHPDLILLQYVDDLLLAATSELDCQQGTRALLQTLGDLGYRASAKKAQICQKQVKYLGYLLKEGQRWLTEARKETVMGQPTPKTPRQLREFLGTAGFCRLWIPGFAEMAAPLYPLTKPGTLFEWGPDQQKAYQEIKQALLTAPALGLPDLTKPFELFVDEKQGYAKGVLTQKLGPWRRPVAYLSKKLDPVAAGWPPCLRMVAAIAVLTKDAGKLTMGQPLVILAPHAVEALVKQPPDRWLSNARMTHYQALLLDTDRVQFGPIVALNPATLLPLPEEGLQHDCLDILAEAHGTRPDLTDQPLPDADHTWYTDGSSFLQEGQRKAGAAVTTETEVVWAKALPAGTSAQRAELIALTQALKMAEGKKLNVYTDSRYAFATAHIHGEIYRRRGWLTSEGKEIKNKDEILALLKALFLPKRLSIIHCPGHQKGNRAEARGNRMADQAAREVATRETPETSTLLAGKRTADGSEFEKRTADGSEFESPKKKAKVE

SEQ ID NO: 2484 - protein, 2095 aa, synthetic construct
MPAAKRVKLDGGDKKYSIGLDIGTNSVGWAVITDEYKVPSKKFKVLGNTDRHSIKKNLIGALLFDSGETAEATRLKRTARRRYTRRKNRICYLQEIFSNEMAKVDDSFFHRLEESFLVEEDKKHERHPIFGNIVDEVAYHEKYPTIYHLRKKLVDSTDKADLRLIYLALAHMIKFRGHFLIEGDLNPDNSDVDKLFIQLVQTYNQLFEENPINASGVDAKAILSARLSKSRRLENLIAQLPGEKKNGLFGNLIALSLGLTPNFKSNFDLAEDAKLQLSKDTYDDDLDNLLAQIGDQYADLFLAAKNLSDAILLSDILRVNTEITKAPLSASMIKRYDEHHQDLTLLKALVRQQLPEKYKEIFFDQSKNGYAGYIDGGASQEEFYKFIKPILEKMDGTEELLVKLNREDLLRKQRTFDNGSIPHQIHLGELHAILRRQEDFYPFLKDNREKIEKILTFRIPYYVGPLARGNSRFAWMTRKSEETITPWNFEEVVDKGASAQSFIERMTNFDKNLPNEKVLPKHSLLYEYFTVYNELTKVKYVTEGMRKPAFLSGEQKKAIVDLLFKTNRKVTVKQLKEDYFKKIECFDSVEISGVEDRFNASLGTYHDLLKIIKDKDFLDNEENEDILEDIVLTLTLFEDREMIEERLKTYAHLFDDKVMKQLKRRRYTGWGRLSRKLINGIRDKQSGKTILDFLKSDGFANRNFMQLIHDDSLTFKEDIQKAQVSGQGDSLHEHIANLAGSPAIKKGILQTVKVVDELVKVMGRHKPENIVIEMARENQTTQKGQKNSRERMKRIEEGIKELGSQILKEHPVENTQLQNEKLYLYYLQNGRDMYVDQELDINRLSDYDVDHIVPQSFLKDDSIDNKVLTRSDKARGKSDNVPSEEVVKKMKNYWRQLLNAKLITQRKFDNLTKAERGGLSELDKAGFIKRQLVETRQITKHVAQILDSRMNTKYDENDKLIREVKVITLKSKLVSDFRKDFQFYKVREINNYHHAHDAYLNAVVGTALIKKYPKLESEFVYGDYKVYDVRKMIAKSEQEIGKATAKYFFYSNIMNFFKTEITLANGEIRKRPLIETNGETGEIVWDKGRDFATVRKVLSMPQVNIVKKTEVQTGGFSKESILPKRNSDKLIARKKDWDPKKYGGFDSPTVAYSVLVVAKVEKGKSKKLKSVKELLGITIMERSSFEKNPIDFLEAKGYKEVKKDLIIKLPKYSLFELENGRKRMLASAGELQKGNELALPSKYVNFLYLASHYEKLKGSPEDNEQKQLFVEQHKHYLDEIIEQISEFSKRVILADANLDKVLSAYNKHRDKPIREQAENIIHLFTLTNLGAPAAFKYFDTTIDRKRYTSTKEVLDATLIHQSITGLYETRIDLSQLGGDGGEAAAKEAAAKGGTLNIEDEYRLHETSKGPDVPLGSTWLSDFPQAWAETGGMGLAVRQAPLIIPLKATSTPVSIKQYPMSQEARLGIKPHIQRLLDQGILVPCQSPWNTPLLPVKKPGTNDYRPVQDLREVNKRVEDIHPTVPNPYNLLSGLPPSHQWYTVLDLKDAFFCLRLHPTSQSLFAFEWRDPEMGISGQLTWTRLPQGFKNSPTLFNEALHRDLADFRIQHPDLILLQYVDDLLLAATSELDCQQGTRALLQTLGDLGYRASAKKAQICQKQVKYLGYLLKEGQRWLTEARKETVMGQPTPKTPRQLREFLGTAGFCRLWIPGFAEMAAPLYPLTKPGTLFEWGPDQQKAYQEIKQALLTAPALGLPDLTKPFELFVDEKQGYAKGVLTQKLGPWRRPVAYLSKKLDPVAAGWPPCLRMVAAIAVLTKDAGKLTMGQPLVILAPHAVEALVKQPPDRWLSNARMTHYQALLLDTDRVQFGPIVALNPATLLPLPEEGLQHDCLDILAEAHGTRPDLTDQPLPDADHTWYTDGSSFLQEGQRKAGAAVTTETEVVWAKALPAGTSAQRAELIALTQALKMAEGKKLNVYTDSRYAFATAHIHGEIYRRRGWLTSEGKEIKNKDEILALLKALFLPKRLSIIHCPGHQKGNRAEARGNRMADQAAREVATRETPETSTLLAGKRTADGSEFEKRTADGSEFESPKKKAKVE

SEQ ID NO: 2485 - protein, 2096 aa, synthetic construct
MPAAKRVKLDGGDKKYSIGLDIGTNSVGWAVITDEYKVPSKKFKVLGNTDRHSIKKNLIGALLFDSGETAEATRLKRTARRRYTRRKNRICYLQEIFSNEMAKVDDSFFHRLEESFLVEEDKKHERHPIFGNIVDEVAYHEKYPTIYHLRKKLVDSTDKADLRLIYLALAHMIKFRGHFLIEGDLNPDNSDVDKLFIQLVQTYNQLFEENPINASGVDAKAILSARLSKSRRLENLIAQLPGEKKNGLFGNLIALSLGLTPNFKSNFDLAEDAKLQLSKDTYDDDLDNLLAQIGDQYADLFLAAKNLSDAILLSDILRVNTEITKAPLSASMIKRYDEHHQDLTLLKALVRQQLPEKYKEIFFDQSKNGYAGYIDGGASQEEFYKFIKPILEKMDGTEELLVKLNREDLLRKQRTFDNGSIPHQIHLGELHAILRRQEDFYPFLKDNREKIEKILTFRIPYYVGPLARGNSRFAWMTRKSEETITPWNFEEVVDKGASAQSFIERMTNFDKNLPNEKVLPKHSLLYEYFTVYNELTKVKYVTEGMRKPAFLSGEQKKAIVDLLFKTNRKVTVKQLKEDYFKKIECFDSVEISGVEDRFNASLGTYHDLLKIIKDKDFLDNEENEDILEDIVLTLTLFEDREMIEERLKTYAHLFDDKVMKQLKRRRYTGWGRLSRKLINGIRDKQSGKTILDFLKSDGFANRNFMQLIHDDSLTFKEDIQKAQVSGQGDSLHEHIANLAGSPAIKKGILQTVKVVDELVKVMGRHKPENIVIEMARENQTTQKGQKNSRERMKRIEEGIKELGSQILKEHPVENTQLQNEKLYLYYLQNGRDMYVDQELDINRLSDYDVDHIVPQSFLKDDSIDNKVLTRSDKARGKSDNVPSEEVVKKMKNYWRQLLNAKLITQRKFDNLTKAERGGLSELDKAGFIKRQLVETRQITKHVAQILDSRMNTKYDENDKLIREVKVITLKSKLVSDFRKDFQFYKVREINNYHHAHDAYLNAVVGTALIKKYPKLESEFVYGDYKVYDVRKMIAKSEQEIGKATAKYFFYSNIMNFFKTEITLANGEIRKRPLIETNGETGEIVWDKGRDFATVRKVLSMPQVNIVKKTEVQTGGFSKESILPKRNSDKLIARKKDWDPKKYGGFDSPTVAYSVLVVAKVEKGKSKKLKSVKELLGITIMERSSFEKNPIDFLEAKGYKEVKKDLIIKLPKYSLFELENGRKRMLASAGELQKGNELALPSKYVNFLYLASHYEKLKGSPEDNEQKQLFVEQHKHYLDEIIEQISEFSKRVILADANLDKVLSAYNKHRDKPIREQAENIIHLFTLTNLGAPAAFKYFDTTIDRKRYTSTKEVLDATLIHQSITGLYETRIDLSQLGGDGGGSSEAAAKPAPGGTLNIEDEYRLHETSKGPDVPLGSTWLSDFPQAWAETGGMGLAVRQAPLIIPLKATSTPVSIKQYPMSQEARLGIKPHIQRLLDQGILVPCQSPWNTPLLPVKKPGTNDYRPVQDLREVNKRVEDIHPTVPNPYNLLSGLPPSHQWYTVLDLKDAFFCLRLHPTSQSLFAFEWRDPEMGISGQLTWTRLPQGFKNSPTLFNEALHRDLADFRIQHPDLILLQYVDDLLLAATSELDCQQGTRALLQTLGDLGYRASAKKAQICQKQVKYLGYLLKEGQRWLTEARKETVMGQPTPKTPRQLREFLGTAGFCRLWIPGFAEMAAPLYPLTKPGTLFEWGPDQQKAYQEIKQALLTAPALGLPDLTKPFELFVDEKQGYAKGVLTQKLGPWRRPVAYLSKKLDPVAAGWPPCLRMVAAIAVLTKDAGKLTMGQPLVILAPHAVEALVKQPPDRWLSNARMTHYQALLLDTDRVQFGPIVALNPATLLPLPEEGLQHDCLDILAEAHGTRPDLTDQPLPDADHTWYTDGSSFLQEGQRKAGAAVTTETEVVWAKALPAGTSAQRAELIALTQALKMAEGKKLNVYTDSRYAFATAHIHGEIYRRRGWLTSEGKEIKNKDEILALLKALFLPKRLSIIHCPGHQKGNRAEARGNRMADQAAREVATRETPETSTLLAGKRTADGSEFEKRTADGSEFESPKKKAKVE

SEQ ID NO: 2486 - protein, 2096 aa, synthetic construct
MPAAKRVKLDGGDKKYSIGLDIGTNSVGWAVITDEYKVPSKKFKVLGNTDRHSIKKNLIGALLFDSGETAEATRLKRTARRRYTRRKNRICYLQEIFSNEMAKVDDSFFHRLEESFLVEEDKKHERHPIFGNIVDEVAYHEKYPTIYHLRKKLVDSTDKADLRLIYLALAHMIKFRGHFLIEGDLNPDNSDVDKLFIQLVQTYNQLFEENPINASGVDAKAILSARLSKSRRLENLIAQLPGEKKNGLFGNLIALSLGLTPNFKSNFDLAEDAKLQLSKDTYDDDLDNLLAQIGDQYADLFLAAKNLSDAILLSDILRVNTEITKAPLSASMIKRYDEHHQDLTLLKALVRQQLPEKYKEIFFDQSKNGYAGYIDGGASQEEFYKFIKPILEKMDGTEELLVKLNREDLLRKQRTFDNGSIPHQIHLGELHAILRRQEDFYPFLKDNREKIEKILTFRIPYYVGPLARGNSRFAWMTRKSEETITPWNFEEVVDKGASAQSFIERMTNFDKNLPNEKVLPKHSLLYEYFTVYNELTKVKYVTEGMRKPAFLSGEQKKAIVDLLFKTNRKVTVKQLKEDYFKKIECFDSVEISGVEDRFNASLGTYHDLLKIIKDKDFLDNEENEDILEDIVLTLTLFEDREMIEERLKTYAHLFDDKVMKQLKRRRYTGWGRLSRKLINGIRDKQSGKTILDFLKSDGFANRNFMQLIHDDSLTFKEDIQKAQVSGQGDSLHEHIANLAGSPAIKKGILQTVKVVDELVKVMGRHKPENIVIEMARENQTTQKGQKNSRERMKRIEEGIKELGSQILKEHPVENTQLQNEKLYLYYLQNGRDMYVDQELDINRLSDYDVDHIVPQSFLKDDSIDNKVLTRSDKARGKSDNVPSEEVVKKMKNYWRQLLNAKLITQRKFDNLTKAERGGLSELDKAGFIKRQLVETRQITKHVAQILDSRMNTKYDENDKLIREVKVITLKSKLVSDFRKDFQFYKVREINNYHHAHDAYLNAVVGTALIKKYPKLESEFVYGDYKVYDVRKMIAKSEQEIGKATAKYFFYSNIMNFFKTEITLANGEIRKRPLIETNGETGEIVWDKGRDFATVRKVLSMPQVNIVKKTEVQTGGFSKESILPKRNSDKLIARKKDWDPKKYGGFDSPTVAYSVLVVAKVEKGKSKKLKSVKELLGITIMERSSFEKNPIDFLEAKGYKEVKKDLIIKLPKYSLFELENGRKRMLASAGELQKGNELALPSKYVNFLYLASHYEKLKGSPEDNEQKQLFVEQHKHYLDEIIEQISEFSKRVILADANLDKVLSAYNKHRDKPIREQAENIIHLFTLTNLGAPAAFKYFDTTIDRKRYTSTKEVLDATLIHQSITGLYETRIDLSQLGGDGGGGSEAAAKPAPGGTLNIEDEYRLHETSKGPDVPLGSTWLSDFPQAWAETGGMGLAVRQAPLIIPLKATSTPVSIKQYPMSQEARLGIKPHIQRLLDQGILVPCQSPWNTPLLPVKKPGTNDYRPVQDLREVNKRVEDIHPTVPNPYNLLSGLPPSHQWYTVLDLKDAFFCLRLHPTSQSLFAFEWRDPEMGISGQLTWTRLPQGFKNSPTLFNEALHRDLADFRIQHPDLILLQYVDDLLLAATSELDCQQGTRALLQTLGDLGYRASAKKAQICQKQVKYLGYLLKEGQRWLTEARKETVMGQPTPKTPRQLREFLGTAGFCRLWIPGFAEMAAPLYPLTKPGTLFEWGPDQQKAYQEIKQALLTAPALGLPDLTKPFELFVDEKQGYAKGVLTQKLGPWRRPVAYLSKKLDPVAAGWPPCLRMVAAIAVLTKDAGKLTMGQPLVILAPHAVEALVKQPPDRWLSNARMTHYQALLLDTDRVQFGPIVALNPATLLPLPEEGLQHDCLDILAEAHGTRPDLTDQPLPDADHTWYTDGSSFLQEGQRKAGAAVTTETEVVWAKALPAGTSAQRAELIALTQALKMAEGKKLNVYTDSRYAFATAHIHGEIYRRRGWLTSEGKEIKNKDEILALLKALFLPKRLSIIHCPGHQKGNRAEARGNRMADQAAREVATRETPETSTLLAGKRTADGSEFEKRTADGSEFESPKKKAKVE

SEQ ID NO: 2487 - protein, 2091 aa, synthetic construct
MPAAKRVKLDGGDKKYSIGLDIGTNSVGWAVITDEYKVPSKKFKVLGNTDRHSIKKNLIGALLFDSGETAEATRLKRTARRRYTRRKNRICYLQEIFSNEMAKVDDSFFHRLEESFLVEEDKKHERHPIFGNIVDEVAYHEKYPTIYHLRKKLVDSTDKADLRLIYLALAHMIKFRGHFLIEGDLNPDNSDVDKLFIQLVQTYNQLFEENPINASGVDAKAILSARLSKSRRLENLIAQLPGEKKNGLFGNLIALSLGLTPNFKSNFDLAEDAKLQLSKDTYDDDLDNLLAQIGDQYADLFLAAKNLSDAILLSDILRVNTEITKAPLSASMIKRYDEHHQDLTLLKALVRQQLPEKYKEIFFDQSKNGYAGYIDGGASQEEFYKFIKPILEKMDGTEELLVKLNREDLLRKQRTFDNGSIPHQIHLGELHAILRRQEDFYPFLKDNREKIEKILTFRIPYYVGPLARGNSRFAWMTRKSEETITPWNFEEVVDKGASAQSFIERMTNFDKNLPNEKVLPKHSLLYEYFTVYNELTKVKYVTEGMRKPAFLSGEQKKAIVDLLFKTNRKVTVKQLKEDYFKKIECFDSVEISGVEDRFNASLGTYHDLLKIIKDKDFLDNEENEDILEDIVLTLTLFEDREMIEERLKTYAHLFDDKVMKQLKRRRYTGWGRLSRKLINGIRDKQSGKTILDFLKSDGFANRNFMQLIHDDSLTFKEDIQKAQVSGQGDSLHEHIANLAGSPAIKKGILQTVKVVDELVKVMGRHKPENIVIEMARENQTTQKGQKNSRERMKRIEEGIKELGSQILKEHPVENTQLQNEKLYLYYLQNGRDMYVDQELDINRLSDYDVDHIVPQSFLKDDSIDNKVLTRSDKARGKSDNVPSEEVVKKMKNYWRQLLNAKLITQRKFDNLTKAERGGLSELDKAGFIKRQLVETRQITKHVAQILDSRMNTKYDENDKLIREVKVITLKSKLVSDFRKDFQFYKVREINNYHHAHDAYLNAVVGTALIKKYPKLESEFVYGDYKVYDVRKMIAKSEQEIGKATAKYFFYSNIMNFFKTEITLANGEIRKRPLIETNGETGEIVWDKGRDFATVRKVLSMPQVNIVKKTEVQTGGFSKESILPKRNSDKLIARKKDWDPKKYGGFDSPTVAYSVLVVAKVEKGKSKKLKSVKELLGITIMERSSFEKNPIDFLEAKGYKEVKKDLIIKLPKYSLFELENGRKRMLASAGELQKGNELALPSKYVNFLYLASHYEKLKGSPEDNEQKQLFVEQHKHYLDEIIEQISEFSKRVILADANLDKVLSAYNKHRDKPIREQAENIIHLFTLTNLGAPAAFKYFDTTIDRKRYTSTKEVLDATLIHQSITGLYETRIDLSQLGGDGGGGSGSSGGTLNIEDEYRLHETSKGPDVPLGSTWLSDFPQAWAETGGMGLAVRQAPLIIPLKATSTPVSIKQYPMSQEARLGIKPHIQRLLDQGILVPCQSPWNTPLLPVKKPGTNDYRPVQDLREVNKRVEDIHPTVPNPYNLLSGLPPSHQWYTVLDLKDAFFCLRLHPTSQSLFAFEWRDPEMGISGQLTWTRLPQGFKNSPTLFNEALHRDLADFRIQHPDLILLQYVDDLLLAATSELDCQQGTRALLQTLGDLGYRASAKKAQICQKQVKYLGYLLKEGQRWLTEARKETVMGQPTPKTPRQLREFLGTAGFCRLWIPGFAEMAAPLYPLTKPGTLFEWGPDQQKAYQEIKQALLTAPALGLPDLTKPFELFVDEKQGYAKGVLTQKLGPWRRPVAYLSKKLDPVAAGWPPCLRMVAAIAVLTKDAGKLTMGQPLVILAPHAVEALVKQPPDRWLSNARMTHYQALLLDTDRVQFGPIVALNPATLLPLPEEGLQHDCLDILAEAHGTRPDLTDQPLPDADHTWYTDGSSFLQEGQRKAGAAVTTETEVVWAKALPAGTSAQRAELIALTQALKMAEGKKLNVYTDSRYAFATAHIHGEIYRRRGWLTSEGKEIKNKDEILALLKALFLPKRLSIIHCPGHQKGNRAEARGNRMADQAAREVATRETPETSTLLAGKRTADGSEFEKRTADGSEFESPKKKAKVE

SEQ ID NO: 2488 - protein, 2096 aa, synthetic construct
MPAAKRVKLDGGDKKYSIGLDIGTNSVGWAVITDEYKVPSKKFKVLGNTDRHSIKKNLIGALLFDSGETAEATRLKRTARRRYTRRKNRICYLQEIFSNEMAKVDDSFFHRLEESFLVEEDKKHERHPIFGNIVDEVAYHEKYPTIYHLRKKLVDSTDKADLRLIYLALAHMIKFRGHFLIEGDLNPDNSDVDKLFIQLVQTYNQLFEENPINASGVDAKAILSARLSKSRRLENLIAQLPGEKKNGLFGNLIALSLGLTPNFKSNFDLAEDAKLQLSKDTYDDDLDNLLAQIGDQYADLFLAAKNLSDAILLSDILRVNTEITKAPLSASMIKRYDEHHQDLTLLKALVRQQLPEKYKEIFFDQSKNGYAGYIDGGASQEEFYKFIKPILEKMDGTEELLVKLNREDLLRKQRTFDNGSIPHQIHLGELHAILRRQEDFYPFLKDNREKIEKILTFRIPYYVGPLARGNSRFAWMTRKSEETITPWNFEEVVDKGASAQSFIERMTNFDKNLPNEKVLPKHSLLYEYFTVYNELTKVKYVTEGMRKPAFLSGEQKKAIVDLLFKTNRKVTVKQLKEDYFKKIECFDSVEISGVEDRFNASLGTYHDLLKIIKDKDFLDNEENEDILEDIVLTLTLFEDREMIEERLKTYAHLFDDKVMKQLKRRRYTGWGRLSRKLINGIRDKQSGKTILDFLKSDGFANRNFMQLIHDDSLTFKEDIQKAQVSGQGDSLHEHIANLAGSPAIKKGILQTVKVVDELVKVMGRHKPENIVIEMARENQTTQKGQKNSRERMKRIEEGIKELGSQILKEHPVENTQLQNEKLYLYYLQNGRDMYVDQELDINRLSDYDVDHIVPQSFLKDDSIDNKVLTRSDKARGKSDNVPSEEVVKKMKNYWRQLLNAKLITQRKFDNLTKAERGGLSELDKAGFIKRQLVETRQITKHVAQILDSRMNTKYDENDKLIREVKVITLKSKLVSDFRKDFQFYKVREINNYHHAHDAYLNAVVGTALIKKYPKLESEFVYGDYKVYDVRKMIAKSEQEIGKATAKYFFYSNIMNFFKTEITLANGEIRKRPLIETNGETGEIVWDKGRDFATVRKVLSMPQVNIVKKTEVQTGGFSKESILPKRNSDKLIARKKDWDPKKYGGFDSPTVAYSVLVVAKVEKGKSKKLKSVKELLGITIMERSSFEKNPIDFLEAKGYKEVKKDLIIKLPKYSLFELENGRKRMLASAGELQKGNELALPSKYVNFLYLASHYEKLKGSPEDNEQKQLFVEQHKHYLDEIIEQISEFSKRVILADANLDKVLSAYNKHRDKPIREQAENIIHLFTLTNLGAPAAFKYFDTTIDRKRYTSTKEVLDATLIHQSITGLYETRIDLSQLGGDGGGSSGGSEAAAKGGTLNIEDEYRLHETSKGPDVPLGSTWLSDFPQAWAETGGMGLAVRQAPLIIPLKATSTPVSIKQYPMSQEARLGIKPHIQRLLDQGILVPCQSPWNTPLLPVKKPGTNDYRPVQDLREVNKRVEDIHPTVPNPYNLLSGLPPSHQWYTVLDLKDAFFCLRLHPTSQSLFAFEWRDPEMGISGQLTWTRLPQGFKNSPTLFNEALHRDLADFRIQHPDLILLQYVDDLLLAATSELDCQQGTRALLQTLGDLGYRASAKKAQICQKQVKYLGYLLKEGQRWLTEARKETVMGQPTPKTPRQLREFLGTAGFCRLWIPGFAEMAAPLYPLTKPGTLFEWGPDQQKAYQEIKQALLTAPALGLPDLTKPFELFVDEKQGYAKGVLTQKLGPWRRPVAYLSKKLDPVAAGWPPCLRMVAAIAVLTKDAGKLTMGQPLVILAPHAVEALVKQPPDRWLSNARMTHYQALLLDTDRVQFGPIVALNPATLLPLPEEGLQHDCLDILAEAHGTRPDLTDQPLPDADHTWYTDGSSFLQEGQRKAGAAVTTETEVVWAKALPAGTSAQRAELIALTQALKMAEGKKLNVYTDSRYAFATAHIHGEIYRRRGWLTSEGKEIKNKDEILALLKALFLPKRLSIIHCPGHQKGNRAEARGNRMADQAAREVATRETPETSTLLAGKRTADGSEFEKRTADGSEFESPKKKAKVE

SEQ ID NO: 2489 - protein, 2101 aa, synthetic construct
MPAAKRVKLDGGDKKYSIGLDIGTNSVGWAVITDEYKVPSKKFKVLGNTDRHSIKKNLIGALLFDSGETAEATRLKRTARRRYTRRKNRICYLQEIFSNEMAKVDDSFFHRLEESFLVEEDKKHERHPIFGNIVDEVAYHEKYPTIYHLRKKLVDSTDKADLRLIYLALAHMIKFRGHFLIEGDLNPDNSDVDKLFIQLVQTYNQLFEENPINASGVDAKAILSARLSKSRRLENLIAQLPGEKKNGLFGNLIALSLGLTPNFKSNFDLAEDAKLQLSKDTYDDDLDNLLAQIGDQYADLFLAAKNLSDAILLSDILRVNTEITKAPLSASMIKRYDEHHQDLTLLKALVRQQLPEKYKEIFFDQSKNGYAGYIDGGASQEEFYKFIKPILEKMDGTEELLVKLNREDLLRKQRTFDNGSIPHQIHLGELHAILRRQEDFYPFLKDNREKIEKILTFRIPYYVGPLARGNSRFAWMTRKSEETITPWNFEEVVDKGASAQSFIERMTNFDKNLPNEKVLPKHSLLYEYFTVYNELTKVKYVTEGMRKPAFLSGEQKKAIVDLLFKTNRKVTVKQLKEDYFKKIECFDSVEISGVEDRFNASLGTYHDLLKIIKDKDFLDNEENEDILEDIVLTLTLFEDREMIEERLKTYAHLFDDKVMKQLKRRRYTGWGRLSRKLINGIRDKQSGKTILDFLKSDGFANRNFMQLIHDDSLTFKEDIQKAQVSGQGDSLHEHIANLAGSPAIKKGILQTVKVVDELVKVMGRHKPENIVIEMARENQTTQKGQKNSRERMKRIEEGIKELGSQILKEHPVENTQLQNEKLYLYYLQNGRDMYVDQELDINRLSDYDVDHIVPQSFLKDDSIDNKVLTRSDKARGKSDNVPSEEVVKKMKNYWRQLLNAKLITQRKFDNLTKAERGGLSELDKAGFIKRQLVETRQITKHVAQILDSRMNTKYDENDKLIREVKVITLKSKLVSDFRKDFQFYKVREINNYHHAHDAYLNAVVGTALIKKYPKLESEFVYGDYKVYDVRKMIAKSEQEIGKATAKYFFYSNIMNFFKTEITLANGEIRKRPLIETNGETGEIVWDKGRDFATVRKVLSMPQVNIVKKTEVQTGGFSKESILPKRNSDKLIARKKDWDPKKYGGFDSPTVAYSVLVVAKVEKGKSKKLKSVKELLGITIMERSSFEKNPIDFLEAKGYKEVKKDLIIKLPKYSLFELENGRKRMLASAGELQKGNELALPSKYVNFLYLASHYEKLKGSPEDNEQKQLFVEQHKHYLDEIIEQISEFSKRVILADANLDKVLSAYNKHRDKPIREQAENIIHLFTLTNLGAPAAFKYFDTTIDRKRYTSTKEVLDATLIHQSITGLYETRIDLSQLGGDGGSGSETPGTSESATPESGGTLNIEDEYRLHETSKGPDVPLGSTWLSDFPQAWAETGGMGLAVRQAPLIIPLKATSTPVSIKQYPMSQEARLGIKPHIQRLLDQGILVPCQSPWNTPLLPVKKPGTNDYRPVQDLREVNKRVEDIHPTVPNPYNLLSGLPPSHQWYTVLDLKDAFFCLRLHPTSQSLFAFEWRDPEMGISGQLTWTRLPQGFKNSPTLFNEALHRDLADFRIQHPDLILLQYVDDLLLAATSELDCQQGTRALLQTLGDLGYRASAKKAQICQKQVKYLGYLLKEGQRWLTEARKETVMGQPTPKTPRQLREFLGTAGFCRLWIPGFAEMAAPLYPLTKPGTLFEWGPDQQKAYQEIKQALLTAPALGLPDLTKPFELFVDEKQGYAKGVLTQKLGPWRRPVAYLSKKLDPVAAGWPPCLRMVAAIAVLTKDAGKLTMGQPLVILAPHAVEALVKQPPDRWLSNARMTHYQALLLDTDRVQFGPIVALNPATLLPLPEEGLQHDCLDILAEAHGTRPDLTDQPLPDADHTWYTDGSSFLQEGQRKAGAAVTTETEVVWAKALPAGTSAQRAELIALTQALKMAEGKKLNVYTDSRYAFATAHIHGEIYRRRGWLTSEGKEIKNKDEILALLKALFLPKRLSIIHCPGHQKGNRAEARGNRMADQAAREVATRETPETSTLLAGKRTADGSEFEKRTADGSEFESPKKKAKVE

SEQ ID NO: 2490 - protein, 2097 aa, synthetic construct
MPAAKRVKLDGGDKKYSIGLDIGTNSVGWAVITDEYKVPSKKFKVLGNTDRHSIKKNLIGALLFDSGETAEATRLKRTARRRYTRRKNRICYLQEIFSNEMAKVDDSFFHRLEESFLVEEDKKHERHPIFGNIVDEVAYHEKYPTIYHLRKKLVDSTDKADLRLIYLALAHMIKFRGHFLIEGDLNPDNSDVDKLFIQLVQTYNQLFEENPINASGVDAKAILSARLSKSRRLENLIAQLPGEKKNGLFGNLIALSLGLTPNFKSNFDLAEDAKLQLSKDTYDDDLDNLLAQIGDQYADLFLAAKNLSDAILLSDILRVNTEITKAPLSASMIKRYDEHHQDLTLLKALVRQQLPEKYKEIFFDQSKNGYAGYIDGGASQEEFYKFIKPILEKMDGTEELLVKLNREDLLRKQRTFDNGSIPHQIHLGELHAILRRQEDFYPFLKDNREKIEKILTFRIPYYVGPLARGNSRFAWMTRKSEETITPWNFEEVVDKGASAQSFIERMTNFDKNLPNEKVLPKHSLLYEYFTVYNELTKVKYVTEGMRKPAFLSGEQKKAIVDLLFKTNRKVTVKQLKEDYFKKIECFDSVEISGVEDRFNASLGTYHDLLKIIKDKDFLDNEENEDILEDIVLTLTLFEDREMIEERLKTYAHLFDDKVMKQLKRRRYTGWGRLSRKLINGIRDKQSGKTILDFLKSDGFANRNFMQLIHDDSLTFKEDIQKAQVSGQGDSLHEHIANLAGSPAIKKGILQTVKVVDELVKVMGRHKPENIVIEMARENQTTQKGQKNSRERMKRIEEGIKELGSQILKEHPVENTQLQNEKLYLYYLQNGRDMYVDQELDINRLSDYDVDHIVPQSFLKDDSIDNKVLTRSDKARGKSDNVPSEEVVKKMKNYWRQLLNAKLITQRKFDNLTKAERGGLSELDKAGFIKRQLVETRQITKHVAQILDSRMNTKYDENDKLIREVKVITLKSKLVSDFRKDFQFYKVREINNYHHAHDAYLNAVVGTALIKKYPKLESEFVYGDYKVYDVRKMIAKSEQEIGKATAKYFFYSNIMNFFKTEITLANGEIRKRPLIETNGETGEIVWDKGRDFATVRKVLSMPQVNIVKKTEVQTGGFSKESILPKRNSDKLIARKKDWDPKKYGGFDSPTVAYSVLVVAKVEKGKSKKLKSVKELLGITIMERSSFEKNPIDFLEAKGYKEVKKDLIIKLPKYSLFELENGRKRMLASAGELQKGNELALPSKYVNFLYLASHYEKLKGSPEDNEQKQLFVEQHKHYLDEIIEQISEFSKRVILADANLDKVLSAYNKHRDKPIREQAENIIHLFTLTNLGAPAAFKYFDTTIDRKRYTSTKEVLDATLIHQSITGLYETRIDLSQLGGDGGGSAGSAAGSGEFGGTLNIEDEYRLHETSKGPDVPLGSTWLSDFPQAWAETGGMGLAVRQAPLIIPLKATSTPVSIKQYPMSQEARLGIKPHIQRLLDQGILVPCQSPWNTPLLPVKKPGTNDYRPVQDLREVNKRVEDIHPTVPNPYNLLSGLPPSHQWYTVLDLKDAFFCLRLHPTSQSLFAFEWRDPEMGISGQLTWTRLPQGFKNSPTLFNEALHRDLADFRIQHPDLILLQYVDDLLLAATSELDCQQGTRALLQTLGDLGYRASAKKAQICQKQVKYLGYLLKEGQRWLTEARKETVMGQPTPKTPRQLREFLGTAGFCRLWIPGFAEMAAPLYPLTKPGTLFEWGPDQQKAYQEIKQALLTAPALGLPDLTKPFELFVDEKQGYAKGVLTQKLGPWRRPVAYLSKKLDPVAAGWPPCLRMVAAIAVLTKDAGKLTMGQPLVILAPHAVEALVKQPPDRWLSNARMTHYQALLLDTDRVQFGPIVALNPATLLPLPEEGLQHDCLDILAEAHGTRPDLTDQPLPDADHTWYTDGSSFLQEGQRKAGAAVTTETEVVWAKALPAGTSAQRAELIALTQALKMAEGKKLNVYTDSRYAFATAHIHGEIYRRRGWLTSEGKEIKNKDEILALLKALFLPKRLSIIHCPGHQKGNRAEARGNRMADQAAREVATRETPETSTLLAGKRTADGSEFEKRTADGSEFESPKKKAKVE

SEQ ID NO: 2491 - protein, 2094 aa, synthetic construct
MPAAKRVKLDGGDKKYSIGLDIGTNSVGWAVITDEYKVPSKKFKVLGNTDRHSIKKNLIGALLFDSGETAEATRLKRTARRRYTRRKNRICYLQEIFSNEMAKVDDSFFHRLEESFLVEEDKKHERHPIFGNIVDEVAYHEKYPTIYHLRKKLVDSTDKADLRLIYLALAHMIKFRGHFLIEGDLNPDNSDVDKLFIQLVQTYNQLFEENPINASGVDAKAILSARLSKSRRLENLIAQLPGEKKNGLFGNLIALSLGLTPNFKSNFDLAEDAKLQLSKDTYDDDLDNLLAQIGDQYADLFLAAKNLSDAILLSDILRVNTEITKAPLSASMIKRYDEHHQDLTLLKALVRQQLPEKYKEIFFDQSKNGYAGYIDGGASQEEFYKFIKPILEKMDGTEELLVKLNREDLLRKQRTFDNGSIPHQIHLGELHAILRRQEDFYPFLKDNREKIEKILTFRIPYYVGPLARGNSRFAWMTRKSEETITPWNFEEVVDKGASAQSFIERMTNFDKNLPNEKVLPKHSLLYEYFTVYNELTKVKYVTEGMRKPAFLSGEQKKAIVDLLFKTNRKVTVKQLKEDYFKKIECFDSVEISGVEDRFNASLGTYHDLLKIIKDKDFLDNEENEDILEDIVLTLTLFEDREMIEERLKTYAHLFDDKVMKQLKRRRYTGWGRLSRKLINGIRDKQSGKTILDFLKSDGFANRNFMQLIHDDSLTFKEDIQKAQVSGQGDSLHEHIANLAGSPAIKKGILQTVKVVDELVKVMGRHKPENIVIEMARENQTTQKGQKNSRERMKRIEEGIKELGSQILKEHPVENTQLQNEKLYLYYLQNGRDMYVDQELDINRLSDYDVDHIVPQSFLKDDSIDNKVLTRSDKARGKSDNVPSEEVVKKMKNYWRQLLNAKLITQRKFDNLTKAERGGLSELDKAGFIKRQLVETRQITKHVAQILDSRMNTKYDENDKLIREVKVITLKSKLVSDFRKDFQFYKVREINNYHHAHDAYLNAVVGTALIKKYPKLESEFVYGDYKVYDVRKMIAKSEQEIGKATAKYFFYSNIMNFFKTEITLANGEIRKRPLIETNGETGEIVWDKGRDFATVRKVLSMPQVNIVKKTEVQTGGFSKESILPKRNSDKLIARKKDWDPKKYGGFDSPTVAYSVLVVAKVEKGKSKKLKSVKELLGITIMERSSFEKNPIDFLEAKGYKEVKKDLIIKLPKYSLFELENGRKRMLASAGELQKGNELALPSKYVNFLYLASHYEKLKGSPEDNEQKQLFVEQHKHYLDEIIEQISEFSKRVILADANLDKVLSAYNKHRDKPIREQAENIIHLFTLTNLGAPAAFKYFDTTIDRKRYTSTKEVLDATLIHQSITGLYETRIDLSQLGGDGGGSSGGSPAPGGTLNIEDEYRLHETSKGPDVPLGSTWLSDFPQAWAETGGMGLAVRQAPLIIPLKATSTPVSIKQYPMSQEARLGIKPHIQRLLDQGILVPCQSPWNTPLLPVKKPGTNDYRPVQDLREVNKRVEDIHPTVPNPYNLLSGLPPSHQWYTVLDLKDAFFCLRLHPTSQSLFAFEWRDPEMGISGQLTWTRLPQGFKNSPTLFNEALHRDLADFRIQHPDLILLQYVDDLLLAATSELDCQQGTRALLQTLGDLGYRASAKKAQICQKQVKYLGYLLKEGQRWLTEARKETVMGQPTPKTPRQLREFLGTAGFCRLWIPGFAEMAAPLYPLTKPGTLFEWGPDQQKAYQEIKQALLTAPALGLPDLTKPFELFVDEKQGYAKGVLTQKLGPWRRPVAYLSKKLDPVAAGWPPCLRMVAAIAVLTKDAGKLTMGQPLVILAPHAVEALVKQPPDRWLSNARMTHYQALLLDTDRVQFGPIVALNPATLLPLPEEGLQHDCLDILAEAHGTRPDLTDQPLPDADHTWYTDGSSFLQEGQRKAGAAVTTETEVVWAKALPAGTSAQRAELIALTQALKMAEGKKLNVYTDSRYAFATAHIHGEIYRRRGWLTSEGKEIKNKDEILALLKALFLPKRLSIIHCPGHQKGNRAEARGNRMADQAAREVATRETPETSTLLAGKRTADGSEFEKRTADGSEFESPKKKAKVE

SEQ ID NO: 2492 - protein, 2091 aa, synthetic construct
MPAAKRVKLDGGDKKYSIGLDIGTNSVGWAVITDEYKVPSKKFKVLGNTDRHSIKKNLIGALLFDSGETAEATRLKRTARRRYTRRKNRICYLQEIFSNEMAKVDDSFFHRLEESFLVEEDKKHERHPIFGNIVDEVAYHEKYPTIYHLRKKLVDSTDKADLRLIYLALAHMIKFRGHFLIEGDLNPDNSDVDKLFIQLVQTYNQLFEENPINASGVDAKAILSARLSKSRRLENLIAQLPGEKKNGLFGNLIALSLGLTPNFKSNFDLAEDAKLQLSKDTYDDDLDNLLAQIGDQYADLFLAAKNLSDAILLSDILRVNTEITKAPLSASMIKRYDEHHQDLTLLKALVRQQLPEKYKEIFFDQSKNGYAGYIDGGASQEEFYKFIKPILEKMDGTEELLVKLNREDLLRKQRTFDNGSIPHQIHLGELHAILRRQEDFYPFLKDNREKIEKILTFRIPYYVGPLARGNSRFAWMTRKSEETITPWNFEEVVDKGASAQSFIERMTNFDKNLPNEKVLPKHSLLYEYFTVYNELTKVKYVTEGMRKPAFLSGEQKKAIVDLLFKTNRKVTVKQLKEDYFKKIECFDSVEISGVEDRFNASLGTYHDLLKIIKDKDFLDNEENEDILEDIVLTLTLFEDREMIEERLKTYAHLFDDKVMKQLKRRRYTGWGRLSRKLINGIRDKQSGKTILDFLKSDGFANRNFMQLIHDDSLTFKEDIQKAQVSGQGDSLHEHIANLAGSPAIKKGILQTVKVVDELVKVMGRHKPENIVIEMARENQTTQKGQKNSRERMKRIEEGIKELGSQILKEHPVENTQLQNEKLYLYYLQNGRDMYVDQELDINRLSDYDVDHIVPQSFLKDDSIDNKVLTRSDKARGKSDNVPSEEVVKKMKNYWRQLLNAKLITQRKFDNLTKAERGGLSELDKAGFIKRQLVETRQITKHVAQILDSRMNTKYDENDKLIREVKVITLKSKLVSDFRKDFQFYKVREINNYHHAHDAYLNAVVGTALIKKYPKLESEFVYGDYKVYDVRKMIAKSEQEIGKATAKYFFYSNIMNFFKTEITLANGEIRKRPLIETNGETGEIVWDKGRDFATVRKVLSMPQVNIVKKTEVQTGGFSKESILPKRNSDKLIARKKDWDPKKYGGFDSPTVAYSVLVVAKVEKGKSKKLKSVKELLGITIMERSSFEKNPIDFLEAKGYKEVKKDLIIKLPKYSLFELENGRKRMLASAGELQKGNELALPSKYVNFLYLASHYEKLKGSPEDNEQKQLFVEQHKHYLDEIIEQISEFSKRVILADANLDKVLSAYNKHRDKPIREQAENIIHLFTLTNLGAPAAFKYFDTTIDRKRYTSTKEVLDATLIHQSITGLYETRIDLSQLGGDGGPAPGGGGGTLNIEDEYRLHETSKGPDVPLGSTWLSDFPQAWAETGGMGLAVRQAPLIIPLKATSTPVSIKQYPMSQEARLGIKPHIQRLLDQGILVPCQSPWNTPLLPVKKPGTNDYRPVQDLREVNKRVEDIHPTVPNPYNLLSGLPPSHQWYTVLDLKDAFFCLRLHPTSQSLFAFEWRDPEMGISGQLTWTRLPQGFKNSPTLFNEALHRDLADFRIQHPDLILLQYVDDLLLAATSELDCQQGTRALLQTLGDLGYRASAKKAQICQKQVKYLGYLLKEGQRWLTEARKETVMGQPTPKTPRQLREFLGTAGFCRLWIPGFAEMAAPLYPLTKPGTLFEWGPDQQKAYQEIKQALLTAPALGLPDLTKPFELFVDEKQGYAKGVLTQKLGPWRRPVAYLSKKLDPVAAGWPPCLRMVAAIAVLTKDAGKLTMGQPLVILAPHAVEALVKQPPDRWLSNARMTHYQALLLDTDRVQFGPIVALNPATLLPLPEEGLQHDCLDILAEAHGTRPDLTDQPLPDADHTWYTDGSSFLQEGQRKAGAAVTTETEVVWAKALPAGTSAQRAELIALTQALKMAEGKKLNVYTDSRYAFATAHIHGEIYRRRGWLTSEGKEIKNKDEILALLKALFLPKRLSIIHCPGHQKGNRAEARGNRMADQAAREVATRETPETSTLLAGKRTADGSEFEKRTADGSEFESPKKKAKVE

SEQ ID NO: 2493 - protein, 2094 aa, synthetic construct
MPAAKRVKLDGGDKKYSIGLDIGTNSVGWAVITDEYKVPSKKFKVLGNTDRHSIKKNLIGALLFDSGETAEATRLKRTARRRYTRRKNRICYLQEIFSNEMAKVDDSFFHRLEESFLVEEDKKHERHPIFGNIVDEVAYHEKYPTIYHLRKKLVDSTDKADLRLIYLALAHMIKFRGHFLIEGDLNPDNSDVDKLFIQLVQTYNQLFEENPINASGVDAKAILSARLSKSRRLENLIAQLPGEKKNGLFGNLIALSLGLTPNFKSNFDLAEDAKLQLSKDTYDDDLDNLLAQIGDQYADLFLAAKNLSDAILLSDILRVNTEITKAPLSASMIKRYDEHHQDLTLLKALVRQQLPEKYKEIFFDQSKNGYAGYIDGGASQEEFYKFIKPILEKMDGTEELLVKLNREDLLRKQRTFDNGSIPHQIHLGELHAILRRQEDFYPFLKDNREKIEKILTFRIPYYVGPLARGNSRFAWMTRKSEETITPWNFEEVVDKGASAQSFIERMTNFDKNLPNEKVLPKHSLLYEYFTVYNELTKVKYVTEGMRKPAFLSGEQKKAIVDLLFKTNRKVTVKQLKEDYFKKIECFDSVEISGVEDRFNASLGTYHDLLKIIKDKDFLDNEENEDILEDIVLTLTLFEDREMIEERLKTYAHLFDDKVMKQLKRRRYTGWGRLSRKLINGIRDKQSGKTILDFLKSDGFANRNFMQLIHDDSLTFKEDIQKAQVSGQGDSLHEHIANLAGSPAIKKGILQTVKVVDELVKVMGRHKPENIVIEMARENQTTQKGQKNSRERMKRIEEGIKELGSQILKEHPVENTQLQNEKLYLYYLQNGRDMYVDQELDINRLSDYDVDHIVPQSFLKDDSIDNKVLTRSDKARGKSDNVPSEEVVKKMKNYWRQLLNAKLITQRKFDNLTKAERGGLSELDKAGFIKRQLVETRQITKHVAQILDSRMNTKYDENDKLIREVKVITLKSKLVSDFRKDFQFYKVREINNYHHAHDAYLNAVVGTALIKKYPKLESEFVYGDYKVYDVRKMIAKSEQEIGKATAKYFFYSNIMNFFKTEITLANGEIRKRPLIETNGETGEIVWDKGRDFATVRKVLSMPQVNIVKKTEVQTGGFSKESILPKRNSDKLIARKKDWDPKKYGGFDSPTVAYSVLVVAKVEKGKSKKLKSVKELLGITIMERSSFEKNPIDFLEAKGYKEVKKDLIIKLPKYSLFELENGRKRMLASAGELQKGNELALPSKYVNFLYLASHYEKLKGSPEDNEQKQLFVEQHKHYLDEIIEQISEFSKRVILADANLDKVLSAYNKHRDKPIREQAENIIHLFTLTNLGAPAAFKYFDTTIDRKRYTSTKEVLDATLIHQSITGLYETRIDLSQLGGDGGPAPGGSGGGGGTLNIEDEYRLHETSKGPDVPLGSTWLSDFPQAWAETGGMGLAVRQAPLIIPLKATSTPVSIKQYPMSQEARLGIKPHIQRLLDQGILVPCQSPWNTPLLPVKKPGTNDYRPVQDLREVNKRVEDIHPTVPNPYNLLSGLPPSHQWYTVLDLKDAFFCLRLHPTSQSLFAFEWRDPEMGISGQLTWTRLPQGFKNSPTLFNEALHRDLADFRIQHPDLILLQYVDDLLLAATSELDCQQGTRALLQTLGDLGYRASAKKAQICQKQVKYLGYLLKEGQRWLTEARKETVMGQPTPKTPRQLREFLGTAGFCRLWIPGFAEMAAPLYPLTKPGTLFEWGPDQQKAYQEIKQALLTAPALGLPDLTKPFELFVDEKQGYAKGVLTQKLGPWRRPVAYLSKKLDPVAAGWPPCLRMVAAIAVLTKDAGKLTMGQPLVILAPHAVEALVKQPPDRWLSNARMTHYQALLLDTDRVQFGPIVALNPATLLPLPEEGLQHDCLDILAEAHGTRPDLTDQPLPDADHTWYTDGSSFLQEGQRKAGAAVTTETEVVWAKALPAGTSAQRAELIALTQALKMAEGKKLNVYTDSRYAFATAHIHGEIYRRRGWLTSEGKEIKNKDEILALLKALFLPKRLSIIHCPGHQKGNRAEARGNRMADQAAREVATRETPETSTLLAGKRTADGSEFEKRTADGSEFESPKKKAKVE

SEQ ID NO: 2494 - protein, 2096 aa, synthetic construct
MPAAKRVKLDGGDKKYSIGLDIGTNSVGWAVITDEYKVPSKKFKVLGNTDRHSIKKNLIGALLFDSGETAEATRLKRTARRRYTRRKNRICYLQEIFSNEMAKVDDSFFHRLEESFLVEEDKKHERHPIFGNIVDEVAYHEKYPTIYHLRKKLVDSTDKADLRLIYLALAHMIKFRGHFLIEGDLNPDNSDVDKLFIQLVQTYNQLFEENPINASGVDAKAILSARLSKSRRLENLIAQLPGEKKNGLFGNLIALSLGLTPNFKSNFDLAEDAKLQLSKDTYDDDLDNLLAQIGDQYADLFLAAKNLSDAILLSDILRVNTEITKAPLSASMIKRYDEHHQDLTLLKALVRQQLPEKYKEIFFDQSKNGYAGYIDGGASQEEFYKFIKPILEKMDGTEELLVKLNREDLLRKQRTFDNGSIPHQIHLGELHAILRRQEDFYPFLKDNREKIEKILTFRIPYYVGPLARGNSRFAWMTRKSEETITPWNFEEVVDKGASAQSFIERMTNFDKNLPNEKVLPKHSLLYEYFTVYNELTKVKYVTEGMRKPAFLSGEQKKAIVDLLFKTNRKVTVKQLKEDYFKKIECFDSVEISGVEDRFNASLGTYHDLLKIIKDKDFLDNEENEDILEDIVLTLTLFEDREMIEERLKTYAHLFDDKVMKQLKRRRYTGWGRLSRKLINGIRDKQSGKTILDFLKSDGFANRNFMQLIHDDSLTFKEDIQKAQVSGQGDSLHEHIANLAGSPAIKKGILQTVKVVDELVKVMGRHKPENIVIEMARENQTTQKGQKNSRERMKRIEEGIKELGSQILKEHPVENTQLQNEKLYLYYLQNGRDMYVDQELDINRLSDYDVDHIVPQSFLKDDSIDNKVLTRSDKARGKSDNVPSEEVVKKMKNYWRQLLNAKLITQRKFDNLTKAERGGLSELDKAGFIKRQLVETRQITKHVAQILDSRMNTKYDENDKLIREVKVITLKSKLVSDFRKDFQFYKVREINNYHHAHDAYLNAVVGTALIKKYPKLESEFVYGDYKVYDVRKMIAKSEQEIGKATAKYFFYSNIMNFFKTEITLANGEIRKRPLIETNGETGEIVWDKGRDFATVRKVLSMPQVNIVKKTEVQTGGFSKESILPKRNSDKLIARKKDWDPKKYGGFDSPTVAYSVLVVAKVEKGKSKKLKSVKELLGITIMERSSFEKNPIDFLEAKGYKEVKKDLIIKLPKYSLFELENGRKRMLASAGELQKGNELALPSKYVNFLYLASHYEKLKGSPEDNEQKQLFVEQHKHYLDEIIEQISEFSKRVILADANLDKVLSAYNKHRDKPIREQAENIIHLFTLTNLGAPAAFKYFDTTIDRKRYTSTKEVLDATLIHQSITGLYETRIDLSQLGGDGGPAPEAAAKGGGGGTLNIEDEYRLHETSKGPDVPLGSTWLSDFPQAWAETGGMGLAVRQAPLIIPLKATSTPVSIKQYPMSQEARLGIKPHIQRLLDQGILVPCQSPWNTPLLPVKKPGTNDYRPVQDLREVNKRVEDIHPTVPNPYNLLSGLPPSHQWYTVLDLKDAFFCLRLHPTSQSLFAFEWRDPEMGISGQLTWTRLPQGFKNSPTLFNEALHRDLADFRIQHPDLILLQYVDDLLLAATSELDCQQGTRALLQTLGDLGYRASAKKAQICQKQVKYLGYLLKEGQRWLTEARKETVMGQPTPKTPRQLREFLGTAGFCRLWIPGFAEMAAPLYPLTKPGTLFEWGPDQQKAYQEIKQALLTAPALGLPDLTKPFELFVDEKQGYAKGVLTQKLGPWRRPVAYLSKKLDPVAAGWPPCLRMVAAIAVLTKDAGKLTMGQPLVILAPHAVEALVKQPPDRWLSNARMTHYQALLLDTDRVQFGPIVALNPATLLPLPEEGLQHDCLDILAEAHGTRPDLTDQPLPDADHTWYTDGSSFLQEGQRKAGAAVTTETEVVWAKALPAGTSAQRAELIALTQALKMAEGKKLNVYTDSRYAFATAHIHGEIYRRRGWLTSEGKEIKNKDEILALLKALFLPKRLSIIHCPGHQKGNRAEARGNRMADQAAREVATRETPETSTLLAGKRTADGSEFEKRTADGSEFESPKKKAKVE

SEQ ID NO: 2495 - protein, 2096 aa, synthetic construct
MPAAKRVKLDGGDKKYSIGLDIGTNSVGWAVITDEYKVPSKKFKVLGNTDRHSIKKNLIGALLFDSGETAEATRLKRTARRRYTRRKNRICYLQEIFSNEMAKVDDSFFHRLEESFLVEEDKKHERHPIFGNIVDEVAYHEKYPTIYHLRKKLVDSTDKADLRLIYLALAHMIKFRGHFLIEGDLNPDNSDVDKLFIQLVQTYNQLFEENPINASGVDAKAILSARLSKSRRLENLIAQLPGEKKNGLFGNLIALSLGLTPNFKSNFDLAEDAKLQLSKDTYDDDLDNLLAQIGDQYADLFLAAKNLSDAILLSDILRVNTEITKAPLSASMIKRYDEHHQDLTLLKALVRQQLPEKYKEIFFDQSKNGYAGYIDGGASQEEFYKFIKPILEKMDGTEELLVKLNREDLLRKQRTFDNGSIPHQIHLGELHAILRRQEDFYPFLKDNREKIEKILTFRIPYYVGPLARGNSRFAWMTRKSEETITPWNFEEVVDKGASAQSFIERMTNFDKNLPNEKVLPKHSLLYEYFTVYNELTKVKYVTEGMRKPAFLSGEQKKAIVDLLFKTNRKVTVKQLKEDYFKKIECFDSVEISGVEDRFNASLGTYHDLLKIIKDKDFLDNEENEDILEDIVLTLTLFEDREMIEERLKTYAHLFDDKVMKQLKRRRYTGWGRLSRKLINGIRDKQSGKTILDFLKSDGFANRNFMQLIHDDSLTFKEDIQKAQVSGQGDSLHEHIANLAGSPAIKKGILQTVKVVDELVKVMGRHKPENIVIEMARENQTTQKGQKNSRERMKRIEEGIKELGSQILKEHPVENTQLQNEKLYLYYLQNGRDMYVDQELDINRLSDYDVDHIVPQSFLKDDSIDNKVLTRSDKARGKSDNVPSEEVVKKMKNYWRQLLNAKLITQRKFDNLTKAERGGLSELDKAGFIKRQLVETRQITKHVAQILDSRMNTKYDENDKLIREVKVITLKSKLVSDFRKDFQFYKVREINNYHHAHDAYLNAVVGTALIKKYPKLESEFVYGDYKVYDVRKMIAKSEQEIGKATAKYFFYSNIMNFFKTEITLANGEIRKRPLIETNGETGEIVWDKGRDFATVRKVLSMPQVNIVKKTEVQTGGFSKESILPKRNSDKLIARKKDWDPKKYGGFDSPTVAYSVLVVAKVEKGKSKKLKSVKELLGITIMERSSFEKNPIDFLEAKGYKEVKKDLIIKLPKYSLFELENGRKRMLASAGELQKGNELALPSKYVNFLYLASHYEKLKGSPEDNEQKQLFVEQHKHYLDEIIEQISEFSKRVILADANLDKVLSAYNKHRDKPIREQAENIIHLFTLTNLGAPAAFKYFDTTIDRKRYTSTKEVLDATLIHQSITGLYETRIDLSQLGGDGGEAAAKPAPGGSGGTLNIEDEYRLHETSKGPDVPLGSTWLSDFPQAWAETGGMGLAVRQAPLIIPLKATSTPVSIKQYPMSQEARLGIKPHIQRLLDQGILVPCQSPWNTPLLPVKKPGTNDYRPVQDLREVNKRVEDIHPTVPNPYNLLSGLPPSHQWYTVLDLKDAFFCLRLHPTSQSLFAFEWRDPEMGISGQLTWTRLPQGFKNSPTLFNEALHRDLADFRIQHPDLILLQYVDDLLLAATSELDCQQGTRALLQTLGDLGYRASAKKAQICQKQVKYLGYLLKEGQRWLTEARKETVMGQPTPKTPRQLREFLGTAGFCRLWIPGFAEMAAPLYPLTKPGTLFEWGPDQQKAYQEIKQALLTAPALGLPDLTKPFELFVDEKQGYAKGVLTQKLGPWRRPVAYLSKKLDPVAAGWPPCLRMVAAIAVLTKDAGKLTMGQPLVILAPHAVEALVKQPPDRWLSNARMTHYQALLLDTDRVQFGPIVALNPATLLPLPEEGLQHDCLDILAEAHGTRPDLTDQPLPDADHTWYTDGSSFLQEGQRKAGAAVTTETEVVWAKALPAGTSAQRAELIALTQALKMAEGKKLNVYTDSRYAFATAHIHGEIYRRRGWLTSEGKEIKNKDEILALLKALFLPKRLSIIHCPGHQKGNRAEARGNRMADQAAREVATRETPETSTLLAGKRTADGSEFEKRTADGSEFESPKKKAKVE

SEQ ID NO: 2496 - protein, 2094 aa, synthetic construct
MPAAKRVKLDGGDKKYSIGLDIGTNSVGWAVITDEYKVPSKKFKVLGNTDRHSIKKNLIGALLFDSGETAEATRLKRTARRRYTRRKNRICYLQEIFSNEMAKVDDSFFHRLEESFLVEEDKKHERHPIFGNIVDEVAYHEKYPTIYHLRKKLVDSTDKADLRLIYLALAHMIKFRGHFLIEGDLNPDNSDVDKLFIQLVQTYNQLFEENPINASGVDAKAILSARLSKSRRLENLIAQLPGEKKNGLFGNLIALSLGLTPNFKSNFDLAEDAKLQLSKDTYDDDLDNLLAQIGDQYADLFLAAKNLSDAILLSDILRVNTEITKAPLSASMIKRYDEHHQDLTLLKALVRQQLPEKYKEIFFDQSKNGYAGYIDGGASQEEFYKFIKPILEKMDGTEELLVKLNREDLLRKQRTFDNGSIPHQIHLGELHAILRRQEDFYPFLKDNREKIEKILTFRIPYYVGPLARGNSRFAWMTRKSEETITPWNFEEVVDKGASAQSFIERMTNFDKNLPNEKVLPKHSLLYEYFTVYNELTKVKYVTEGMRKPAFLSGEQKKAIVDLLFKTNRKVTVKQLKEDYFKKIECFDSVEISGVEDRFNASLGTYHDLLKIIKDKDFLDNEENEDILEDIVLTLTLFEDREMIEERLKTYAHLFDDKVMKQLKRRRYTGWGRLSRKLINGIRDKQSGKTILDFLKSDGFANRNFMQLIHDDSLTFKEDIQKAQVSGQGDSLHEHIANLAGSPAIKKGILQTVKVVDELVKVMGRHKPENIVIEMARENQTTQKGQKNSRERMKRIEEGIKELGSQILKEHPVENTQLQNEKLYLYYLQNGRDMYVDQELDINRLSDYDVDHIVPQSFLKDDSIDNKVLTRSDKARGKSDNVPSEEVVKKMKNYWRQLLNAKLITQRKFDNLTKAERGGLSELDKAGFIKRQLVETRQITKHVAQILDSRMNTKYDENDKLIREVKVITLKSKLVSDFRKDFQFYKVREINNYHHAHDAYLNAVVGTALIKKYPKLESEFVYGDYKVYDVRKMIAKSEQEIGKATAKYFFYSNIMNFFKTEITLANGEIRKRPLIETNGETGEIVWDKGRDFATVRKVLSMPQVNIVKKTEVQTGGFSKESILPKRNSDKLIARKKDWDPKKYGGFDSPTVAYSVLVVAKVEKGKSKKLKSVKELLGITIMERSSFEKNPIDFLEAKGYKEVKKDLIIKLPKYSLFELENGRKRMLASAGELQKGNELALPSKYVNFLYLASHYEKLKGSPEDNEQKQLFVEQHKHYLDEIIEQISEFSKRVILADANLDKVLSAYNKHRDKPIREQAENIIHLFTLTNLGAPAAFKYFDTTIDRKRYTSTKEVLDATLIHQSITGLYETRIDLSQLGGDGGGGGPAPGGSGGTLNIEDEYRLHETSKGPDVPLGSTWLSDFPQAWAETGGMGLAVRQAPLIIPLKATSTPVSIKQYPMSQEARLGIKPHIQRLLDQGILVPCQSPWNTPLLPVKKPGTNDYRPVQDLREVNKRVEDIHPTVPNPYNLLSGLPPSHQWYTVLDLKDAFFCLRLHPTSQSLFAFEWRDPEMGISGQLTWTRLPQGFKNSPTLFNEALHRDLADFRIQHPDLILLQYVDDLLLAATSELDCQQGTRALLQTLGDLGYRASAKKAQICQKQVKYLGYLLKEGQRWLTEARKETVMGQPTPKTPRQLREFLGTAGFCRLWIPGFAEMAAPLYPLTKPGTLFEWGPDQQKAYQEIKQALLTAPALGLPDLTKPFELFVDEKQGYAKGVLTQKLGPWRRPVAYLSKKLDPVAAGWPPCLRMVAAIAVLTKDAGKLTMGQPLVILAPHAVEALVKQPPDRWLSNARMTHYQALLLDTDRVQFGPIVALNPATLLPLPEEGLQHDCLDILAEAHGTRPDLTDQPLPDADHTWYTDGSSFLQEGQRKAGAAVTTETEVVWAKALPAGTSAQRAELIALTQALKMAEGKKLNVYTDSRYAFATAHIHGEIYRRRGWLTSEGKEIKNKDEILALLKALFLPKRLSIIHCPGHQKGNRAEARGNRMADQAAREVATRETPETSTLLAGKRTADGSEFEKRTADGSEFESPKKKAKVE

SEQ ID NO: 2497 - protein, 2091 aa, synthetic construct
MPAAKRVKLDGGDKKYSIGLDIGTNSVGWAVITDEYKVPSKKFKVLGNTDRHSIKKNLIGALLFDSGETAEATRLKRTARRRYTRRKNRICYLQEIFSNEMAKVDDSFFHRLEESFLVEEDKKHERHPIFGNIVDEVAYHEKYPTIYHLRKKLVDSTDKADLRLIYLALAHMIKFRGHFLIEGDLNPDNSDVDKLFIQLVQTYNQLFEENPINASGVDAKAILSARLSKSRRLENLIAQLPGEKKNGLFGNLIALSLGLTPNFKSNFDLAEDAKLQLSKDTYDDDLDNLLAQIGDQYADLFLAAKNLSDAILLSDILRVNTEITKAPLSASMIKRYDEHHQDLTLLKALVRQQLPEKYKEIFFDQSKNGYAGYIDGGASQEEFYKFIKPILEKMDGTEELLVKLNREDLLRKQRTFDNGSIPHQIHLGELHAILRRQEDFYPFLKDNREKIEKILTFRIPYYVGPLARGNSRFAWMTRKSEETITPWNFEEVVDKGASAQSFIERMTNFDKNLPNEKVLPKHSLLYEYFTVYNELTKVKYVTEGMRKPAFLSGEQKKAIVDLLFKTNRKVTVKQLKEDYFKKIECFDSVEISGVEDRFNASLGTYHDLLKIIKDKDFLDNEENEDILEDIVLTLTLFEDREMIEERLKTYAHLFDDKVMKQLKRRRYTGWGRLSRKLINGIRDKQSGKTILDFLKSDGFANRNFMQLIHDDSLTFKEDIQKAQVSGQGDSLHEHIANLAGSPAIKKGILQTVKVVDELVKVMGRHKPENIVIEMARENQTTQKGQKNSRERMKRIEEGIKELGSQILKEHPVENTQLQNEKLYLYYLQNGRDMYVDQELDINRLSDYDVDHIVPQSFLKDDSIDNKVLTRSDKARGKSDNVPSEEVVKKMKNYWRQLLNAKLITQRKFDNLTKAERGGLSELDKAGFIKRQLVETRQITKHVAQILDSRMNTKYDENDKLIREVKVITLKSKLVSDFRKDFQFYKVREINNYHHAHDAYLNAVVGTALIKKYPKLESEFVYGDYKVYDVRKMIAKSEQEIGKATAKYFFYSNIMNFFKTEITLANGEIRKRPLIETNGETGEIVWDKGRDFATVRKVLSMPQVNIVKKTEVQTGGFSKESILPKRNSDKLIARKKDWDPKKYGGFDSPTVAYSVLVVAKVEKGKSKKLKSVKELLGITIMERSSFEKNPIDFLEAKGYKEVKKDLIIKLPKYSLFELENGRKRMLASAGELQKGNELALPSKYVNFLYLASHYEKLKGSPEDNEQKQLFVEQHKHYLDEIIEQISEFSKRVILADANLDKVLSAYNKHRDKPIREQAENIIHLFTLTNLGAPAAFKYFDTTIDRKRYTSTKEVLDATLIHQSITGLYETRIDLSQLGGDGGPAPGGSGGTLNIEDEYRLHETSKGPDVPLGSTWLSDFPQAWAETGGMGLAVRQAPLIIPLKATSTPVSIKQYPMSQEARLGIKPHIQRLLDQGILVPCQSPWNTPLLPVKKPGTNDYRPVQDLREVNKRVEDIHPTVPNPYNLLSGLPPSHQWYTVLDLKDAFFCLRLHPTSQSLFAFEWRDPEMGISGQLTWTRLPQGFKNSPTLFNEALHRDLADFRIQHPDLILLQYVDDLLLAATSELDCQQGTRALLQTLGDLGYRASAKKAQICQKQVKYLGYLLKEGQRWLTEARKETVMGQPTPKTPRQLREFLGTAGFCRLWIPGFAEMAAPLYPLTKPGTLFEWGPDQQKAYQEIKQALLTAPALGLPDLTKPFELFVDEKQGYAKGVLTQKLGPWRRPVAYLSKKLDPVAAGWPPCLRMVAAIAVLTKDAGKLTMGQPLVILAPHAVEALVKQPPDRWLSNARMTHYQALLLDTDRVQFGPIVALNPATLLPLPEEGLQHDCLDILAEAHGTRPDLTDQPLPDADHTWYTDGSSFLQEGQRKAGAAVTTETEVVWAKALPAGTSAQRAELIALTQALKMAEGKKLNVYTDSRYAFATAHIHGEIYRRRGWLTSEGKEIKNKDEILALLKALFLPKRLSIIHCPGHQKGNRAEARGNRMADQAAREVATRETPETSTLLAGKRTADGSEFEKRTADGSEFESPKKKAKVE

SEQ ID NO: 2498 - protein, 2094 aa, synthetic construct
MPAAKRVKLDGGDKKYSIGLDIGTNSVGWAVITDEYKVPSKKFKVLGNTDRHSIKKNLIGALLFDSGETAEATRLKRTARRRYTRRKNRICYLQEIFSNEMAKVDDSFFHRLEESFLVEEDKKHERHPIFGNIVDEVAYHEKYPTIYHLRKKLVDSTDKADLRLIYLALAHMIKFRGHFLIEGDLNPDNSDVDKLFIQLVQTYNQLFEENPINASGVDAKAILSARLSKSRRLENLIAQLPGEKKNGLFGNLIALSLGLTPNFKSNFDLAEDAKLQLSKDTYDDDLDNLLAQIGDQYADLFLAAKNLSDAILLSDILRVNTEITKAPLSASMIKRYDEHHQDLTLLKALVRQQLPEKYKEIFFDQSKNGYAGYIDGGASQEEFYKFIKPILEKMDGTEELLVKLNREDLLRKQRTFDNGSIPHQIHLGELHAILRRQEDFYPFLKDNREKIEKILTFRIPYYVGPLARGNSRFAWMTRKSEETITPWNFEEVVDKGASAQSFIERMTNFDKNLPNEKVLPKHSLLYEYFTVYNELTKVKYVTEGMRKPAFLSGEQKKAIVDLLFKTNRKVTVKQLKEDYFKKIECFDSVEISGVEDRFNASLGTYHDLLKIIKDKDFLDNEENEDILEDIVLTLTLFEDREMIEERLKTYAHLFDDKVMKQLKRRRYTGWGRLSRKLINGIRDKQSGKTILDFLKSDGFANRNFMQLIHDDSLTFKEDIQKAQVSGQGDSLHEHIANLAGSPAIKKGILQTVKVVDELVKVMGRHKPENIVIEMARENQTTQKGQKNSRERMKRIEEGIKELGSQILKEHPVENTQLQNEKLYLYYLQNGRDMYVDQELDINRLSDYDVDHIVPQSFLKDDSIDNKVLTRSDKARGKSDNVPSEEVVKKMKNYWRQLLNAKLITQRKFDNLTKAERGGLSELDKAGFIKRQLVETRQITKHVAQILDSRMNTKYDENDKLIREVKVITLKSKLVSDFRKDFQFYKVREINNYHHAHDAYLNAVVGTALIKKYPKLESEFVYGDYKVYDVRKMIAKSEQEIGKATAKYFFYSNIMNFFKTEITLANGEIRKRPLIETNGETGEIVWDKGRDFATVRKVLSMPQVNIVKKTEVQTGGFSKESILPKRNSDKLIARKKDWDPKKYGGFDSPTVAYSVLVVAKVEKGKSKKLKSVKELLGITIMERSSFEKNPIDFLEAKGYKEVKKDLIIKLPKYSLFELENGRKRMLASAGELQKGNELALPSKYVNFLYLASHYEKLKGSPEDNEQKQLFVEQHKHYLDEIIEQISEFSKRVILADANLDKVLSAYNKHRDKPIREQAENIIHLFTLTNLGAPAAFKYFDTTIDRKRYTSTKEVLDATLIHQSITGLYETRIDLSQLGGDGGGGGGGSPAPGGTLNIEDEYRLHETSKGPDVPLGSTWLSDFPQAWAETGGMGLAVRQAPLIIPLKATSTPVSIKQYPMSQEARLGIKPHIQRLLDQGILVPCQSPWNTPLLPVKKPGTNDYRPVQDLREVNKRVEDIHPTVPNPYNLLSGLPPSHQWYTVLDLKDAFFCLRLHPTSQSLFAFEWRDPEMGISGQLTWTRLPQGFKNSPTLFNEALHRDLADFRIQHPDLILLQYVDDLLLAATSELDCQQGTRALLQTLGDLGYRASAKKAQICQKQVKYLGYLLKEGQRWLTEARKETVMGQPTPKTPRQLREFLGTAGFCRLWIPGFAEMAAPLYPLTKPGTLFEWGPDQQKAYQEIKQALLTAPALGLPDLTKPFELFVDEKQGYAKGVLTQKLGPWRRPVAYLSKKLDPVAAGWPPCLRMVAAIAVLTKDAGKLTMGQPLVILAPHAVEALVKQPPDRWLSNARMTHYQALLLDTDRVQFGPIVALNPATLLPLPEEGLQHDCLDILAEAHGTRPDLTDQPLPDADHTWYTDGSSFLQEGQRKAGAAVTTETEVVWAKALPAGTSAQRAELIALTQALKMAEGKKLNVYTDSRYAFATAHIHGEIYRRRGWLTSEGKEIKNKDEILALLKALFLPKRLSIIHCPGHQKGNRAEARGNRMADQAAREVATRETPETSTLLAGKRTADGSEFEKRTADGSEFESPKKKAKVE

SEQ ID NO: 2499 - protein, 2094 aa, synthetic construct
MPAAKRVKLDGGDKKYSIGLDIGTNSVGWAVITDEYKVPSKKFKVLGNTDRHSIKKNLIGALLFDSGETAEATRLKRTARRRYTRRKNRICYLQEIFSNEMAKVDDSFFHRLEESFLVEEDKKHERHPIFGNIVDEVAYHEKYPTIYHLRKKLVDSTDKADLRLIYLALAHMIKFRGHFLIEGDLNPDNSDVDKLFIQLVQTYNQLFEENPINASGVDAKAILSARLSKSRRLENLIAQLPGEKKNGLFGNLIALSLGLTPNFKSNFDLAEDAKLQLSKDTYDDDLDNLLAQIGDQYADLFLAAKNLSDAILLSDILRVNTEITKAPLSASMIKRYDEHHQDLTLLKALVRQQLPEKYKEIFFDQSKNGYAGYIDGGASQEEFYKFIKPILEKMDGTEELLVKLNREDLLRKQRTFDNGSIPHQIHLGELHAILRRQEDFYPFLKDNREKIEKILTFRIPYYVGPLARGNSRFAWMTRKSEETITPWNFEEVVDKGASAQSFIERMTNFDKNLPNEKVLPKHSLLYEYFTVYNELTKVKYVTEGMRKPAFLSGEQKKAIVDLLFKTNRKVTVKQLKEDYFKKIECFDSVEISGVEDRFNASLGTYHDLLKIIKDKDFLDNEENEDILEDIVLTLTLFEDREMIEERLKTYAHLFDDKVMKQLKRRRYTGWGRLSRKLINGIRDKQSGKTILDFLKSDGFANRNFMQLIHDDSLTFKEDIQKAQVSGQGDSLHEHIANLAGSPAIKKGILQTVKVVDELVKVMGRHKPENIVIEMARENQTTQKGQKNSRERMKRIEEGIKELGSQILKEHPVENTQLQNEKLYLYYLQNGRDMYVDQELDINRLSDYDVDHIVPQSFLKDDSIDNKVLTRSDKARGKSDNVPSEEVVKKMKNYWRQLLNAKLITQRKFDNLTKAERGGLSELDKAGFIKRQLVETRQITKHVAQILDSRMNTKYDENDKLIREVKVITLKSKLVSDFRKDFQFYKVREINNYHHAHDAYLNAVVGTALIKKYPKLESEFVYGDYKVYDVRKMIAKSEQEIGKATAKYFFYSNIMNFFKTEITLANGEIRKRPLIETNGETGEIVWDKGRDFATVRKVLSMPQVNIVKKTEVQTGGFSKESILPKRNSDKLIARKKDWDPKKYGGFDSPTVAYSVLVVAKVEKGKSKKLKSVKELLGITIMERSSFEKNPIDFLEAKGYKEVKKDLIIKLPKYSLFELENGRKRMLASAGELQKGNELALPSKYVNFLYLASHYEKLKGSPEDNEQKQLFVEQHKHYLDEIIEQISEFSKRVILADANLDKVLSAYNKHRDKPIREQAENIIHLFTLTNLGAPAAFKYFDTTIDRKRYTSTKEVLDATLIHQSITGLYETRIDLSQLGGDGGGGSGGSGGSGGTLNIEDEYRLHETSKGPDVPLGSTWLSDFPQAWAETGGMGLAVRQAPLIIPLKATSTPVSIKQYPMSQEARLGIKPHIQRLLDQGILVPCQSPWNTPLLPVKKPGTNDYRPVQDLREVNKRVEDIHPTVPNPYNLLSGLPPSHQWYTVLDLKDAFFCLRLHPTSQSLFAFEWRDPEMGISGQLTWTRLPQGFKNSPTLFNEALHRDLADFRIQHPDLILLQYVDDLLLAATSELDCQQGTRALLQTLGDLGYRASAKKAQICQKQVKYLGYLLKEGQRWLTEARKETVMGQPTPKTPRQLREFLGTAGFCRLWIPGFAEMAAPLYPLTKPGTLFEWGPDQQKAYQEIKQALLTAPALGLPDLTKPFELFVDEKQGYAKGVLTQKLGPWRRPVAYLSKKLDPVAAGWPPCLRMVAAIAVLTKDAGKLTMGQPLVILAPHAVEALVKQPPDRWLSNARMTHYQALLLDTDRVQFGPIVALNPATLLPLPEEGLQHDCLDILAEAHGTRPDLTDQPLPDADHTWYTDGSSFLQEGQRKAGAAVTTETEVVWAKALPAGTSAQRAELIALTQALKMAEGKKLNVYTDSRYAFATAHIHGEIYRRRGWLTSEGKEIKNKDEILALLKALFLPKRLSIIHCPGHQKGNRAEARGNRMADQAAREVATRETPETSTLLAGKRTADGSEFEKRTADGSEFESPKKKAKVE

SEQ ID NO: 2500 - protein, 2093 aa, synthetic construct
MPAAKRVKLDGGDKKYSIGLDIGTNSVGWAVITDEYKVPSKKFKVLGNTDRHSIKKNLIGALLFDSGETAEATRLKRTARRRYTRRKNRICYLQEIFSNEMAKVDDSFFHRLEESFLVEEDKKHERHPIFGNIVDEVAYHEKYPTIYHLRKKLVDSTDKADLRLIYLALAHMIKFRGHFLIEGDLNPDNSDVDKLFIQLVQTYNQLFEENPINASGVDAKAILSARLSKSRRLENLIAQLPGEKKNGLFGNLIALSLGLTPNFKSNFDLAEDAKLQLSKDTYDDDLDNLLAQIGDQYADLFLAAKNLSDAILLSDILRVNTEITKAPLSASMIKRYDEHHQDLTLLKALVRQQLPEKYKEIFFDQSKNGYAGYIDGGASQEEFYKFIKPILEKMDGTEELLVKLNREDLLRKQRTFDNGSIPHQIHLGELHAILRRQEDFYPFLKDNREKIEKILTFRIPYYVGPLARGNSRFAWMTRKSEETITPWNFEEVVDKGASAQSFIERMTNFDKNLPNEKVLPKHSLLYEYFTVYNELTKVKYVTEGMRKPAFLSGEQKKAIVDLLFKTNRKVTVKQLKEDYFKKIECFDSVEISGVEDRFNASLGTYHDLLKIIKDKDFLDNEENEDILEDIVLTLTLFEDREMIEERLKTYAHLFDDKVMKQLKRRRYTGWGRLSRKLINGIRDKQSGKTILDFLKSDGFANRNFMQLIHDDSLTFKEDIQKAQVSGQGDSLHEHIANLAGSPAIKKGILQTVKVVDELVKVMGRHKPENIVIEMARENQTTQKGQKNSRERMKRIEEGIKELGSQILKEHPVENTQLQNEKLYLYYLQNGRDMYVDQELDINRLSDYDVDHIVPQSFLKDDSIDNKVLTRSDKARGKSDNVPSEEVVKKMKNYWRQLLNAKLITQRKFDNLTKAERGGLSELDKAGFIKRQLVETRQITKHVAQILDSRMNTKYDENDKLIREVKVITLKSKLVSDFRKDFQFYKVREINNYHHAHDAYLNAVVGTALIKKYPKLESEFVYGDYKVYDVRKMIAKSEQEIGKATAKYFFYSNIMNFFKTEITLANGEIRKRPLIETNGETGEIVWDKGRDFATVRKVLSMPQVNIVKKTEVQTGGFSKESILPKRNSDKLIARKKDWDPKKYGGFDSPTVAYSVLVVAKVEKGKSKKLKSVKELLGITIMERSSFEKNPIDFLEAKGYKEVKKDLIIKLPKYSLFELENGRKRMLASAGELQKGNELALPSKYVNFLYLASHYEKLKGSPEDNEQKQLFVEQHKHYLDEIIEQISEFSKRVILADANLDKVLSAYNKHRDKPIREQAENIIHLFTLTNLGAPAAFKYFDTTIDRKRYTSTKEVLDATLIHQSITGLYETRIDLSQLGGDGGGGGGGGGGGGTLNIEDEYRLHETSKGPDVPLGSTWLSDFPQAWAETGGMGLAVRQAPLIIPLKATSTPVSIKQYPMSQEARLGIKPHIQRLLDQGILVPCQSPWNTPLLPVKKPGTNDYRPVQDLREVNKRVEDIHPTVPNPYNLLSGLPPSHQWYTVLDLKDAFFCLRLHPTSQSLFAFEWRDPEMGISGQLTWTRLPQGFKNSPTLFNEALHRDLADFRIQHPDLILLQYVDDLLLAATSELDCQQGTRALLQTLGDLGYRASAKKAQICQKQVKYLGYLLKEGQRWLTEARKETVMGQPTPKTPRQLREFLGTAGFCRLWIPGFAEMAAPLYPLTKPGTLFEWGPDQQKAYQEIKQALLTAPALGLPDLTKPFELFVDEKQGYAKGVLTQKLGPWRRPVAYLSKKLDPVAAGWPPCLRMVAAIAVLTKDAGKLTMGQPLVILAPHAVEALVKQPPDRWLSNARMTHYQALLLDTDRVQFGPIVALNPATLLPLPEEGLQHDCLDILAEAHGTRPDLTDQPLPDADHTWYTDGSSFLQEGQRKAGAAVTTETEVVWAKALPAGTSAQRAELIALTQALKMAEGKKLNVYTDSRYAFATAHIHGEIYRRRGWLTSEGKEIKNKDEILALLKALFLPKRLSIIHCPGHQKGNRAEARGNRMADQAAREVATRETPETSTLLAGKRTADGSEFEKRTADGSEFESPKKKAKVE

SEQ ID NO: 2501 - protein, 2094 aa, synthetic construct
MPAAKRVKLDGGDKKYSIGLDIGTNSVGWAVITDEYKVPSKKFKVLGNTDRHSIKKNLIGALLFDSGETAEATRLKRTARRRYTRRKNRICYLQEIFSNEMAKVDDSFFHRLEESFLVEEDKKHERHPIFGNIVDEVAYHEKYPTIYHLRKKLVDSTDKADLRLIYLALAHMIKFRGHFLIEGDLNPDNSDVDKLFIQLVQTYNQLFEENPINASGVDAKAILSARLSKSRRLENLIAQLPGEKKNGLFGNLIALSLGLTPNFKSNFDLAEDAKLQLSKDTYDDDLDNLLAQIGDQYADLFLAAKNLSDAILLSDILRVNTEITKAPLSASMIKRYDEHHQDLTLLKALVRQQLPEKYKEIFFDQSKNGYAGYIDGGASQEEFYKFIKPILEKMDGTEELLVKLNREDLLRKQRTFDNGSIPHQIHLGELHAILRRQEDFYPFLKDNREKIEKILTFRIPYYVGPLARGNSRFAWMTRKSEETITPWNFEEVVDKGASAQSFIERMTNFDKNLPNEKVLPKHSLLYEYFTVYNELTKVKYVTEGMRKPAFLSGEQKKAIVDLLFKTNRKVTVKQLKEDYFKKIECFDSVEISGVEDRFNASLGTYHDLLKIIKDKDFLDNEENEDILEDIVLTLTLFEDREMIEERLKTYAHLFDDKVMKQLKRRRYTGWGRLSRKLINGIRDKQSGKTILDFLKSDGFANRNFMQLIHDDSLTFKEDIQKAQVSGQGDSLHEHIANLAGSPAIKKGILQTVKVVDELVKVMGRHKPENIVIEMARENQTTQKGQKNSRERMKRIEEGIKELGSQILKEHPVENTQLQNEKLYLYYLQNGRDMYVDQELDINRLSDYDVDHIVPQSFLKDDSIDNKVLTRSDKARGKSDNVPSEEVVKKMKNYWRQLLNAKLITQRKFDNLTKAERGGLSELDKAGFIKRQLVETRQITKHVAQILDSRMNTKYDENDKLIREVKVITLKSKLVSDFRKDFQFYKVREINNYHHAHDAYLNAVVGTALIKKYPKLESEFVYGDYKVYDVRKMIAKSEQEIGKATAKYFFYSNIMNFFKTEITLANGEIRKRPLIETNGETGEIVWDKGRDFATVRKVLSMPQVNIVKKTEVQTGGFSKESILPKRNSDKLIARKKDWDPKKYGGFDSPTVAYSVLVVAKVEKGKSKKLKSVKELLGITIMERSSFEKNPIDFLEAKGYKEVKKDLIIKLPKYSLFELENGRKRMLASAGELQKGNELALPSKYVNFLYLASHYEKLKGSPEDNEQKQLFVEQHKHYLDEIIEQISEFSKRVILADANLDKVLSAYNKHRDKPIREQAENIIHLFTLTNLGAPAAFKYFDTTIDRKRYTSTKEVLDATLIHQSITGLYETRIDLSQLGGDGGGSSPAPGGSGGTLNIEDEYRLHETSKGPDVPLGSTWLSDFPQAWAETGGMGLAVRQAPLIIPLKATSTPVSIKQYPMSQEARLGIKPHIQRLLDQGILVPCQSPWNTPLLPVKKPGTNDYRPVQDLREVNKRVEDIHPTVPNPYNLLSGLPPSHQWYTVLDLKDAFFCLRLHPTSQSLFAFEWRDPEMGISGQLTWTRLPQGFKNSPTLFNEALHRDLADFRIQHPDLILLQYVDDLLLAATSELDCQQGTRALLQTLGDLGYRASAKKAQICQKQVKYLGYLLKEGQRWLTEARKETVMGQPTPKTPRQLREFLGTAGFCRLWIPGFAEMAAPLYPLTKPGTLFEWGPDQQKAYQEIKQALLTAPALGLPDLTKPFELFVDEKQGYAKGVLTQKLGPWRRPVAYLSKKLDPVAAGWPPCLRMVAAIAVLTKDAGKLTMGQPLVILAPHAVEALVKQPPDRWLSNARMTHYQALLLDTDRVQFGPIVALNPATLLPLPEEGLQHDCLDILAEAHGTRPDLTDQPLPDADHTWYTDGSSFLQEGQRKAGAAVTTETEVVWAKALPAGTSAQRAELIALTQALKMAEGKKLNVYTDSRYAFATAHIHGEIYRRRGWLTSEGKEIKNKDEILALLKALFLPKRLSIIHCPGHQKGNRAEARGNRMADQAAREVATRETPETSTLLAGKRTADGSEFEKRTADGSEFESPKKKAKVE

SEQ ID NO: 2502 - protein, 2094 aa, synthetic construct
MPAAKRVKLDGGDKKYSIGLDIGTNSVGWAVITDEYKVPSKKFKVLGNTDRHSIKKNLIGALLFDSGETAEATRLKRTARRRYTRRKNRICYLQEIFSNEMAKVDDSFFHRLEESFLVEEDKKHERHPIFGNIVDEVAYHEKYPTIYHLRKKLVDSTDKADLRLIYLALAHMIKFRGHFLIEGDLNPDNSDVDKLFIQLVQTYNQLFEENPINASGVDAKAILSARLSKSRRLENLIAQLPGEKKNGLFGNLIALSLGLTPNFKSNFDLAEDAKLQLSKDTYDDDLDNLLAQIGDQYADLFLAAKNLSDAILLSDILRVNTEITKAPLSASMIKRYDEHHQDLTLLKALVRQQLPEKYKEIFFDQSKNGYAGYIDGGASQEEFYKFIKPILEKMDGTEELLVKLNREDLLRKQRTFDNGSIPHQIHLGELHAILRRQEDFYPFLKDNREKIEKILTFRIPYYVGPLARGNSRFAWMTRKSEETITPWNFEEVVDKGASAQSFIERMTNFDKNLPNEKVLPKHSLLYEYFTVYNELTKVKYVTEGMRKPAFLSGEQKKAIVDLLFKTNRKVTVKQLKEDYFKKIECFDSVEISGVEDRFNASLGTYHDLLKIIKDKDFLDNEENEDILEDIVLTLTLFEDREMIEERLKTYAHLFDDKVMKQLKRRRYTGWGRLSRKLINGIRDKQSGKTILDFLKSDGFANRNFMQLIHDDSLTFKEDIQKAQVSGQGDSLHEHIANLAGSPAIKKGILQTVKVVDELVKVMGRHKPENIVIEMARENQTTQKGQKNSRERMKRIEEGIKELGSQILKEHPVENTQLQNEKLYLYYLQNGRDMYVDQELDINRLSDYDVDHIVPQSFLKDDSIDNKVLTRSDKARGKSDNVPSEEVVKKMKNYWRQLLNAKLITQRKFDNLTKAERGGLSELDKAGFIKRQLVETRQITKHVAQILDSRMNTKYDENDKLIREVKVITLKSKLVSDFRKDFQFYKVREINNYHHAHDAYLNAVVGTALIKKYPKLESEFVYGDYKVYDVRKMIAKSEQEIGKATAKYFFYSNIMNFFKTEITLANGEIRKRPLIETNGETGEIVWDKGRDFATVRKVLSMPQVNIVKKTEVQTGGFSKESILPKRNSDKLIARKKDWDPKKYGGFDSPTVAYSVLVVAKVEKGKSKKLKSVKELLGITIMERSSFEKNPIDFLEAKGYKEVKKDLIIKLPKYSLFELENGRKRMLASAGELQKGNELALPSKYVNFLYLASHYEKLKGSPEDNEQKQLFVEQHKHYLDEIIEQISEFSKRVILADANLDKVLSAYNKHRDKPIREQAENIIHLFTLTNLGAPAAFKYFDTTIDRKRYTSTKEVLDATLIHQSITGLYETRIDLSQLGGDGGPAPGGGGGSGGTLNIEDEYRLHETSKGPDVPLGSTWLSDFPQAWAETGGMGLAVRQAPLIIPLKATSTPVSIKQYPMSQEARLGIKPHIQRLLDQGILVPCQSPWNTPLLPVKKPGTNDYRPVQDLREVNKRVEDIHPTVPNPYNLLSGLPPSHQWYTVLDLKDAFFCLRLHPTSQSLFAFEWRDPEMGISGQLTWTRLPQGFKNSPTLFNEALHRDLADFRIQHPDLILLQYVDDLLLAATSELDCQQGTRALLQTLGDLGYRASAKKAQICQKQVKYLGYLLKEGQRWLTEARKETVMGQPTPKTPRQLREFLGTAGFCRLWIPGFAEMAAPLYPLTKPGTLFEWGPDQQKAYQEIKQALLTAPALGLPDLTKPFELFVDEKQGYAKGVLTQKLGPWRRPVAYLSKKLDPVAAGWPPCLRMVAAIAVLTKDAGKLTMGQPLVILAPHAVEALVKQPPDRWLSNARMTHYQALLLDTDRVQFGPIVALNPATLLPLPEEGLQHDCLDILAEAHGTRPDLTDQPLPDADHTWYTDGSSFLQEGQRKAGAAVTTETEVVWAKALPAGTSAQRAELIALTQALKMAEGKKLNVYTDSRYAFATAHIHGEIYRRRGWLTSEGKEIKNKDEILALLKALFLPKRLSIIHCPGHQKGNRAEARGNRMADQAAREVATRETPETSTLLAGKRTADGSEFEKRTADGSEFESPKKKAKVE

SEQ ID NO: 2503 - protein, 2093 aa, synthetic construct
MPAAKRVKLDGGDKKYSIGLDIGTNSVGWAVITDEYKVPSKKFKVLGNTDRHSIKKNLIGALLFDSGETAEATRLKRTARRRYTRRKNRICYLQEIFSNEMAKVDDSFFHRLEESFLVEEDKKHERHPIFGNIVDEVAYHEKYPTIYHLRKKLVDSTDKADLRLIYLALAHMIKFRGHFLIEGDLNPDNSDVDKLFIQLVQTYNQLFEENPINASGVDAKAILSARLSKSRRLENLIAQLPGEKKNGLFGNLIALSLGLTPNFKSNFDLAEDAKLQLSKDTYDDDLDNLLAQIGDQYADLFLAAKNLSDAILLSDILRVNTEITKAPLSASMIKRYDEHHQDLTLLKALVRQQLPEKYKEIFFDQSKNGYAGYIDGGASQEEFYKFIKPILEKMDGTEELLVKLNREDLLRKQRTFDNGSIPHQIHLGELHAILRRQEDFYPFLKDNREKIEKILTFRIPYYVGPLARGNSRFAWMTRKSEETITPWNFEEVVDKGASAQSFIERMTNFDKNLPNEKVLPKHSLLYEYFTVYNELTKVKYVTEGMRKPAFLSGEQKKAIVDLLFKTNRKVTVKQLKEDYFKKIECFDSVEISGVEDRFNASLGTYHDLLKIIKDKDFLDNEENEDILEDIVLTLTLFEDREMIEERLKTYAHLFDDKVMKQLKRRRYTGWGRLSRKLINGIRDKQSGKTILDFLKSDGFANRNFMQLIHDDSLTFKEDIQKAQVSGQGDSLHEHIANLAGSPAIKKGILQTVKVVDELVKVMGRHKPENIVIEMARENQTTQKGQKNSRERMKRIEEGIKELGSQILKEHPVENTQLQNEKLYLYYLQNGRDMYVDQELDINRLSDYDVDHIVPQSFLKDDSIDNKVLTRSDKARGKSDNVPSEEVVKKMKNYWRQLLNAKLITQRKFDNLTKAERGGLSELDKAGFIKRQLVETRQITKHVAQILDSRMNTKYDENDKLIREVKVITLKSKLVSDFRKDFQFYKVREINNYHHAHDAYLNAVVGTALIKKYPKLESEFVYGDYKVYDVRKMIAKSEQEIGKATAKYFFYSNIMNFFKTEITLANGEIRKRPLIETNGETGEIVWDKGRDFATVRKVLSMPQVNIVKKTEVQTGGFSKESILPKRNSDKLIARKKDWDPKKYGGFDSPTVAYSVLVVAKVEKGKSKKLKSVKELLGITIMERSSFEKNPIDFLEAKGYKEVKKDLIIKLPKYSLFELENGRKRMLASAGELQKGNELALPSKYVNFLYLASHYEKLKGSPEDNEQKQLFVEQHKHYLDEIIEQISEFSKRVILADANLDKVLSAYNKHRDKPIREQAENIIHLFTLTNLGAPAAFKYFDTTIDRKRYTSTKEVLDATLIHQSITGLYETRIDLSQLGGDGGGSSEAAAKGGTLNIEDEYRLHETSKGPDVPLGSTWLSDFPQAWAETGGMGLAVRQAPLIIPLKATSTPVSIKQYPMSQEARLGIKPHIQRLLDQGILVPCQSPWNTPLLPVKKPGTNDYRPVQDLREVNKRVEDIHPTVPNPYNLLSGLPPSHQWYTVLDLKDAFFCLRLHPTSQSLFAFEWRDPEMGISGQLTWTRLPQGFKNSPTLFNEALHRDLADFRIQHPDLILLQYVDDLLLAATSELDCQQGTRALLQTLGDLGYRASAKKAQICQKQVKYLGYLLKEGQRWLTEARKETVMGQPTPKTPRQLREFLGKAGFCRLFIPGFAEMAAPLYPLTKPGTLFEWGPDQQKAYQEIKQALLTAPALGLPDLTKPFELFVDEKQGYAKGVLTQKLGPWRRPVAYLSKKLDPVAAGWPPCLRMVAAIAVLTKDAGKLTMGQPLVILAPHAVEALVKQPPDRWLSNARMTHYQALLLDTDRVQFGPIVALNPATLLPLPEEGLQHDCLDILAEAHGTRPDLTDQPLPDADHTWYTDGSSFLQEGQRKAGAAVTTETEVVWAKALPAGTSAQRAELIALTQALKMAEGKKLNVYTDSRYAFATAHIHGEIYRRRGWLTSEGKEIKNKDEILALLKALFLPKRLSIIHCPGHQKGNRAEARGNRMADQAAREVATRETPETSTLLAGKRTADGSEFEKRTADGSEFESPKKKAKVE

SEQ ID NO: 2504 - protein, 2090 aa, synthetic construct
MPAAKRVKLDGGDKKYSIGLDIGTNSVGWAVITDEYKVPSKKFKVLGNTDRHSIKKNLIGALLFDSGETAEATRLKRTARRRYTRRKNRICYLQEIFSNEMAKVDDSFFHRLEESFLVEEDKKHERHPIFGNIVDEVAYHEKYPTIYHLRKKLVDSTDKADLRLIYLALAHMIKFRGHFLIEGDLNPDNSDVDKLFIQLVQTYNQLFEENPINASGVDAKAILSARLSKSRRLENLIAQLPGEKKNGLFGNLIALSLGLTPNFKSNFDLAEDAKLQLSKDTYDDDLDNLLAQIGDQYADLFLAAKNLSDAILLSDILRVNTEITKAPLSASMIKRYDEHHQDLTLLKALVRQQLPEKYKEIFFDQSKNGYAGYIDGGASQEEFYKFIKPILEKMDGTEELLVKLNREDLLRKQRTFDNGSIPHQIHLGELHAILRRQEDFYPFLKDNREKIEKILTFRIPYYVGPLARGNSRFAWMTRKSEETITPWNFEEVVDKGASAQSFIERMTNFDKNLPNEKVLPKHSLLYEYFTVYNELTKVKYVTEGMRKPAFLSGEQKKAIVDLLFKTNRKVTVKQLKEDYFKKIECFDSVEISGVEDRFNASLGTYHDLLKIIKDKDFLDNEENEDILEDIVLTLTLFEDREMIEERLKTYAHLFDDKVMKQLKRRRYTGWGRLSRKLINGIRDKQSGKTILDFLKSDGFANRNFMQLIHDDSLTFKEDIQKAQVSGQGDSLHEHIANLAGSPAIKKGILQTVKVVDELVKVMGRHKPENIVIEMARENQTTQKGQKNSRERMKRIEEGIKELGSQILKEHPVENTQLQNEKLYLYYLQNGRDMYVDQELDINRLSDYDVDHIVPQSFLKDDSIDNKVLTRSDKARGKSDNVPSEEVVKKMKNYWRQLLNAKLITQRKFDNLTKAERGGLSELDKAGFIKRQLVETRQITKHVAQILDSRMNTKYDENDKLIREVKVITLKSKLVSDFRKDFQFYKVREINNYHHAHDAYLNAVVGTALIKKYPKLESEFVYGDYKVYDVRKMIAKSEQEIGKATAKYFFYSNIMNFFKTEITLANGEIRKRPLIETNGETGEIVWDKGRDFATVRKVLSMPQVNIVKKTEVQTGGFSKESILPKRNSDKLIARKKDWDPKKYGGFDSPTVAYSVLVVAKVEKGKSKKLKSVKELLGITIMERSSFEKNPIDFLEAKGYKEVKKDLIIKLPKYSLFELENGRKRMLASAGELQKGNELALPSKYVNFLYLASHYEKLKGSPEDNEQKQLFVEQHKHYLDEIIEQISEFSKRVILADANLDKVLSAYNKHRDKPIREQAENIIHLFTLTNLGAPAAFKYFDTTIDRKRYTSTKEVLDATLIHQSITGLYETRIDLSQLGGDGGGGGGSGGTLNIEDEYRLHETSKGPDVPLGSTWLSDFPQAWAETGGMGLAVRQAPLIIPLKATSTPVSIKQYPMSQEARLGIKPHIQRLLDQGILVPCQSPWNTPLLPVKKPGTNDYRPVQDLREVNKRVEDIHPTVPNPYNLLSGLPPSHQWYTVLDLKDAFFCLRLHPTSQSLFAFEWRDPEMGISGQLTWTRLPQGFKNSPTLFNEALHRDLADFRIQHPDLILLQYVDDLLLAATSELDCQQGTRALLQTLGDLGYRASAKKAQICQKQVKYLGYLLKEGQRWLTEARKETVMGQPTPKTPRQLREFLGKAGFCRLFIPGFAEMAAPLYPLTKPGTLFEWGPDQQKAYQEIKQALLTAPALGLPDLTKPFELFVDEKQGYAKGVLTQKLGPWRRPVAYLSKKLDPVAAGWPPCLRMVAAIAVLTKDAGKLTMGQPLVILAPHAVEALVKQPPDRWLSNARMTHYQALLLDTDRVQFGPIVALNPATLLPLPEEGLQHDCLDILAEAHGTRPDLTDQPLPDADHTWYTDGSSFLQEGQRKAGAAVTTETEVVWAKALPAGTSAQRAELIALTQALKMAEGKKLNVYTDSRYAFATAHIHGEIYRRRGWLTSEGKEIKNKDEILALLKALFLPKRLSIIHCPGHQKGNRAEARGNRMADQAAREVATRETPETSTLLAGKRTADGSEFEKRTADGSEFESPKKKAKVE

SEQ ID NO: 2505 - protein, 2093 aa, synthetic construct
MPAAKRVKLDGGDKKYSIGLDIGTNSVGWAVITDEYKVPSKKFKVLGNTDRHSIKKNLIGALLFDSGETAEATRLKRTARRRYTRRKNRICYLQEIFSNEMAKVDDSFFHRLEESFLVEEDKKHERHPIFGNIVDEVAYHEKYPTIYHLRKKLVDSTDKADLRLIYLALAHMIKFRGHFLIEGDLNPDNSDVDKLFIQLVQTYNQLFEENPINASGVDAKAILSARLSKSRRLENLIAQLPGEKKNGLFGNLIALSLGLTPNFKSNFDLAEDAKLQLSKDTYDDDLDNLLAQIGDQYADLFLAAKNLSDAILLSDILRVNTEITKAPLSASMIKRYDEHHQDLTLLKALVRQQLPEKYKEIFFDQSKNGYAGYIDGGASQEEFYKFIKPILEKMDGTEELLVKLNREDLLRKQRTFDNGSIPHQIHLGELHAILRRQEDFYPFLKDNREKIEKILTFRIPYYVGPLARGNSRFAWMTRKSEETITPWNFEEVVDKGASAQSFIERMTNFDKNLPNEKVLPKHSLLYEYFTVYNELTKVKYVTEGMRKPAFLSGEQKKAIVDLLFKTNRKVTVKQLKEDYFKKIECFDSVEISGVEDRFNASLGTYHDLLKIIKDKDFLDNEENEDILEDIVLTLTLFEDREMIEERLKTYAHLFDDKVMKQLKRRRYTGWGRLSRKLINGIRDKQSGKTILDFLKSDGFANRNFMQLIHDDSLTFKEDIQKAQVSGQGDSLHEHIANLAGSPAIKKGILQTVKVVDELVKVMGRHKPENIVIEMARENQTTQKGQKNSRERMKRIEEGIKELGSQILKEHPVENTQLQNEKLYLYYLQNGRDMYVDQELDINRLSDYDVDHIVPQSFLKDDSIDNKVLTRSDKARGKSDNVPSEEVVKKMKNYWRQLLNAKLITQRKFDNLTKAERGGLSELDKAGFIKRQLVETRQITKHVAQILDSRMNTKYDENDKLIREVKVITLKSKLVSDFRKDFQFYKVREINNYHHAHDAYLNAVVGTALIKKYPKLESEFVYGDYKVYDVRKMIAKSEQEIGKATAKYFFYSNIMNFFKTEITLANGEIRKRPLIETNGETGEIVWDKGRDFATVRKVLSMPQVNIVKKTEVQTGGFSKESILPKRNSDKLIARKKDWDPKKYGGFDSPTVAYSVLVVAKVEKGKSKKLKSVKELLGITIMERSSFEKNPIDFLEAKGYKEVKKDLIIKLPKYSLFELENGRKRMLASAGELQKGNELALPSKYVNFLYLASHYEKLKGSPEDNEQKQLFVEQHKHYLDEIIEQISEFSKRVILADANLDKVLSAYNKHRDKPIREQAENIIHLFTLTNLGAPAAFKYFDTTIDRKRYTSTKEVLDATLIHQSITGLYETRIDLSQLGGDGGPAPEAAAKGGTLNIEDEYRLHETSKGPDVPLGSTWLSDFPQAWAETGGMGLAVRQAPLIIPLKATSTPVSIKQYPMSQEARLGIKPHIQRLLDQGILVPCQSPWNTPLLPVKKPGTNDYRPVQDLREVNKRVEDIHPTVPNPYNLLSGLPPSHQWYTVLDLKDAFFCLRLHPTSQSLFAFEWRDPEMGISGQLTWTRLPQGFKNSPTLFNEALHRDLADFRIQHPDLILLQYVDDLLLAATSELDCQQGTRALLQTLGDLGYRASAKKAQICQKQVKYLGYLLKEGQRWLTEARKETVMGQPTPKTPRQLREFLGKAGFCRLFIPGFAEMAAPLYPLTKPGTLFEWGPDQQKAYQEIKQALLTAPALGLPDLTKPFELFVDEKQGYAKGVLTQKLGPWRRPVAYLSKKLDPVAAGWPPCLRMVAAIAVLTKDAGKLTMGQPLVILAPHAVEALVKQPPDRWLSNARMTHYQALLLDTDRVQFGPIVALNPATLLPLPEEGLQHDCLDILAEAHGTRPDLTDQPLPDADHTWYTDGSSFLQEGQRKAGAAVTTETEVVWAKALPAGTSAQRAELIALTQALKMAEGKKLNVYTDSRYAFATAHIHGEIYRRRGWLTSEGKEIKNKDEILALLKALFLPKRLSIIHCPGHQKGNRAEARGNRMADQAAREVATRETPETSTLLAGKRTADGSEFEKRTADGSEFESPKKKAKVE

SEQ ID NO: 2506 - protein, 2096 aa, synthetic construct
MPAAKRVKLDGGDKKYSIGLDIGTNSVGWAVITDEYKVPSKKFKVLGNTDRHSIKKNLIGALLFDSGETAEATRLKRTARRRYTRRKNRICYLQEIFSNEMAKVDDSFFHRLEESFLVEEDKKHERHPIFGNIVDEVAYHEKYPTIYHLRKKLVDSTDKADLRLIYLALAHMIKFRGHFLIEGDLNPDNSDVDKLFIQLVQTYNQLFEENPINASGVDAKAILSARLSKSRRLENLIAQLPGEKKNGLFGNLIALSLGLTPNFKSNFDLAEDAKLQLSKDTYDDDLDNLLAQIGDQYADLFLAAKNLSDAILLSDILRVNTEITKAPLSASMIKRYDEHHQDLTLLKALVRQQLPEKYKEIFFDQSKNGYAGYIDGGASQEEFYKFIKPILEKMDGTEELLVKLNREDLLRKQRTFDNGSIPHQIHLGELHAILRRQEDFYPFLKDNREKIEKILTFRIPYYVGPLARGNSRFAWMTRKSEETITPWNFEEVVDKGASAQSFIERMTNFDKNLPNEKVLPKHSLLYEYFTVYNELTKVKYVTEGMRKPAFLSGEQKKAIVDLLFKTNRKVTVKQLKEDYFKKIECFDSVEISGVEDRFNASLGTYHDLLKIIKDKDFLDNEENEDILEDIVLTLTLFEDREMIEERLKTYAHLFDDKVMKQLKRRRYTGWGRLSRKLINGIRDKQSGKTILDFLKSDGFANRNFMQLIHDDSLTFKEDIQKAQVSGQGDSLHEHIANLAGSPAIKKGILQTVKVVDELVKVMGRHKPENIVIEMARENQTTQKGQKNSRERMKRIEEGIKELGSQILKEHPVENTQLQNEKLYLYYLQNGRDMYVDQELDINRLSDYDVDHIVPQSFLKDDSIDNKVLTRSDKARGKSDNVPSEEVVKKMKNYWRQLLNAKLITQRKFDNLTKAERGGLSELDKAGFIKRQLVETRQITKHVAQILDSRMNTKYDENDKLIREVKVITLKSKLVSDFRKDFQFYKVREINNYHHAHDAYLNAVVGTALIKKYPKLESEFVYGDYKVYDVRKMIAKSEQEIGKATAKYFFYSNIMNFFKTEITLANGEIRKRPLIETNGETGEIVWDKGRDFATVRKVLSMPQVNIVKKTEVQTGGFSKESILPKRNSDKLIARKKDWDPKKYGGFDSPTVAYSVLVVAKVEKGKSKKLKSVKELLGITIMERSSFEKNPIDFLEAKGYKEVKKDLIIKLPKYSLFELENGRKRMLASAGELQKGNELALPSKYVNFLYLASHYEKLKGSPEDNEQKQLFVEQHKHYLDEIIEQISEFSKRVILADANLDKVLSAYNKHRDKPIREQAENIIHLFTLTNLGAPAAFKYFDTTIDRKRYTSTKEVLDATLIHQSITGLYETRIDLSQLGGDGGEAAAKPAPGGGGGTLNIEDEYRLHETSKGPDVPLGSTWLSDFPQAWAETGGMGLAVRQAPLIIPLKATSTPVSIKQYPMSQEARLGIKPHIQRLLDQGILVPCQSPWNTPLLPVKKPGTNDYRPVQDLREVNKRVEDIHPTVPNPYNLLSGLPPSHQWYTVLDLKDAFFCLRLHPTSQSLFAFEWRDPEMGISGQLTWTRLPQGFKNSPTLFNEALHRDLADFRIQHPDLILLQYVDDLLLAATSELDCQQGTRALLQTLGDLGYRASAKKAQICQKQVKYLGYLLKEGQRWLTEARKETVMGQPTPKTPRQLREFLGKAGFCRLFIPGFAEMAAPLYPLTKPGTLFEWGPDQQKAYQEIKQALLTAPALGLPDLTKPFELFVDEKQGYAKGVLTQKLGPWRRPVAYLSKKLDPVAAGWPPCLRMVAAIAVLTKDAGKLTMGQPLVILAPHAVEALVKQPPDRWLSNARMTHYQALLLDTDRVQFGPIVALNPATLLPLPEEGLQHDCLDILAEAHGTRPDLTDQPLPDADHTWYTDGSSFLQEGQRKAGAAVTTETEVVWAKALPAGTSAQRAELIALTQALKMAEGKKLNVYTDSRYAFATAHIHGEIYRRRGWLTSEGKEIKNKDEILALLKALFLPKRLSIIHCPGHQKGNRAEARGNRMADQAAREVATRETPETSTLLAGKRTADGSEFEKRTADGSEFESPKKKAKVE

SEQ ID NO: 2507 - protein, 2100 aa, synthetic construct
MPAAKRVKLDGGDKKYSIGLDIGTNSVGWAVITDEYKVPSKKFKVLGNTDRHSIKKNLIGALLFDSGETAEATRLKRTARRRYTRRKNRICYLQEIFSNEMAKVDDSFFHRLEESFLVEEDKKHERHPIFGNIVDEVAYHEKYPTIYHLRKKLVDSTDKADLRLIYLALAHMIKFRGHFLIEGDLNPDNSDVDKLFIQLVQTYNQLFEENPINASGVDAKAILSARLSKSRRLENLIAQLPGEKKNGLFGNLIALSLGLTPNFKSNFDLAEDAKLQLSKDTYDDDLDNLLAQIGDQYADLFLAAKNLSDAILLSDILRVNTEITKAPLSASMIKRYDEHHQDLTLLKALVRQQLPEKYKEIFFDQSKNGYAGYIDGGASQEEFYKFIKPILEKMDGTEELLVKLNREDLLRKQRTFDNGSIPHQIHLGELHAILRRQEDFYPFLKDNREKIEKILTFRIPYYVGPLARGNSRFAWMTRKSEETITPWNFEEVVDKGASAQSFIERMTNFDKNLPNEKVLPKHSLLYEYFTVYNELTKVKYVTEGMRKPAFLSGEQKKAIVDLLFKTNRKVTVKQLKEDYFKKIECFDSVEISGVEDRFNASLGTYHDLLKIIKDKDFLDNEENEDILEDIVLTLTLFEDREMIEERLKTYAHLFDDKVMKQLKRRRYTGWGRLSRKLINGIRDKQSGKTILDFLKSDGFANRNFMQLIHDDSLTFKEDIQKAQVSGQGDSLHEHIANLAGSPAIKKGILQTVKVVDELVKVMGRHKPENIVIEMARENQTTQKGQKNSRERMKRIEEGIKELGSQILKEHPVENTQLQNEKLYLYYLQNGRDMYVDQELDINRLSDYDVDHIVPQSFLKDDSIDNKVLTRSDKARGKSDNVPSEEVVKKMKNYWRQLLNAKLITQRKFDNLTKAERGGLSELDKAGFIKRQLVETRQITKHVAQILDSRMNTKYDENDKLIREVKVITLKSKLVSDFRKDFQFYKVREINNYHHAHDAYLNAVVGTALIKKYPKLESEFVYGDYKVYDVRKMIAKSEQEIGKATAKYFFYSNIMNFFKTEITLANGEIRKRPLIETNGETGEIVWDKGRDFATVRKVLSMPQVNIVKKTEVQTGGFSKESILPKRNSDKLIARKKDWDPKKYGGFDSPTVAYSVLVVAKVEKGKSKKLKSVKELLGITIMERSSFEKNPIDFLEAKGYKEVKKDLIIKLPKYSLFELENGRKRMLASAGELQKGNELALPSKYVNFLYLASHYEKLKGSPEDNEQKQLFVEQHKHYLDEIIEQISEFSKRVILADANLDKVLSAYNKHRDKPIREQAENIIHLFTLTNLGAPAAFKYFDTTIDRKRYTSTKEVLDATLIHQSITGLYETRIDLSQLGGDGGEAAAKEAAAKEAAAKGGTLNIEDEYRLHETSKGPDVPLGSTWLSDFPQAWAETGGMGLAVRQAPLIIPLKATSTPVSIKQYPMSQEARLGIKPHIQRLLDQGILVPCQSPWNTPLLPVKKPGTNDYRPVQDLREVNKRVEDIHPTVPNPYNLLSGLPPSHQWYTVLDLKDAFFCLRLHPTSQSLFAFEWRDPEMGISGQLTWTRLPQGFKNSPTLFNEALHRDLADFRIQHPDLILLQYVDDLLLAATSELDCQQGTRALLQTLGDLGYRASAKKAQICQKQVKYLGYLLKEGQRWLTEARKETVMGQPTPKTPRQLREFLGKAGFCRLFIPGFAEMAAPLYPLTKPGTLFEWGPDQQKAYQEIKQALLTAPALGLPDLTKPFELFVDEKQGYAKGVLTQKLGPWRRPVAYLSKKLDPVAAGWPPCLRMVAAIAVLTKDAGKLTMGQPLVILAPHAVEALVKQPPDRWLSNARMTHYQALLLDTDRVQFGPIVALNPATLLPLPEEGLQHDCLDILAEAHGTRPDLTDQPLPDADHTWYTDGSSFLQEGQRKAGAAVTTETEVVWAKALPAGTSAQRAELIALTQALKMAEGKKLNVYTDSRYAFATAHIHGEIYRRRGWLTSEGKEIKNKDEILALLKALFLPKRLSIIHCPGHQKGNRAEARGNRMADQAAREVATRETPETSTLLAGKRTADGSEFEKRTADGSEFESPKKKAKVE

SEQ ID NO: 2508 - protein, 2088 aa, synthetic construct
MPAAKRVKLDGGDKKYSIGLDIGTNSVGWAVITDEYKVPSKKFKVLGNTDRHSIKKNLIGALLFDSGETAEATRLKRTARRRYTRRKNRICYLQEIFSNEMAKVDDSFFHRLEESFLVEEDKKHERHPIFGNIVDEVAYHEKYPTIYHLRKKLVDSTDKADLRLIYLALAHMIKFRGHFLIEGDLNPDNSDVDKLFIQLVQTYNQLFEENPINASGVDAKAILSARLSKSRRLENLIAQLPGEKKNGLFGNLIALSLGLTPNFKSNFDLAEDAKLQLSKDTYDDDLDNLLAQIGDQYADLFLAAKNLSDAILLSDILRVNTEITKAPLSASMIKRYDEHHQDLTLLKALVRQQLPEKYKEIFFDQSKNGYAGYIDGGASQEEFYKFIKPILEKMDGTEELLVKLNREDLLRKQRTFDNGSIPHQIHLGELHAILRRQEDFYPFLKDNREKIEKILTFRIPYYVGPLARGNSRFAWMTRKSEETITPWNFEEVVDKGASAQSFIERMTNFDKNLPNEKVLPKHSLLYEYFTVYNELTKVKYVTEGMRKPAFLSGEQKKAIVDLLFKTNRKVTVKQLKEDYFKKIECFDSVEISGVEDRFNASLGTYHDLLKIIKDKDFLDNEENEDILEDIVLTLTLFEDREMIEERLKTYAHLFDDKVMKQLKRRRYTGWGRLSRKLINGIRDKQSGKTILDFLKSDGFANRNFMQLIHDDSLTFKEDIQKAQVSGQGDSLHEHIANLAGSPAIKKGILQTVKVVDELVKVMGRHKPENIVIEMARENQTTQKGQKNSRERMKRIEEGIKELGSQILKEHPVENTQLQNEKLYLYYLQNGRDMYVDQELDINRLSDYDVDHIVPQSFLKDDSIDNKVLTRSDKARGKSDNVPSEEVVKKMKNYWRQLLNAKLITQRKFDNLTKAERGGLSELDKAGFIKRQLVETRQITKHVAQILDSRMNTKYDENDKLIREVKVITLKSKLVSDFRKDFQFYKVREINNYHHAHDAYLNAVVGTALIKKYPKLESEFVYGDYKVYDVRKMIAKSEQEIGKATAKYFFYSNIMNFFKTEITLANGEIRKRPLIETNGETGEIVWDKGRDFATVRKVLSMPQVNIVKKTEVQTGGFSKESILPKRNSDKLIARKKDWDPKKYGGFDSPTVAYSVLVVAKVEKGKSKKLKSVKELLGITIMERSSFEKNPIDFLEAKGYKEVKKDLIIKLPKYSLFELENGRKRMLASAGELQKGNELALPSKYVNFLYLASHYEKLKGSPEDNEQKQLFVEQHKHYLDEIIEQISEFSKRVILADANLDKVLSAYNKHRDKPIREQAENIIHLFTLTNLGAPAAFKYFDTTIDRKRYTSTKEVLDATLIHQSITGLYETRIDLSQLGGDGGGSSGGTLNIEDEYRLHETSKGPDVPLGSTWLSDFPQAWAETGGMGLAVRQAPLIIPLKATSTPVSIKQYPMSQEARLGIKPHIQRLLDQGILVPCQSPWNTPLLPVKKPGTNDYRPVQDLREVNKRVEDIHPTVPNPYNLLSGLPPSHQWYTVLDLKDAFFCLRLHPTSQSLFAFEWRDPEMGISGQLTWTRLPQGFKNSPTLFNEALHRDLADFRIQHPDLILLQYVDDLLLAATSELDCQQGTRALLQTLGDLGYRASAKKAQICQKQVKYLGYLLKEGQRWLTEARKETVMGQPTPKTPRQLREFLGKAGFCRLFIPGFAEMAAPLYPLTKPGTLFEWGPDQQKAYQEIKQALLTAPALGLPDLTKPFELFVDEKQGYAKGVLTQKLGPWRRPVAYLSKKLDPVAAGWPPCLRMVAAIAVLTKDAGKLTMGQPLVILAPHAVEALVKQPPDRWLSNARMTHYQALLLDTDRVQFGPIVALNPATLLPLPEEGLQHDCLDILAEAHGTRPDLTDQPLPDADHTWYTDGSSFLQEGQRKAGAAVTTETEVVWAKALPAGTSAQRAELIALTQALKMAEGKKLNVYTDSRYAFATAHIHGEIYRRRGWLTSEGKEIKNKDEILALLKALFLPKRLSIIHCPGHQKGNRAEARGNRMADQAAREVATRETPETSTLLAGKRTADGSEFEKRTADGSEFESPKKKAKVE

SEQ ID NO: 2509 - protein, 2096 aa, synthetic construct
MPAAKRVKLDGGDKKYSIGLDIGTNSVGWAVITDEYKVPSKKFKVLGNTDRHSIKKNLIGALLFDSGETAEATRLKRTARRRYTRRKNRICYLQEIFSNEMAKVDDSFFHRLEESFLVEEDKKHERHPIFGNIVDEVAYHEKYPTIYHLRKKLVDSTDKADLRLIYLALAHMIKFRGHFLIEGDLNPDNSDVDKLFIQLVQTYNQLFEENPINASGVDAKAILSARLSKSRRLENLIAQLPGEKKNGLFGNLIALSLGLTPNFKSNFDLAEDAKLQLSKDTYDDDLDNLLAQIGDQYADLFLAAKNLSDAILLSDILRVNTEITKAPLSASMIKRYDEHHQDLTLLKALVRQQLPEKYKEIFFDQSKNGYAGYIDGGASQEEFYKFIKPILEKMDGTEELLVKLNREDLLRKQRTFDNGSIPHQIHLGELHAILRRQEDFYPFLKDNREKIEKILTFRIPYYVGPLARGNSRFAWMTRKSEETITPWNFEEVVDKGASAQSFIERMTNFDKNLPNEKVLPKHSLLYEYFTVYNELTKVKYVTEGMRKPAFLSGEQKKAIVDLLFKTNRKVTVKQLKEDYFKKIECFDSVEISGVEDRFNASLGTYHDLLKIIKDKDFLDNEENEDILEDIVLTLTLFEDREMIEERLKTYAHLFDDKVMKQLKRRRYTGWGRLSRKLINGIRDKQSGKTILDFLKSDGFANRNFMQLIHDDSLTFKEDIQKAQVSGQGDSLHEHIANLAGSPAIKKGILQTVKVVDELVKVMGRHKPENIVIEMARENQTTQKGQKNSRERMKRIEEGIKELGSQILKEHPVENTQLQNEKLYLYYLQNGRDMYVDQELDINRLSDYDVDHIVPQSFLKDDSIDNKVLTRSDKARGKSDNVPSEEVVKKMKNYWRQLLNAKLITQRKFDNLTKAERGGLSELDKAGFIKRQLVETRQITKHVAQILDSRMNTKYDENDKLIREVKVITLKSKLVSDFRKDFQFYKVREINNYHHAHDAYLNAVVGTALIKKYPKLESEFVYGDYKVYDVRKMIAKSEQEIGKATAKYFFYSNIMNFFKTEITLANGEIRKRPLIETNGETGEIVWDKGRDFATVRKVLSMPQVNIVKKTEVQTGGFSKESILPKRNSDKLIARKKDWDPKKYGGFDSPTVAYSVLVVAKVEKGKSKKLKSVKELLGITIMERSSFEKNPIDFLEAKGYKEVKKDLIIKLPKYSLFELENGRKRMLASAGELQKGNELALPSKYVNFLYLASHYEKLKGSPEDNEQKQLFVEQHKHYLDEIIEQISEFSKRVILADANLDKVLSAYNKHRDKPIREQAENIIHLFTLTNLGAPAAFKYFDTTIDRKRYTSTKEVLDATLIHQSITGLYETRIDLSQLGGDGGEAAAKGSSPAPGGTLNIEDEYRLHETSKGPDVPLGSTWLSDFPQAWAETGGMGLAVRQAPLIIPLKATSTPVSIKQYPMSQEARLGIKPHIQRLLDQGILVPCQSPWNTPLLPVKKPGTNDYRPVQDLREVNKRVEDIHPTVPNPYNLLSGLPPSHQWYTVLDLKDAFFCLRLHPTSQSLFAFEWRDPEMGISGQLTWTRLPQGFKNSPTLFNEALHRDLADFRIQHPDLILLQYVDDLLLAATSELDCQQGTRALLQTLGDLGYRASAKKAQICQKQVKYLGYLLKEGQRWLTEARKETVMGQPTPKTPRQLREFLGKAGFCRLFIPGFAEMAAPLYPLTKPGTLFEWGPDQQKAYQEIKQALLTAPALGLPDLTKPFELFVDEKQGYAKGVLTQKLGPWRRPVAYLSKKLDPVAAGWPPCLRMVAAIAVLTKDAGKLTMGQPLVILAPHAVEALVKQPPDRWLSNARMTHYQALLLDTDRVQFGPIVALNPATLLPLPEEGLQHDCLDILAEAHGTRPDLTDQPLPDADHTWYTDGSSFLQEGQRKAGAAVTTETEVVWAKALPAGTSAQRAELIALTQALKMAEGKKLNVYTDSRYAFATAHIHGEIYRRRGWLTSEGKEIKNKDEILALLKALFLPKRLSIIHCPGHQKGNRAEARGNRMADQAAREVATRETPETSTLLAGKRTADGSEFEKRTADGSEFESPKKKAKVE

SEQ ID NO: 2510 - protein, 2096 aa, synthetic construct
MPAAKRVKLDGGDKKYSIGLDIGTNSVGWAVITDEYKVPSKKFKVLGNTDRHSIKKNLIGALLFDSGETAEATRLKRTARRRYTRRKNRICYLQEIFSNEMAKVDDSFFHRLEESFLVEEDKKHERHPIFGNIVDEVAYHEKYPTIYHLRKKLVDSTDKADLRLIYLALAHMIKFRGHFLIEGDLNPDNSDVDKLFIQLVQTYNQLFEENPINASGVDAKAILSARLSKSRRLENLIAQLPGEKKNGLFGNLIALSLGLTPNFKSNFDLAEDAKLQLSKDTYDDDLDNLLAQIGDQYADLFLAAKNLSDAILLSDILRVNTEITKAPLSASMIKRYDEHHQDLTLLKALVRQQLPEKYKEIFFDQSKNGYAGYIDGGASQEEFYKFIKPILEKMDGTEELLVKLNREDLLRKQRTFDNGSIPHQIHLGELHAILRRQEDFYPFLKDNREKIEKILTFRIPYYVGPLARGNSRFAWMTRKSEETITPWNFEEVVDKGASAQSFIERMTNFDKNLPNEKVLPKHSLLYEYFTVYNELTKVKYVTEGMRKPAFLSGEQKKAIVDLLFKTNRKVTVKQLKEDYFKKIECFDSVEISGVEDRFNASLGTYHDLLKIIKDKDFLDNEENEDILEDIVLTLTLFEDREMIEERLKTYAHLFDDKVMKQLKRRRYTGWGRLSRKLINGIRDKQSGKTILDFLKSDGFANRNFMQLIHDDSLTFKEDIQKAQVSGQGDSLHEHIANLAGSPAIKKGILQTVKVVDELVKVMGRHKPENIVIEMARENQTTQKGQKNSRERMKRIEEGIKELGSQILKEHPVENTQLQNEKLYLYYLQNGRDMYVDQELDINRLSDYDVDHIVPQSFLKDDSIDNKVLTRSDKARGKSDNVPSEEVVKKMKNYWRQLLNAKLITQRKFDNLTKAERGGLSELDKAGFIKRQLVETRQITKHVAQILDSRMNTKYDENDKLIREVKVITLKSKLVSDFRKDFQFYKVREINNYHHAHDAYLNAVVGTALIKKYPKLESEFVYGDYKVYDVRKMIAKSEQEIGKATAKYFFYSNIMNFFKTEITLANGEIRKRPLIETNGETGEIVWDKGRDFATVRKVLSMPQVNIVKKTEVQTGGFSKESILPKRNSDKLIARKKDWDPKKYGGFDSPTVAYSVLVVAKVEKGKSKKLKSVKELLGITIMERSSFEKNPIDFLEAKGYKEVKKDLIIKLPKYSLFELENGRKRMLASAGELQKGNELALPSKYVNFLYLASHYEKLKGSPEDNEQKQLFVEQHKHYLDEIIEQISEFSKRVILADANLDKVLSAYNKHRDKPIREQAENIIHLFTLTNLGAPAAFKYFDTTIDRKRYTSTKEVLDATLIHQSITGLYETRIDLSQLGGDGGPAPAPAPAPAPGGTLNIEDEYRLHETSKGPDVPLGSTWLSDFPQAWAETGGMGLAVRQAPLIIPLKATSTPVSIKQYPMSQEARLGIKPHIQRLLDQGILVPCQSPWNTPLLPVKKPGTNDYRPVQDLREVNKRVEDIHPTVPNPYNLLSGLPPSHQWYTVLDLKDAFFCLRLHPTSQSLFAFEWRDPEMGISGQLTWTRLPQGFKNSPTLFNEALHRDLADFRIQHPDLILLQYVDDLLLAATSELDCQQGTRALLQTLGDLGYRASAKKAQICQKQVKYLGYLLKEGQRWLTEARKETVMGQPTPKTPRQLREFLGKAGFCRLFIPGFAEMAAPLYPLTKPGTLFEWGPDQQKAYQEIKQALLTAPALGLPDLTKPFELFVDEKQGYAKGVLTQKLGPWRRPVAYLSKKLDPVAAGWPPCLRMVAAIAVLTKDAGKLTMGQPLVILAPHAVEALVKQPPDRWLSNARMTHYQALLLDTDRVQFGPIVALNPATLLPLPEEGLQHDCLDILAEAHGTRPDLTDQPLPDADHTWYTDGSSFLQEGQRKAGAAVTTETEVVWAKALPAGTSAQRAELIALTQALKMAEGKKLNVYTDSRYAFATAHIHGEIYRRRGWLTSEGKEIKNKDEILALLKALFLPKRLSIIHCPGHQKGNRAEARGNRMADQAAREVATRETPETSTLLAGKRTADGSEFEKRTADGSEFESPKKKAKVE

SEQ ID NO: 2511 - protein, 2095 aa, synthetic construct
MPAAKRVKLDGGDKKYSIGLDIGTNSVGWAVITDEYKVPSKKFKVLGNTDRHSIKKNLIGALLFDSGETAEATRLKRTARRRYTRRKNRICYLQEIFSNEMAKVDDSFFHRLEESFLVEEDKKHERHPIFGNIVDEVAYHEKYPTIYHLRKKLVDSTDKADLRLIYLALAHMIKFRGHFLIEGDLNPDNSDVDKLFIQLVQTYNQLFEENPINASGVDAKAILSARLSKSRRLENLIAQLPGEKKNGLFGNLIALSLGLTPNFKSNFDLAEDAKLQLSKDTYDDDLDNLLAQIGDQYADLFLAAKNLSDAILLSDILRVNTEITKAPLSASMIKRYDEHHQDLTLLKALVRQQLPEKYKEIFFDQSKNGYAGYIDGGASQEEFYKFIKPILEKMDGTEELLVKLNREDLLRKQRTFDNGSIPHQIHLGELHAILRRQEDFYPFLKDNREKIEKILTFRIPYYVGPLARGNSRFAWMTRKSEETITPWNFEEVVDKGASAQSFIERMTNFDKNLPNEKVLPKHSLLYEYFTVYNELTKVKYVTEGMRKPAFLSGEQKKAIVDLLFKTNRKVTVKQLKEDYFKKIECFDSVEISGVEDRFNASLGTYHDLLKIIKDKDFLDNEENEDILEDIVLTLTLFEDREMIEERLKTYAHLFDDKVMKQLKRRRYTGWGRLSRKLINGIRDKQSGKTILDFLKSDGFANRNFMQLIHDDSLTFKEDIQKAQVSGQGDSLHEHIANLAGSPAIKKGILQTVKVVDELVKVMGRHKPENIVIEMARENQTTQKGQKNSRERMKRIEEGIKELGSQILKEHPVENTQLQNEKLYLYYLQNGRDMYVDQELDINRLSDYDVDHIVPQSFLKDDSIDNKVLTRSDKARGKSDNVPSEEVVKKMKNYWRQLLNAKLITQRKFDNLTKAERGGLSELDKAGFIKRQLVETRQITKHVAQILDSRMNTKYDENDKLIREVKVITLKSKLVSDFRKDFQFYKVREINNYHHAHDAYLNAVVGTALIKKYPKLESEFVYGDYKVYDVRKMIAKSEQEIGKATAKYFFYSNIMNFFKTEITLANGEIRKRPLIETNGETGEIVWDKGRDFATVRKVLSMPQVNIVKKTEVQTGGFSKESILPKRNSDKLIARKKDWDPKKYGGFDSPTVAYSVLVVAKVEKGKSKKLKSVKELLGITIMERSSFEKNPIDFLEAKGYKEVKKDLIIKLPKYSLFELENGRKRMLASAGELQKGNELALPSKYVNFLYLASHYEKLKGSPEDNEQKQLFVEQHKHYLDEIIEQISEFSKRVILADANLDKVLSAYNKHRDKPIREQAENIIHLFTLTNLGAPAAFKYFDTTIDRKRYTSTKEVLDATLIHQSITGLYETRIDLSQLGGDGGGGGGSGGGGSGGTLNIEDEYRLHETSKGPDVPLGSTWLSDFPQAWAETGGMGLAVRQAPLIIPLKATSTPVSIKQYPMSQEARLGIKPHIQRLLDQGILVPCQSPWNTPLLPVKKPGTNDYRPVQDLREVNKRVEDIHPTVPNPYNLLSGLPPSHQWYTVLDLKDAFFCLRLHPTSQSLFAFEWRDPEMGISGQLTWTRLPQGFKNSPTLFNEALHRDLADFRIQHPDLILLQYVDDLLLAATSELDCQQGTRALLQTLGDLGYRASAKKAQICQKQVKYLGYLLKEGQRWLTEARKETVMGQPTPKTPRQLREFLGKAGFCRLFIPGFAEMAAPLYPLTKPGTLFEWGPDQQKAYQEIKQALLTAPALGLPDLTKPFELFVDEKQGYAKGVLTQKLGPWRRPVAYLSKKLDPVAAGWPPCLRMVAAIAVLTKDAGKLTMGQPLVILAPHAVEALVKQPPDRWLSNARMTHYQALLLDTDRVQFGPIVALNPATLLPLPEEGLQHDCLDILAEAHGTRPDLTDQPLPDADHTWYTDGSSFLQEGQRKAGAAVTTETEVVWAKALPAGTSAQRAELIALTQALKMAEGKKLNVYTDSRYAFATAHIHGEIYRRRGWLTSEGKEIKNKDEILALLKALFLPKRLSIIHCPGHQKGNRAEARGNRMADQAAREVATRETPETSTLLAGKRTADGSEFEKRTADGSEFESPKKKAKVE

SEQ ID NO: 2512 - protein, 2096 aa, synthetic construct
MPAAKRVKLDGGDKKYSIGLDIGTNSVGWAVITDEYKVPSKKFKVLGNTDRHSIKKNLIGALLFDSGETAEATRLKRTARRRYTRRKNRICYLQEIFSNEMAKVDDSFFHRLEESFLVEEDKKHERHPIFGNIVDEVAYHEKYPTIYHLRKKLVDSTDKADLRLIYLALAHMIKFRGHFLIEGDLNPDNSDVDKLFIQLVQTYNQLFEENPINASGVDAKAILSARLSKSRRLENLIAQLPGEKKNGLFGNLIALSLGLTPNFKSNFDLAEDAKLQLSKDTYDDDLDNLLAQIGDQYADLFLAAKNLSDAILLSDILRVNTEITKAPLSASMIKRYDEHHQDLTLLKALVRQQLPEKYKEIFFDQSKNGYAGYIDGGASQEEFYKFIKPILEKMDGTEELLVKLNREDLLRKQRTFDNGSIPHQIHLGELHAILRRQEDFYPFLKDNREKIEKILTFRIPYYVGPLARGNSRFAWMTRKSEETITPWNFEEVVDKGASAQSFIERMTNFDKNLPNEKVLPKHSLLYEYFTVYNELTKVKYVTEGMRKPAFLSGEQKKAIVDLLFKTNRKVTVKQLKEDYFKKIECFDSVEISGVEDRFNASLGTYHDLLKIIKDKDFLDNEENEDILEDIVLTLTLFEDREMIEERLKTYAHLFDDKVMKQLKRRRYTGWGRLSRKLINGIRDKQSGKTILDFLKSDGFANRNFMQLIHDDSLTFKEDIQKAQVSGQGDSLHEHIANLAGSPAIKKGILQTVKVVDELVKVMGRHKPENIVIEMARENQTTQKGQKNSRERMKRIEEGIKELGSQILKEHPVENTQLQNEKLYLYYLQNGRDMYVDQELDINRLSDYDVDHIVPQSFLKDDSIDNKVLTRSDKARGKSDNVPSEEVVKKMKNYWRQLLNAKLITQRKFDNLTKAERGGLSELDKAGFIKRQLVETRQITKHVAQILDSRMNTKYDENDKLIREVKVITLKSKLVSDFRKDFQFYKVREINNYHHAHDAYLNAVVGTALIKKYPKLESEFVYGDYKVYDVRKMIAKSEQEIGKATAKYFFYSNIMNFFKTEITLANGEIRKRPLIETNGETGEIVWDKGRDFATVRKVLSMPQVNIVKKTEVQTGGFSKESILPKRNSDKLIARKKDWDPKKYGGFDSPTVAYSVLVVAKVEKGKSKKLKSVKELLGITIMERSSFEKNPIDFLEAKGYKEVKKDLIIKLPKYSLFELENGRKRMLASAGELQKGNELALPSKYVNFLYLASHYEKLKGSPEDNEQKQLFVEQHKHYLDEIIEQISEFSKRVILADANLDKVLSAYNKHRDKPIREQAENIIHLFTLTNLGAPAAFKYFDTTIDRKRYTSTKEVLDATLIHQSITGLYETRIDLSQLGGDGGEAAAKPAPGGSGGTLNIEDEYRLHETSKGPDVPLGSTWLSDFPQAWAETGGMGLAVRQAPLIIPLKATSTPVSIKQYPMSQEARLGIKPHIQRLLDQGILVPCQSPWNTPLLPVKKPGTNDYRPVQDLREVNKRVEDIHPTVPNPYNLLSGLPPSHQWYTVLDLKDAFFCLRLHPTSQSLFAFEWRDPEMGISGQLTWTRLPQGFKNSPTLFNEALHRDLADFRIQHPDLILLQYVDDLLLAATSELDCQQGTRALLQTLGDLGYRASAKKAQICQKQVKYLGYLLKEGQRWLTEARKETVMGQPTPKTPRQLREFLGKAGFCRLFIPGFAEMAAPLYPLTKPGTLFEWGPDQQKAYQEIKQALLTAPALGLPDLTKPFELFVDEKQGYAKGVLTQKLGPWRRPVAYLSKKLDPVAAGWPPCLRMVAAIAVLTKDAGKLTMGQPLVILAPHAVEALVKQPPDRWLSNARMTHYQALLLDTDRVQFGPIVALNPATLLPLPEEGLQHDCLDILAEAHGTRPDLTDQPLPDADHTWYTDGSSFLQEGQRKAGAAVTTETEVVWAKALPAGTSAQRAELIALTQALKMAEGKKLNVYTDSRYAFATAHIHGEIYRRRGWLTSEGKEIKNKDEILALLKALFLPKRLSIIHCPGHQKGNRAEARGNRMADQAAREVATRETPETSTLLAGKRTADGSEFEKRTADGSEFESPKKKAKVE

SEQ ID NO: 2513 - protein, 2103 aa, synthetic construct
MPAAKRVKLDGGDKKYSIGLDIGTNSVGWAVITDEYKVPSKKFKVLGNTDRHSIKKNLIGALLFDSGETAEATRLKRTARRRYTRRKNRICYLQEIFSNEMAKVDDSFFHRLEESFLVEEDKKHERHPIFGNIVDEVAYHEKYPTIYHLRKKLVDSTDKADLRLIYLALAHMIKFRGHFLIEGDLNPDNSDVDKLFIQLVQTYNQLFEENPINASGVDAKAILSARLSKSRRLENLIAQLPGEKKNGLFGNLIALSLGLTPNFKSNFDLAEDAKLQLSKDTYDDDLDNLLAQIGDQYADLFLAAKNLSDAILLSDILRVNTEITKAPLSASMIKRYDEHHQDLTLLKALVRQQLPEKYKEIFFDQSKNGYAGYIDGGASQEEFYKFIKPILEKMDGTEELLVKLNREDLLRKQRTFDNGSIPHQIHLGELHAILRRQEDFYPFLKDNREKIEKILTFRIPYYVGPLARGNSRFAWMTRKSEETITPWNFEEVVDKGASAQSFIERMTNFDKNLPNEKVLPKHSLLYEYFTVYNELTKVKYVTEGMRKPAFLSGEQKKAIVDLLFKTNRKVTVKQLKEDYFKKIECFDSVEISGVEDRFNASLGTYHDLLKIIKDKDFLDNEENEDILEDIVLTLTLFEDREMIEERLKTYAHLFDDKVMKQLKRRRYTGWGRLSRKLINGIRDKQSGKTILDFLKSDGFANRNFMQLIHDDSLTFKEDIQKAQVSGQGDSLHEHIANLAGSPAIKKGILQTVKVVDELVKVMGRHKPENIVIEMARENQTTQKGQKNSRERMKRIEEGIKELGSQILKEHPVENTQLQNEKLYLYYLQNGRDMYVDQELDINRLSDYDVDHIVPQSFLKDDSIDNKVLTRSDKARGKSDNVPSEEVVKKMKNYWRQLLNAKLITQRKFDNLTKAERGGLSELDKAGFIKRQLVETRQITKHVAQILDSRMNTKYDENDKLIREVKVITLKSKLVSDFRKDFQFYKVREINNYHHAHDAYLNAVVGTALIKKYPKLESEFVYGDYKVYDVRKMIAKSEQEIGKATAKYFFYSNIMNFFKTEITLANGEIRKRPLIETNGETGEIVWDKGRDFATVRKVLSMPQVNIVKKTEVQTGGFSKESILPKRNSDKLIARKKDWDPKKYGGFDSPTVAYSVLVVAKVEKGKSKKLKSVKELLGITIMERSSFEKNPIDFLEAKGYKEVKKDLIIKLPKYSLFELENGRKRMLASAGELQKGNELALPSKYVNFLYLASHYEKLKGSPEDNEQKQLFVEQHKHYLDEIIEQISEFSKRVILADANLDKVLSAYNKHRDKPIREQAENIIHLFTLTNLGAPAAFKYFDTTIDRKRYTSTKEVLDATLIHQSITGLYETRIDLSQLGGDGGGGSGGSGGSGGSGGSGGSGGTLNIEDEYRLHETSKGPDVPLGSTWLSDFPQAWAETGGMGLAVRQAPLIIPLKATSTPVSIKQYPMSQEARLGIKPHIQRLLDQGILVPCQSPWNTPLLPVKKPGTNDYRPVQDLREVNKRVEDIHPTVPNPYNLLSGLPPSHQWYTVLDLKDAFFCLRLHPTSQSLFAFEWRDPEMGISGQLTWTRLPQGFKNSPTLFNEALHRDLADFRIQHPDLILLQYVDDLLLAATSELDCQQGTRALLQTLGDLGYRASAKKAQICQKQVKYLGYLLKEGQRWLTEARKETVMGQPTPKTPRQLREFLGKAGFCRLFIPGFAEMAAPLYPLTKPGTLFEWGPDQQKAYQEIKQALLTAPALGLPDLTKPFELFVDEKQGYAKGVLTQKLGPWRRPVAYLSKKLDPVAAGWPPCLRMVAAIAVLTKDAGKLTMGQPLVILAPHAVEALVKQPPDRWLSNARMTHYQALLLDTDRVQFGPIVALNPATLLPLPEEGLQHDCLDILAEAHGTRPDLTDQPLPDADHTWYTDGSSFLQEGQRKAGAAVTTETEVVWAKALPAGTSAQRAELIALTQALKMAEGKKLNVYTDSRYAFATAHIHGEIYRRRGWLTSEGKEIKNKDEILALLKALFLPKRLSIIHCPGHQKGNRAEARGNRMADQAAREVATRETPETSTLLAGKRTADGSEFEKRTADGSEFESPKKKAKVE

SEQ ID NO: 2514 - protein, 2096 aa, synthetic construct
MPAAKRVKLDGGDKKYSIGLDIGTNSVGWAVITDEYKVPSKKFKVLGNTDRHSIKKNLIGALLFDSGETAEATRLKRTARRRYTRRKNRICYLQEIFSNEMAKVDDSFFHRLEESFLVEEDKKHERHPIFGNIVDEVAYHEKYPTIYHLRKKLVDSTDKADLRLIYLALAHMIKFRGHFLIEGDLNPDNSDVDKLFIQLVQTYNQLFEENPINASGVDAKAILSARLSKSRRLENLIAQLPGEKKNGLFGNLIALSLGLTPNFKSNFDLAEDAKLQLSKDTYDDDLDNLLAQIGDQYADLFLAAKNLSDAILLSDILRVNTEITKAPLSASMIKRYDEHHQDLTLLKALVRQQLPEKYKEIFFDQSKNGYAGYIDGGASQEEFYKFIKPILEKMDGTEELLVKLNREDLLRKQRTFDNGSIPHQIHLGELHAILRRQEDFYPFLKDNREKIEKILTFRIPYYVGPLARGNSRFAWMTRKSEETITPWNFEEVVDKGASAQSFIERMTNFDKNLPNEKVLPKHSLLYEYFTVYNELTKVKYVTEGMRKPAFLSGEQKKAIVDLLFKTNRKVTVKQLKEDYFKKIECFDSVEISGVEDRFNASLGTYHDLLKIIKDKDFLDNEENEDILEDIVLTLTLFEDREMIEERLKTYAHLFDDKVMKQLKRRRYTGWGRLSRKLINGIRDKQSGKTILDFLKSDGFANRNFMQLIHDDSLTFKEDIQKAQVSGQGDSLHEHIANLAGSPAIKKGILQTVKVVDELVKVMGRHKPENIVIEMARENQTTQKGQKNSRERMKRIEEGIKELGSQILKEHPVENTQLQNEKLYLYYLQNGRDMYVDQELDINRLSDYDVDHIVPQSFLKDDSIDNKVLTRSDKARGKSDNVPSEEVVKKMKNYWRQLLNAKLITQRKFDNLTKAERGGLSELDKAGFIKRQLVETRQITKHVAQILDSRMNTKYDENDKLIREVKVITLKSKLVSDFRKDFQFYKVREINNYHHAHDAYLNAVVGTALIKKYPKLESEFVYGDYKVYDVRKMIAKSEQEIGKATAKYFFYSNIMNFFKTEITLANGEIRKRPLIETNGETGEIVWDKGRDFATVRKVLSMPQVNIVKKTEVQTGGFSKESILPKRNSDKLIARKKDWDPKKYGGFDSPTVAYSVLVVAKVEKGKSKKLKSVKELLGITIMERSSFEKNPIDFLEAKGYKEVKKDLIIKLPKYSLFELENGRKRMLASAGELQKGNELALPSKYVNFLYLASHYEKLKGSPEDNEQKQLFVEQHKHYLDEIIEQISEFSKRVILADANLDKVLSAYNKHRDKPIREQAENIIHLFTLTNLGAPAAFKYFDTTIDRKRYTSTKEVLDATLIHQSITGLYETRIDLSQLGGDGGPAPEAAAKGSSGGTLNIEDEYRLHETSKGPDVPLGSTWLSDFPQAWAETGGMGLAVRQAPLIIPLKATSTPVSIKQYPMSQEARLGIKPHIQRLLDQGILVPCQSPWNTPLLPVKKPGTNDYRPVQDLREVNKRVEDIHPTVPNPYNLLSGLPPSHQWYTVLDLKDAFFCLRLHPTSQSLFAFEWRDPEMGISGQLTWTRLPQGFKNSPTLFNEALHRDLADFRIQHPDLILLQYVDDLLLAATSELDCQQGTRALLQTLGDLGYRASAKKAQICQKQVKYLGYLLKEGQRWLTEARKETVMGQPTPKTPRQLREFLGKAGFCRLFIPGFAEMAAPLYPLTKPGTLFEWGPDQQKAYQEIKQALLTAPALGLPDLTKPFELFVDEKQGYAKGVLTQKLGPWRRPVAYLSKKLDPVAAGWPPCLRMVAAIAVLTKDAGKLTMGQPLVILAPHAVEALVKQPPDRWLSNARMTHYQALLLDTDRVQFGPIVALNPATLLPLPEEGLQHDCLDILAEAHGTRPDLTDQPLPDADHTWYTDGSSFLQEGQRKAGAAVTTETEVVWAKALPAGTSAQRAELIALTQALKMAEGKKLNVYTDSRYAFATAHIHGEIYRRRGWLTSEGKEIKNKDEILALLKALFLPKRLSIIHCPGHQKGNRAEARGNRMADQAAREVATRETPETSTLLAGKRTADGSEFEKRTADGSEFESPKKKAKVE

SEQ ID NO: 2515 - protein, 2096 aa, synthetic construct
MPAAKRVKLDGGDKKYSIGLDIGTNSVGWAVITDEYKVPSKKFKVLGNTDRHSIKKNLIGALLFDSGETAEATRLKRTARRRYTRRKNRICYLQEIFSNEMAKVDDSFFHRLEESFLVEEDKKHERHPIFGNIVDEVAYHEKYPTIYHLRKKLVDSTDKADLRLIYLALAHMIKFRGHFLIEGDLNPDNSDVDKLFIQLVQTYNQLFEENPINASGVDAKAILSARLSKSRRLENLIAQLPGEKKNGLFGNLIALSLGLTPNFKSNFDLAEDAKLQLSKDTYDDDLDNLLAQIGDQYADLFLAAKNLSDAILLSDILRVNTEITKAPLSASMIKRYDEHHQDLTLLKALVRQQLPEKYKEIFFDQSKNGYAGYIDGGASQEEFYKFIKPILEKMDGTEELLVKLNREDLLRKQRTFDNGSIPHQIHLGELHAILRRQEDFYPFLKDNREKIEKILTFRIPYYVGPLARGNSRFAWMTRKSEETITPWNFEEVVDKGASAQSFIERMTNFDKNLPNEKVLPKHSLLYEYFTVYNELTKVKYVTEGMRKPAFLSGEQKKAIVDLLFKTNRKVTVKQLKEDYFKKIECFDSVEISGVEDRFNASLGTYHDLLKIIKDKDFLDNEENEDILEDIVLTLTLFEDREMIEERLKTYAHLFDDKVMKQLKRRRYTGWGRLSRKLINGIRDKQSGKTILDFLKSDGFANRNFMQLIHDDSLTFKEDIQKAQVSGQGDSLHEHIANLAGSPAIKKGILQTVKVVDELVKVMGRHKPENIVIEMARENQTTQKGQKNSRERMKRIEEGIKELGSQILKEHPVENTQLQNEKLYLYYLQNGRDMYVDQELDINRLSDYDVDHIVPQSFLKDDSIDNKVLTRSDKARGKSDNVPSEEVVKKMKNYWRQLLNAKLITQRKFDNLTKAERGGLSELDKAGFIKRQLVETRQITKHVAQILDSRMNTKYDENDKLIREVKVITLKSKLVSDFRKDFQFYKVREINNYHHAHDAYLNAVVGTALIKKYPKLESEFVYGDYKVYDVRKMIAKSEQEIGKATAKYFFYSNIMNFFKTEITLANGEIRKRPLIETNGETGEIVWDKGRDFATVRKVLSMPQVNIVKKTEVQTGGFSKESILPKRNSDKLIARKKDWDPKKYGGFDSPTVAYSVLVVAKVEKGKSKKLKSVKELLGITIMERSSFEKNPIDFLEAKGYKEVKKDLIIKLPKYSLFELENGRKRMLASAGELQKGNELALPSKYVNFLYLASHYEKLKGSPEDNEQKQLFVEQHKHYLDEIIEQISEFSKRVILADANLDKVLSAYNKHRDKPIREQAENIIHLFTLTNLGAPAAFKYFDTTIDRKRYTSTKEVLDATLIHQSITGLYETRIDLSQLGGDGGGSSGGGEAAAKGGTLNIEDEYRLHETSKGPDVPLGSTWLSDFPQAWAETGGMGLAVRQAPLIIPLKATSTPVSIKQYPMSQEARLGIKPHIQRLLDQGILVPCQSPWNTPLLPVKKPGTNDYRPVQDLREVNKRVEDIHPTVPNPYNLLSGLPPSHQWYTVLDLKDAFFCLRLHPTSQSLFAFEWRDPEMGISGQLTWTRLPQGFKNSPTLFNEALHRDLADFRIQHPDLILLQYVDDLLLAATSELDCQQGTRALLQTLGDLGYRASAKKAQICQKQVKYLGYLLKEGQRWLTEARKETVMGQPTPKTPRQLREFLGKAGFCRLFIPGFAEMAAPLYPLTKPGTLFEWGPDQQKAYQEIKQALLTAPALGLPDLTKPFELFVDEKQGYAKGVLTQKLGPWRRPVAYLSKKLDPVAAGWPPCLRMVAAIAVLTKDAGKLTMGQPLVILAPHAVEALVKQPPDRWLSNARMTHYQALLLDTDRVQFGPIVALNPATLLPLPEEGLQHDCLDILAEAHGTRPDLTDQPLPDADHTWYTDGSSFLQEGQRKAGAAVTTETEVVWAKALPAGTSAQRAELIALTQALKMAEGKKLNVYTDSRYAFATAHIHGEIYRRRGWLTSEGKEIKNKDEILALLKALFLPKRLSIIHCPGHQKGNRAEARGNRMADQAAREVATRETPETSTLLAGKRTADGSEFEKRTADGSEFESPKKKAKVE

SEQ ID NO: 2516 - protein, 2100 aa, synthetic construct
MPAAKRVKLDGGDKKYSIGLDIGTNSVGWAVITDEYKVPSKKFKVLGNTDRHSIKKNLIGALLFDSGETAEATRLKRTARRRYTRRKNRICYLQEIFSNEMAKVDDSFFHRLEESFLVEEDKKHERHPIFGNIVDEVAYHEKYPTIYHLRKKLVDSTDKADLRLIYLALAHMIKFRGHFLIEGDLNPDNSDVDKLFIQLVQTYNQLFEENPINASGVDAKAILSARLSKSRRLENLIAQLPGEKKNGLFGNLIALSLGLTPNFKSNFDLAEDAKLQLSKDTYDDDLDNLLAQIGDQYADLFLAAKNLSDAILLSDILRVNTEITKAPLSASMIKRYDEHHQDLTLLKALVRQQLPEKYKEIFFDQSKNGYAGYIDGGASQEEFYKFIKPILEKMDGTEELLVKLNREDLLRKQRTFDNGSIPHQIHLGELHAILRRQEDFYPFLKDNREKIEKILTFRIPYYVGPLARGNSRFAWMTRKSEETITPWNFEEVVDKGASAQSFIERMTNFDKNLPNEKVLPKHSLLYEYFTVYNELTKVKYVTEGMRKPAFLSGEQKKAIVDLLFKTNRKVTVKQLKEDYFKKIECFDSVEISGVEDRFNASLGTYHDLLKIIKDKDFLDNEENEDILEDIVLTLTLFEDREMIEERLKTYAHLFDDKVMKQLKRRRYTGWGRLSRKLINGIRDKQSGKTILDFLKSDGFANRNFMQLIHDDSLTFKEDIQKAQVSGQGDSLHEHIANLAGSPAIKKGILQTVKVVDELVKVMGRHKPENIVIEMARENQTTQKGQKNSRERMKRIEEGIKELGSQILKEHPVENTQLQNEKLYLYYLQNGRDMYVDQELDINRLSDYDVDHIVPQSFLKDDSIDNKVLTRSDKARGKSDNVPSEEVVKKMKNYWRQLLNAKLITQRKFDNLTKAERGGLSELDKAGFIKRQLVETRQITKHVAQILDSRMNTKYDENDKLIREVKVITLKSKLVSDFRKDFQFYKVREINNYHHAHDAYLNAVVGTALIKKYPKLESEFVYGDYKVYDVRKMIAKSEQEIGKATAKYFFYSNIMNFFKTEITLANGEIRKRPLIETNGETGEIVWDKGRDFATVRKVLSMPQVNIVKKTEVQTGGFSKESILPKRNSDKLIARKKDWDPKKYGGFDSPTVAYSVLVVAKVEKGKSKKLKSVKELLGITIMERSSFEKNPIDFLEAKGYKEVKKDLIIKLPKYSLFELENGRKRMLASAGELQKGNELALPSKYVNFLYLASHYEKLKGSPEDNEQKQLFVEQHKHYLDEIIEQISEFSKRVILADANLDKVLSAYNKHRDKPIREQAENIIHLFTLTNLGAPAAFKYFDTTIDRKRYTSTKEVLDATLIHQSITGLYETRIDLSQLGGDGGGGGGSGGGGSGGGGSGGTLNIEDEYRLHETSKGPDVPLGSTWLSDFPQAWAETGGMGLAVRQAPLIIPLKATSTPVSIKQYPMSQEARLGIKPHIQRLLDQGILVPCQSPWNTPLLPVKKPGTNDYRPVQDLREVNKRVEDIHPTVPNPYNLLSGLPPSHQWYTVLDLKDAFFCLRLHPTSQSLFAFEWRDPEMGISGQLTWTRLPQGFKNSPTLFNEALHRDLADFRIQHPDLILLQYVDDLLLAATSELDCQQGTRALLQTLGDLGYRASAKKAQICQKQVKYLGYLLKEGQRWLTEARKETVMGQPTPKTPRQLREFLGKAGFCRLFIPGFAEMAAPLYPLTKPGTLFEWGPDQQKAYQEIKQALLTAPALGLPDLTKPFELFVDEKQGYAKGVLTQKLGPWRRPVAYLSKKLDPVAAGWPPCLRMVAAIAVLTKDAGKLTMGQPLVILAPHAVEALVKQPPDRWLSNARMTHYQALLLDTDRVQFGPIVALNPATLLPLPEEGLQHDCLDILAEAHGTRPDLTDQPLPDADHTWYTDGSSFLQEGQRKAGAAVTTETEVVWAKALPAGTSAQRAELIALTQALKMAEGKKLNVYTDSRYAFATAHIHGEIYRRRGWLTSEGKEIKNKDEILALLKALFLPKRLSIIHCPGHQKGNRAEARGNRMADQAAREVATRETPETSTLLAGKRTADGSEFEKRTADGSEFESPKKKAKVE

SEQ ID NO: 2517 - protein, 2093 aa, synthetic construct
MPAAKRVKLDGGDKKYSIGLDIGTNSVGWAVITDEYKVPSKKFKVLGNTDRHSIKKNLIGALLFDSGETAEATRLKRTARRRYTRRKNRICYLQEIFSNEMAKVDDSFFHRLEESFLVEEDKKHERHPIFGNIVDEVAYHEKYPTIYHLRKKLVDSTDKADLRLIYLALAHMIKFRGHFLIEGDLNPDNSDVDKLFIQLVQTYNQLFEENPINASGVDAKAILSARLSKSRRLENLIAQLPGEKKNGLFGNLIALSLGLTPNFKSNFDLAEDAKLQLSKDTYDDDLDNLLAQIGDQYADLFLAAKNLSDAILLSDILRVNTEITKAPLSASMIKRYDEHHQDLTLLKALVRQQLPEKYKEIFFDQSKNGYAGYIDGGASQEEFYKFIKPILEKMDGTEELLVKLNREDLLRKQRTFDNGSIPHQIHLGELHAILRRQEDFYPFLKDNREKIEKILTFRIPYYVGPLARGNSRFAWMTRKSEETITPWNFEEVVDKGASAQSFIERMTNFDKNLPNEKVLPKHSLLYEYFTVYNELTKVKYVTEGMRKPAFLSGEQKKAIVDLLFKTNRKVTVKQLKEDYFKKIECFDSVEISGVEDRFNASLGTYHDLLKIIKDKDFLDNEENEDILEDIVLTLTLFEDREMIEERLKTYAHLFDDKVMKQLKRRRYTGWGRLSRKLINGIRDKQSGKTILDFLKSDGFANRNFMQLIHDDSLTFKEDIQKAQVSGQGDSLHEHIANLAGSPAIKKGILQTVKVVDELVKVMGRHKPENIVIEMARENQTTQKGQKNSRERMKRIEEGIKELGSQILKEHPVENTQLQNEKLYLYYLQNGRDMYVDQELDINRLSDYDVDHIVPQSFLKDDSIDNKVLTRSDKARGKSDNVPSEEVVKKMKNYWRQLLNAKLITQRKFDNLTKAERGGLSELDKAGFIKRQLVETRQITKHVAQILDSRMNTKYDENDKLIREVKVITLKSKLVSDFRKDFQFYKVREINNYHHAHDAYLNAVVGTALIKKYPKLESEFVYGDYKVYDVRKMIAKSEQEIGKATAKYFFYSNIMNFFKTEITLANGEIRKRPLIETNGETGEIVWDKGRDFATVRKVLSMPQVNIVKKTEVQTGGFSKESILPKRNSDKLIARKKDWDPKKYGGFDSPTVAYSVLVVAKVEKGKSKKLKSVKELLGITIMERSSFEKNPIDFLEAKGYKEVKKDLIIKLPKYSLFELENGRKRMLASAGELQKGNELALPSKYVNFLYLASHYEKLKGSPEDNEQKQLFVEQHKHYLDEIIEQISEFSKRVILADANLDKVLSAYNKHRDKPIREQAENIIHLFTLTNLGAPAAFKYFDTTIDRKRYTSTKEVLDATLIHQSITGLYETRIDLSQLGGDGGEAAAKGGGGGTLNIEDEYRLHETSKGPDVPLGSTWLSDFPQAWAETGGMGLAVRQAPLIIPLKATSTPVSIKQYPMSQEARLGIKPHIQRLLDQGILVPCQSPWNTPLLPVKKPGTNDYRPVQDLREVNKRVEDIHPTVPNPYNLLSGLPPSHQWYTVLDLKDAFFCLRLHPTSQSLFAFEWRDPEMGISGQLTWTRLPQGFKNSPTLFNEALHRDLADFRIQHPDLILLQYVDDLLLAATSELDCQQGTRALLQTLGDLGYRASAKKAQICQKQVKYLGYLLKEGQRWLTEARKETVMGQPTPKTPRQLREFLGKAGFCRLFIPGFAEMAAPLYPLTKPGTLFEWGPDQQKAYQEIKQALLTAPALGLPDLTKPFELFVDEKQGYAKGVLTQKLGPWRRPVAYLSKKLDPVAAGWPPCLRMVAAIAVLTKDAGKLTMGQPLVILAPHAVEALVKQPPDRWLSNARMTHYQALLLDTDRVQFGPIVALNPATLLPLPEEGLQHDCLDILAEAHGTRPDLTDQPLPDADHTWYTDGSSFLQEGQRKAGAAVTTETEVVWAKALPAGTSAQRAELIALTQALKMAEGKKLNVYTDSRYAFATAHIHGEIYRRRGWLTSEGKEIKNKDEILALLKALFLPKRLSIIHCPGHQKGNRAEARGNRMADQAAREVATRETPETSTLLAGKRTADGSEFEKRTADGSEFESPKKKAKVE

SEQ ID NO: 2518 - protein, 2101 aa, synthetic construct
MPAAKRVKLDGGDKKYSIGLDIGTNSVGWAVITDEYKVPSKKFKVLGNTDRHSIKKNLIGALLFDSGETAEATRLKRTARRRYTRRKNRICYLQEIFSNEMAKVDDSFFHRLEESFLVEEDKKHERHPIFGNIVDEVAYHEKYPTIYHLRKKLVDSTDKADLRLIYLALAHMIKFRGHFLIEGDLNPDNSDVDKLFIQLVQTYNQLFEENPINASGVDAKAILSARLSKSRRLENLIAQLPGEKKNGLFGNLIALSLGLTPNFKSNFDLAEDAKLQLSKDTYDDDLDNLLAQIGDQYADLFLAAKNLSDAILLSDILRVNTEITKAPLSASMIKRYDEHHQDLTLLKALVRQQLPEKYKEIFFDQSKNGYAGYIDGGASQEEFYKFIKPILEKMDGTEELLVKLNREDLLRKQRTFDNGSIPHQIHLGELHAILRRQEDFYPFLKDNREKIEKILTFRIPYYVGPLARGNSRFAWMTRKSEETITPWNFEEVVDKGASAQSFIERMTNFDKNLPNEKVLPKHSLLYEYFTVYNELTKVKYVTEGMRKPAFLSGEQKKAIVDLLFKTNRKVTVKQLKEDYFKKIECFDSVEISGVEDRFNASLGTYHDLLKIIKDKDFLDNEENEDILEDIVLTLTLFEDREMIEERLKTYAHLFDDKVMKQLKRRRYTGWGRLSRKLINGIRDKQSGKTILDFLKSDGFANRNFMQLIHDDSLTFKEDIQKAQVSGQGDSLHEHIANLAGSPAIKKGILQTVKVVDELVKVMGRHKPENIVIEMARENQTTQKGQKNSRERMKRIEEGIKELGSQILKEHPVENTQLQNEKLYLYYLQNGRDMYVDQELDINRLSDYDVDHIVPQSFLKDDSIDNKVLTRSDKARGKSDNVPSEEVVKKMKNYWRQLLNAKLITQRKFDNLTKAERGGLSELDKAGFIKRQLVETRQITKHVAQILDSRMNTKYDENDKLIREVKVITLKSKLVSDFRKDFQFYKVREINNYHHAHDAYLNAVVGTALIKKYPKLESEFVYGDYKVYDVRKMIAKSEQEIGKATAKYFFYSNIMNFFKTEITLANGEIRKRPLIETNGETGEIVWDKGRDFATVRKVLSMPQVNIVKKTEVQTGGFSKESILPKRNSDKLIARKKDWDPKKYGGFDSPTVAYSVLVVAKVEKGKSKKLKSVKELLGITIMERSSFEKNPIDFLEAKGYKEVKKDLIIKLPKYSLFELENGRKRMLASAGELQKGNELALPSKYVNFLYLASHYEKLKGSPEDNEQKQLFVEQHKHYLDEIIEQISEFSKRVILADANLDKVLSAYNKHRDKPIREQAENIIHLFTLTNLGAPAAFKYFDTTIDRKRYTSTKEVLDATLIHQSITGLYETRIDLSQLGGDGGSGSETPGTSESATPESGGTLNIEDEYRLHETSKGPDVPLGSTWLSDFPQAWAETGGMGLAVRQAPLIIPLKATSTPVSIKQYPMSQEARLGIKPHIQRLLDQGILVPCQSPWNTPLLPVKKPGTNDYRPVQDLREVNKRVEDIHPTVPNPYNLLSGLPPSHQWYTVLDLKDAFFCLRLHPTSQSLFAFEWRDPEMGISGQLTWTRLPQGFKNSPTLFNEALHRDLADFRIQHPDLILLQYVDDLLLAATSELDCQQGTRALLQTLGDLGYRASAKKAQICQKQVKYLGYLLKEGQRWLTEARKETVMGQPTPKTPRQLREFLGKAGFCRLFIPGFAEMAAPLYPLTKPGTLFEWGPDQQKAYQEIKQALLTAPALGLPDLTKPFELFVDEKQGYAKGVLTQKLGPWRRPVAYLSKKLDPVAAGWPPCLRMVAAIAVLTKDAGKLTMGQPLVILAPHAVEALVKQPPDRWLSNARMTHYQALLLDTDRVQFGPIVALNPATLLPLPEEGLQHDCLDILAEAHGTRPDLTDQPLPDADHTWYTDGSSFLQEGQRKAGAAVTTETEVVWAKALPAGTSAQRAELIALTQALKMAEGKKLNVYTDSRYAFATAHIHGEIYRRRGWLTSEGKEIKNKDEILALLKALFLPKRLSIIHCPGHQKGNRAEARGNRMADQAAREVATRETPETSTLLAGKRTADGSEFEKRTADGSEFESPKKKAKVE

SEQ ID NO: 2519 - protein, 2096 aa, synthetic construct
MPAAKRVKLDGGDKKYSIGLDIGTNSVGWAVITDEYKVPSKKFKVLGNTDRHSIKKNLIGALLFDSGETAEATRLKRTARRRYTRRKNRICYLQEIFSNEMAKVDDSFFHRLEESFLVEEDKKHERHPIFGNIVDEVAYHEKYPTIYHLRKKLVDSTDKADLRLIYLALAHMIKFRGHFLIEGDLNPDNSDVDKLFIQLVQTYNQLFEENPINASGVDAKAILSARLSKSRRLENLIAQLPGEKKNGLFGNLIALSLGLTPNFKSNFDLAEDAKLQLSKDTYDDDLDNLLAQIGDQYADLFLAAKNLSDAILLSDILRVNTEITKAPLSASMIKRYDEHHQDLTLLKALVRQQLPEKYKEIFFDQSKNGYAGYIDGGASQEEFYKFIKPILEKMDGTEELLVKLNREDLLRKQRTFDNGSIPHQIHLGELHAILRRQEDFYPFLKDNREKIEKILTFRIPYYVGPLARGNSRFAWMTRKSEETITPWNFEEVVDKGASAQSFIERMTNFDKNLPNEKVLPKHSLLYEYFTVYNELTKVKYVTEGMRKPAFLSGEQKKAIVDLLFKTNRKVTVKQLKEDYFKKIECFDSVEISGVEDRFNASLGTYHDLLKIIKDKDFLDNEENEDILEDIVLTLTLFEDREMIEERLKTYAHLFDDKVMKQLKRRRYTGWGRLSRKLINGIRDKQSGKTILDFLKSDGFANRNFMQLIHDDSLTFKEDIQKAQVSGQGDSLHEHIANLAGSPAIKKGILQTVKVVDELVKVMGRHKPENIVIEMARENQTTQKGQKNSRERMKRIEEGIKELGSQILKEHPVENTQLQNEKLYLYYLQNGRDMYVDQELDINRLSDYDVDHIVPQSFLKDDSIDNKVLTRSDKARGKSDNVPSEEVVKKMKNYWRQLLNAKLITQRKFDNLTKAERGGLSELDKAGFIKRQLVETRQITKHVAQILDSRMNTKYDENDKLIREVKVITLKSKLVSDFRKDFQFYKVREINNYHHAHDAYLNAVVGTALIKKYPKLESEFVYGDYKVYDVRKMIAKSEQEIGKATAKYFFYSNIMNFFKTEITLANGEIRKRPLIETNGETGEIVWDKGRDFATVRKVLSMPQVNIVKKTEVQTGGFSKESILPKRNSDKLIARKKDWDPKKYGGFDSPTVAYSVLVVAKVEKGKSKKLKSVKELLGITIMERSSFEKNPIDFLEAKGYKEVKKDLIIKLPKYSLFELENGRKRMLASAGELQKGNELALPSKYVNFLYLASHYEKLKGSPEDNEQKQLFVEQHKHYLDEIIEQISEFSKRVILADANLDKVLSAYNKHRDKPIREQAENIIHLFTLTNLGAPAAFKYFDTTIDRKRYTSTKEVLDATLIHQSITGLYETRIDLSQLGGDGGEAAAKPAPGSSGGTLNIEDEYRLHETSKGPDVPLGSTWLSDFPQAWAETGGMGLAVRQAPLIIPLKATSTPVSIKQYPMSQEARLGIKPHIQRLLDQGILVPCQSPWNTPLLPVKKPGTNDYRPVQDLREVNKRVEDIHPTVPNPYNLLSGLPPSHQWYTVLDLKDAFFCLRLHPTSQSLFAFEWRDPEMGISGQLTWTRLPQGFKNSPTLFNEALHRDLADFRIQHPDLILLQYVDDLLLAATSELDCQQGTRALLQTLGDLGYRASAKKAQICQKQVKYLGYLLKEGQRWLTEARKETVMGQPTPKTPRQLREFLGKAGFCRLFIPGFAEMAAPLYPLTKPGTLFEWGPDQQKAYQEIKQALLTAPALGLPDLTKPFELFVDEKQGYAKGVLTQKLGPWRRPVAYLSKKLDPVAAGWPPCLRMVAAIAVLTKDAGKLTMGQPLVILAPHAVEALVKQPPDRWLSNARMTHYQALLLDTDRVQFGPIVALNPATLLPLPEEGLQHDCLDILAEAHGTRPDLTDQPLPDADHTWYTDGSSFLQEGQRKAGAAVTTETEVVWAKALPAGTSAQRAELIALTQALKMAEGKKLNVYTDSRYAFATAHIHGEIYRRRGWLTSEGKEIKNKDEILALLKALFLPKRLSIIHCPGHQKGNRAEARGNRMADQAAREVATRETPETSTLLAGKRTADGSEFEKRTADGSEFESPKKKAKVE

SEQ ID NO: 2520 - protein, 2091 aa, synthetic construct
MPAAKRVKLDGGDKKYSIGLDIGTNSVGWAVITDEYKVPSKKFKVLGNTDRHSIKKNLIGALLFDSGETAEATRLKRTARRRYTRRKNRICYLQEIFSNEMAKVDDSFFHRLEESFLVEEDKKHERHPIFGNIVDEVAYHEKYPTIYHLRKKLVDSTDKADLRLIYLALAHMIKFRGHFLIEGDLNPDNSDVDKLFIQLVQTYNQLFEENPINASGVDAKAILSARLSKSRRLENLIAQLPGEKKNGLFGNLIALSLGLTPNFKSNFDLAEDAKLQLSKDTYDDDLDNLLAQIGDQYADLFLAAKNLSDAILLSDILRVNTEITKAPLSASMIKRYDEHHQDLTLLKALVRQQLPEKYKEIFFDQSKNGYAGYIDGGASQEEFYKFIKPILEKMDGTEELLVKLNREDLLRKQRTFDNGSIPHQIHLGELHAILRRQEDFYPFLKDNREKIEKILTFRIPYYVGPLARGNSRFAWMTRKSEETITPWNFEEVVDKGASAQSFIERMTNFDKNLPNEKVLPKHSLLYEYFTVYNELTKVKYVTEGMRKPAFLSGEQKKAIVDLLFKTNRKVTVKQLKEDYFKKIECFDSVEISGVEDRFNASLGTYHDLLKIIKDKDFLDNEENEDILEDIVLTLTLFEDREMIEERLKTYAHLFDDKVMKQLKRRRYTGWGRLSRKLINGIRDKQSGKTILDFLKSDGFANRNFMQLIHDDSLTFKEDIQKAQVSGQGDSLHEHIANLAGSPAIKKGILQTVKVVDELVKVMGRHKPENIVIEMARENQTTQKGQKNSRERMKRIEEGIKELGSQILKEHPVENTQLQNEKLYLYYLQNGRDMYVDQELDINRLSDYDVDHIVPQSFLKDDSIDNKVLTRSDKARGKSDNVPSEEVVKKMKNYWRQLLNAKLITQRKFDNLTKAERGGLSELDKAGFIKRQLVETRQITKHVAQILDSRMNTKYDENDKLIREVKVITLKSKLVSDFRKDFQFYKVREINNYHHAHDAYLNAVVGTALIKKYPKLESEFVYGDYKVYDVRKMIAKSEQEIGKATAKYFFYSNIMNFFKTEITLANGEIRKRPLIETNGETGEIVWDKGRDFATVRKVLSMPQVNIVKKTEVQTGGFSKESILPKRNSDKLIARKKDWDPKKYGGFDSPTVAYSVLVVAKVEKGKSKKLKSVKELLGITIMERSSFEKNPIDFLEAKGYKEVKKDLIIKLPKYSLFELENGRKRMLASAGELQKGNELALPSKYVNFLYLASHYEKLKGSPEDNEQKQLFVEQHKHYLDEIIEQISEFSKRVILADANLDKVLSAYNKHRDKPIREQAENIIHLFTLTNLGAPAAFKYFDTTIDRKRYTSTKEVLDATLIHQSITGLYETRIDLSQLGGDGGGSSGSSGGTLNIEDEYRLHETSKGPDVPLGSTWLSDFPQAWAETGGMGLAVRQAPLIIPLKATSTPVSIKQYPMSQEARLGIKPHIQRLLDQGILVPCQSPWNTPLLPVKKPGTNDYRPVQDLREVNKRVEDIHPTVPNPYNLLSGLPPSHQWYTVLDLKDAFFCLRLHPTSQSLFAFEWRDPEMGISGQLTWTRLPQGFKNSPTLFNEALHRDLADFRIQHPDLILLQYVDDLLLAATSELDCQQGTRALLQTLGDLGYRASAKKAQICQKQVKYLGYLLKEGQRWLTEARKETVMGQPTPKTPRQLREFLGKAGFCRLFIPGFAEMAAPLYPLTKPGTLFEWGPDQQKAYQEIKQALLTAPALGLPDLTKPFELFVDEKQGYAKGVLTQKLGPWRRPVAYLSKKLDPVAAGWPPCLRMVAAIAVLTKDAGKLTMGQPLVILAPHAVEALVKQPPDRWLSNARMTHYQALLLDTDRVQFGPIVALNPATLLPLPEEGLQHDCLDILAEAHGTRPDLTDQPLPDADHTWYTDGSSFLQEGQRKAGAAVTTETEVVWAKALPAGTSAQRAELIALTQALKMAEGKKLNVYTDSRYAFATAHIHGEIYRRRGWLTSEGKEIKNKDEILALLKALFLPKRLSIIHCPGHQKGNRAEARGNRMADQAAREVATRETPETSTLLAGKRTADGSEFEKRTADGSEFESPKKKAKVE

SEQ ID NO: 2521 - protein, 2096 aa, synthetic construct
MPAAKRVKLDGGDKKYSIGLDIGTNSVGWAVITDEYKVPSKKFKVLGNTDRHSIKKNLIGALLFDSGETAEATRLKRTARRRYTRRKNRICYLQEIFSNEMAKVDDSFFHRLEESFLVEEDKKHERHPIFGNIVDEVAYHEKYPTIYHLRKKLVDSTDKADLRLIYLALAHMIKFRGHFLIEGDLNPDNSDVDKLFIQLVQTYNQLFEENPINASGVDAKAILSARLSKSRRLENLIAQLPGEKKNGLFGNLIALSLGLTPNFKSNFDLAEDAKLQLSKDTYDDDLDNLLAQIGDQYADLFLAAKNLSDAILLSDILRVNTEITKAPLSASMIKRYDEHHQDLTLLKALVRQQLPEKYKEIFFDQSKNGYAGYIDGGASQEEFYKFIKPILEKMDGTEELLVKLNREDLLRKQRTFDNGSIPHQIHLGELHAILRRQEDFYPFLKDNREKIEKILTFRIPYYVGPLARGNSRFAWMTRKSEETITPWNFEEVVDKGASAQSFIERMTNFDKNLPNEKVLPKHSLLYEYFTVYNELTKVKYVTEGMRKPAFLSGEQKKAIVDLLFKTNRKVTVKQLKEDYFKKIECFDSVEISGVEDRFNASLGTYHDLLKIIKDKDFLDNEENEDILEDIVLTLTLFEDREMIEERLKTYAHLFDDKVMKQLKRRRYTGWGRLSRKLINGIRDKQSGKTILDFLKSDGFANRNFMQLIHDDSLTFKEDIQKAQVSGQGDSLHEHIANLAGSPAIKKGILQTVKVVDELVKVMGRHKPENIVIEMARENQTTQKGQKNSRERMKRIEEGIKELGSQILKEHPVENTQLQNEKLYLYYLQNGRDMYVDQELDINRLSDYDVDHIVPQSFLKDDSIDNKVLTRSDKARGKSDNVPSEEVVKKMKNYWRQLLNAKLITQRKFDNLTKAERGGLSELDKAGFIKRQLVETRQITKHVAQILDSRMNTKYDENDKLIREVKVITLKSKLVSDFRKDFQFYKVREINNYHHAHDAYLNAVVGTALIKKYPKLESEFVYGDYKVYDVRKMIAKSEQEIGKATAKYFFYSNIMNFFKTEITLANGEIRKRPLIETNGETGEIVWDKGRDFATVRKVLSMPQVNIVKKTEVQTGGFSKESILPKRNSDKLIARKKDWDPKKYGGFDSPTVAYSVLVVAKVEKGKSKKLKSVKELLGITIMERSSFEKNPIDFLEAKGYKEVKKDLIIKLPKYSLFELENGRKRMLASAGELQKGNELALPSKYVNFLYLASHYEKLKGSPEDNEQKQLFVEQHKHYLDEIIEQISEFSKRVILADANLDKVLSAYNKHRDKPIREQAENIIHLFTLTNLGAPAAFKYFDTTIDRKRYTSTKEVLDATLIHQSITGLYETRIDLSQLGGDGGGGGEAAAKGGSGGTLNIEDEYRLHETSKGPDVPLGSTWLSDFPQAWAETGGMGLAVRQAPLIIPLKATSTPVSIKQYPMSQEARLGIKPHIQRLLDQGILVPCQSPWNTPLLPVKKPGTNDYRPVQDLREVNKRVEDIHPTVPNPYNLLSGLPPSHQWYTVLDLKDAFFCLRLHPTSQSLFAFEWRDPEMGISGQLTWTRLPQGFKNSPTLFNEALHRDLADFRIQHPDLILLQYVDDLLLAATSELDCQQGTRALLQTLGDLGYRASAKKAQICQKQVKYLGYLLKEGQRWLTEARKETVMGQPTPKTPRQLREFLGKAGFCRLFIPGFAEMAAPLYPLTKPGTLFEWGPDQQKAYQEIKQALLTAPALGLPDLTKPFELFVDEKQGYAKGVLTQKLGPWRRPVAYLSKKLDPVAAGWPPCLRMVAAIAVLTKDAGKLTMGQPLVILAPHAVEALVKQPPDRWLSNARMTHYQALLLDTDRVQFGPIVALNPATLLPLPEEGLQHDCLDILAEAHGTRPDLTDQPLPDADHTWYTDGSSFLQEGQRKAGAAVTTETEVVWAKALPAGTSAQRAELIALTQALKMAEGKKLNVYTDSRYAFATAHIHGEIYRRRGWLTSEGKEIKNKDEILALLKALFLPKRLSIIHCPGHQKGNRAEARGNRMADQAAREVATRETPETSTLLAGKRTADGSEFEKRTADGSEFESPKKKAKVE

SEQ ID NO: 2522 - protein, 2105 aa, synthetic construct
MPAAKRVKLDGGDKKYSIGLDIGTNSVGWAVITDEYKVPSKKFKVLGNTDRHSIKKNLIGALLFDSGETAEATRLKRTARRRYTRRKNRICYLQEIFSNEMAKVDDSFFHRLEESFLVEEDKKHERHPIFGNIVDEVAYHEKYPTIYHLRKKLVDSTDKADLRLIYLALAHMIKFRGHFLIEGDLNPDNSDVDKLFIQLVQTYNQLFEENPINASGVDAKAILSARLSKSRRLENLIAQLPGEKKNGLFGNLIALSLGLTPNFKSNFDLAEDAKLQLSKDTYDDDLDNLLAQIGDQYADLFLAAKNLSDAILLSDILRVNTEITKAPLSASMIKRYDEHHQDLTLLKALVRQQLPEKYKEIFFDQSKNGYAGYIDGGASQEEFYKFIKPILEKMDGTEELLVKLNREDLLRKQRTFDNGSIPHQIHLGELHAILRRQEDFYPFLKDNREKIEKILTFRIPYYVGPLARGNSRFAWMTRKSEETITPWNFEEVVDKGASAQSFIERMTNFDKNLPNEKVLPKHSLLYEYFTVYNELTKVKYVTEGMRKPAFLSGEQKKAIVDLLFKTNRKVTVKQLKEDYFKKIECFDSVEISGVEDRFNASLGTYHDLLKIIKDKDFLDNEENEDILEDIVLTLTLFEDREMIEERLKTYAHLFDDKVMKQLKRRRYTGWGRLSRKLINGIRDKQSGKTILDFLKSDGFANRNFMQLIHDDSLTFKEDIQKAQVSGQGDSLHEHIANLAGSPAIKKGILQTVKVVDELVKVMGRHKPENIVIEMARENQTTQKGQKNSRERMKRIEEGIKELGSQILKEHPVENTQLQNEKLYLYYLQNGRDMYVDQELDINRLSDYDVDHIVPQSFLKDDSIDNKVLTRSDKARGKSDNVPSEEVVKKMKNYWRQLLNAKLITQRKFDNLTKAERGGLSELDKAGFIKRQLVETRQITKHVAQILDSRMNTKYDENDKLIREVKVITLKSKLVSDFRKDFQFYKVREINNYHHAHDAYLNAVVGTALIKKYPKLESEFVYGDYKVYDVRKMIAKSEQEIGKATAKYFFYSNIMNFFKTEITLANGEIRKRPLIETNGETGEIVWDKGRDFATVRKVLSMPQVNIVKKTEVQTGGFSKESILPKRNSDKLIARKKDWDPKKYGGFDSPTVAYSVLVVAKVEKGKSKKLKSVKELLGITIMERSSFEKNPIDFLEAKGYKEVKKDLIIKLPKYSLFELENGRKRMLASAGELQKGNELALPSKYVNFLYLASHYEKLKGSPEDNEQKQLFVEQHKHYLDEIIEQISEFSKRVILADANLDKVLSAYNKHRDKPIREQAENIIHLFTLTNLGAPAAFKYFDTTIDRKRYTSTKEVLDATLIHQSITGLYETRIDLSQLGGDGGEAAAKEAAAKEAAAKEAAAKGGTLNIEDEYRLHETSKGPDVPLGSTWLSDFPQAWAETGGMGLAVRQAPLIIPLKATSTPVSIKQYPMSQEARLGIKPHIQRLLDQGILVPCQSPWNTPLLPVKKPGTNDYRPVQDLREVNKRVEDIHPTVPNPYNLLSGLPPSHQWYTVLDLKDAFFCLRLHPTSQSLFAFEWRDPEMGISGQLTWTRLPQGFKNSPTLFNEALHRDLADFRIQHPDLILLQYVDDLLLAATSELDCQQGTRALLQTLGDLGYRASAKKAQICQKQVKYLGYLLKEGQRWLTEARKETVMGQPTPKTPRQLREFLGKAGFCRLFIPGFAEMAAPLYPLTKPGTLFEWGPDQQKAYQEIKQALLTAPALGLPDLTKPFELFVDEKQGYAKGVLTQKLGPWRRPVAYLSKKLDPVAAGWPPCLRMVAAIAVLTKDAGKLTMGQPLVILAPHAVEALVKQPPDRWLSNARMTHYQALLLDTDRVQFGPIVALNPATLLPLPEEGLQHDCLDILAEAHGTRPDLTDQPLPDADHTWYTDGSSFLQEGQRKAGAAVTTETEVVWAKALPAGTSAQRAELIALTQALKMAEGKKLNVYTDSRYAFATAHIHGEIYRRRGWLTSEGKEIKNKDEILALLKALFLPKRLSIIHCPGHQKGNRAEARGNRMADQAAREVATRETPETSTLLAGKRTADGSEFEKRTADGSEFESPKKKAKVE

SEQ ID NO: 2523 - protein, 2094 aa, synthetic construct
MPAAKRVKLDGGDKKYSIGLDIGTNSVGWAVITDEYKVPSKKFKVLGNTDRHSIKKNLIGALLFDSGETAEATRLKRTARRRYTRRKNRICYLQEIFSNEMAKVDDSFFHRLEESFLVEEDKKHERHPIFGNIVDEVAYHEKYPTIYHLRKKLVDSTDKADLRLIYLALAHMIKFRGHFLIEGDLNPDNSDVDKLFIQLVQTYNQLFEENPINASGVDAKAILSARLSKSRRLENLIAQLPGEKKNGLFGNLIALSLGLTPNFKSNFDLAEDAKLQLSKDTYDDDLDNLLAQIGDQYADLFLAAKNLSDAILLSDILRVNTEITKAPLSASMIKRYDEHHQDLTLLKALVRQQLPEKYKEIFFDQSKNGYAGYIDGGASQEEFYKFIKPILEKMDGTEELLVKLNREDLLRKQRTFDNGSIPHQIHLGELHAILRRQEDFYPFLKDNREKIEKILTFRIPYYVGPLARGNSRFAWMTRKSEETITPWNFEEVVDKGASAQSFIERMTNFDKNLPNEKVLPKHSLLYEYFTVYNELTKVKYVTEGMRKPAFLSGEQKKAIVDLLFKTNRKVTVKQLKEDYFKKIECFDSVEISGVEDRFNASLGTYHDLLKIIKDKDFLDNEENEDILEDIVLTLTLFEDREMIEERLKTYAHLFDDKVMKQLKRRRYTGWGRLSRKLINGIRDKQSGKTILDFLKSDGFANRNFMQLIHDDSLTFKEDIQKAQVSGQGDSLHEHIANLAGSPAIKKGILQTVKVVDELVKVMGRHKPENIVIEMARENQTTQKGQKNSRERMKRIEEGIKELGSQILKEHPVENTQLQNEKLYLYYLQNGRDMYVDQELDINRLSDYDVDHIVPQSFLKDDSIDNKVLTRSDKARGKSDNVPSEEVVKKMKNYWRQLLNAKLITQRKFDNLTKAERGGLSELDKAGFIKRQLVETRQITKHVAQILDSRMNTKYDENDKLIREVKVITLKSKLVSDFRKDFQFYKVREINNYHHAHDAYLNAVVGTALIKKYPKLESEFVYGDYKVYDVRKMIAKSEQEIGKATAKYFFYSNIMNFFKTEITLANGEIRKRPLIETNGETGEIVWDKGRDFATVRKVLSMPQVNIVKKTEVQTGGFSKESILPKRNSDKLIARKKDWDPKKYGGFDSPTVAYSVLVVAKVEKGKSKKLKSVKELLGITIMERSSFEKNPIDFLEAKGYKEVKKDLIIKLPKYSLFELENGRKRMLASAGELQKGNELALPSKYVNFLYLASHYEKLKGSPEDNEQKQLFVEQHKHYLDEIIEQISEFSKRVILADANLDKVLSAYNKHRDKPIREQAENIIHLFTLTNLGAPAAFKYFDTTIDRKRYTSTKEVLDATLIHQSITGLYETRIDLSQLGGDGGGGSGGSGGSGGTLNIEDEYRLHETSKGPDVPLGSTWLSDFPQAWAETGGMGLAVRQAPLIIPLKATSTPVSIKQYPMSQEARLGIKPHIQRLLDQGILVPCQSPWNTPLLPVKKPGTNDYRPVQDLREVNKRVEDIHPTVPNPYNLLSGLPPSHQWYTVLDLKDAFFCLRLHPTSQSLFAFEWRDPEMGISGQLTWTRLPQGFKNSPTLFNEALHRDLADFRIQHPDLILLQYVDDLLLAATSELDCQQGTRALLQTLGDLGYRASAKKAQICQKQVKYLGYLLKEGQRWLTEARKETVMGQPTPKTPRQLREFLGKAGFCRLFIPGFAEMAAPLYPLTKPGTLFEWGPDQQKAYQEIKQALLTAPALGLPDLTKPFELFVDEKQGYAKGVLTQKLGPWRRPVAYLSKKLDPVAAGWPPCLRMVAAIAVLTKDAGKLTMGQPLVILAPHAVEALVKQPPDRWLSNARMTHYQALLLDTDRVQFGPIVALNPATLLPLPEEGLQHDCLDILAEAHGTRPDLTDQPLPDADHTWYTDGSSFLQEGQRKAGAAVTTETEVVWAKALPAGTSAQRAELIALTQALKMAEGKKLNVYTDSRYAFATAHIHGEIYRRRGWLTSEGKEIKNKDEILALLKALFLPKRLSIIHCPGHQKGNRAEARGNRMADQAAREVATRETPETSTLLAGKRTADGSEFEKRTADGSEFESPKKKAKVE

SEQ ID NO: 2524 - protein, 2088 aa, synthetic construct
MPAAKRVKLDGGDKKYSIGLDIGTNSVGWAVITDEYKVPSKKFKVLGNTDRHSIKKNLIGALLFDSGETAEATRLKRTARRRYTRRKNRICYLQEIFSNEMAKVDDSFFHRLEESFLVEEDKKHERHPIFGNIVDEVAYHEKYPTIYHLRKKLVDSTDKADLRLIYLALAHMIKFRGHFLIEGDLNPDNSDVDKLFIQLVQTYNQLFEENPINASGVDAKAILSARLSKSRRLENLIAQLPGEKKNGLFGNLIALSLGLTPNFKSNFDLAEDAKLQLSKDTYDDDLDNLLAQIGDQYADLFLAAKNLSDAILLSDILRVNTEITKAPLSASMIKRYDEHHQDLTLLKALVRQQLPEKYKEIFFDQSKNGYAGYIDGGASQEEFYKFIKPILEKMDGTEELLVKLNREDLLRKQRTFDNGSIPHQIHLGELHAILRRQEDFYPFLKDNREKIEKILTFRIPYYVGPLARGNSRFAWMTRKSEETITPWNFEEVVDKGASAQSFIERMTNFDKNLPNEKVLPKHSLLYEYFTVYNELTKVKYVTEGMRKPAFLSGEQKKAIVDLLFKTNRKVTVKQLKEDYFKKIECFDSVEISGVEDRFNASLGTYHDLLKIIKDKDFLDNEENEDILEDIVLTLTLFEDREMIEERLKTYAHLFDDKVMKQLKRRRYTGWGRLSRKLINGIRDKQSGKTILDFLKSDGFANRNFMQLIHDDSLTFKEDIQKAQVSGQGDSLHEHIANLAGSPAIKKGILQTVKVVDELVKVMGRHKPENIVIEMARENQTTQKGQKNSRERMKRIEEGIKELGSQILKEHPVENTQLQNEKLYLYYLQNGRDMYVDQELDINRLSDYDVDHIVPQSFLKDDSIDNKVLTRSDKARGKSDNVPSEEVVKKMKNYWRQLLNAKLITQRKFDNLTKAERGGLSELDKAGFIKRQLVETRQITKHVAQILDSRMNTKYDENDKLIREVKVITLKSKLVSDFRKDFQFYKVREINNYHHAHDAYLNAVVGTALIKKYPKLESEFVYGDYKVYDVRKMIAKSEQEIGKATAKYFFYSNIMNFFKTEITLANGEIRKRPLIETNGETGEIVWDKGRDFATVRKVLSMPQVNIVKKTEVQTGGFSKESILPKRNSDKLIARKKDWDPKKYGGFDSPTVAYSVLVVAKVEKGKSKKLKSVKELLGITIMERSSFEKNPIDFLEAKGYKEVKKDLIIKLPKYSLFELENGRKRMLASAGELQKGNELALPSKYVNFLYLASHYEKLKGSPEDNEQKQLFVEQHKHYLDEIIEQISEFSKRVILADANLDKVLSAYNKHRDKPIREQAENIIHLFTLTNLGAPAAFKYFDTTIDRKRYTSTKEVLDATLIHQSITGLYETRIDLSQLGGDGGPAPGGTLNIEDEYRLHETSKGPDVPLGSTWLSDFPQAWAETGGMGLAVRQAPLIIPLKATSTPVSIKQYPMSQEARLGIKPHIQRLLDQGILVPCQSPWNTPLLPVKKPGTNDYRPVQDLREVNKRVEDIHPTVPNPYNLLSGLPPSHQWYTVLDLKDAFFCLRLHPTSQSLFAFEWRDPEMGISGQLTWTRLPQGFKNSPTLFNEALHRDLADFRIQHPDLILLQYVDDLLLAATSELDCQQGTRALLQTLGDLGYRASAKKAQICQKQVKYLGYLLKEGQRWLTEARKETVMGQPTPKTPRQLREFLGKAGFCRLFIPGFAEMAAPLYPLTKPGTLFEWGPDQQKAYQEIKQALLTAPALGLPDLTKPFELFVDEKQGYAKGVLTQKLGPWRRPVAYLSKKLDPVAAGWPPCLRMVAAIAVLTKDAGKLTMGQPLVILAPHAVEALVKQPPDRWLSNARMTHYQALLLDTDRVQFGPIVALNPATLLPLPEEGLQHDCLDILAEAHGTRPDLTDQPLPDADHTWYTDGSSFLQEGQRKAGAAVTTETEVVWAKALPAGTSAQRAELIALTQALKMAEGKKLNVYTDSRYAFATAHIHGEIYRRRGWLTSEGKEIKNKDEILALLKALFLPKRLSIIHCPGHQKGNRAEARGNRMADQAAREVATRETPETSTLLAGKRTADGSEFEKRTADGSEFESPKKKAKVE

SEQ ID NO: 2525 - protein, 2094 aa, synthetic construct
MPAAKRVKLDGGDKKYSIGLDIGTNSVGWAVITDEYKVPSKKFKVLGNTDRHSIKKNLIGALLFDSGETAEATRLKRTARRRYTRRKNRICYLQEIFSNEMAKVDDSFFHRLEESFLVEEDKKHERHPIFGNIVDEVAYHEKYPTIYHLRKKLVDSTDKADLRLIYLALAHMIKFRGHFLIEGDLNPDNSDVDKLFIQLVQTYNQLFEENPINASGVDAKAILSARLSKSRRLENLIAQLPGEKKNGLFGNLIALSLGLTPNFKSNFDLAEDAKLQLSKDTYDDDLDNLLAQIGDQYADLFLAAKNLSDAILLSDILRVNTEITKAPLSASMIKRYDEHHQDLTLLKALVRQQLPEKYKEIFFDQSKNGYAGYIDGGASQEEFYKFIKPILEKMDGTEELLVKLNREDLLRKQRTFDNGSIPHQIHLGELHAILRRQEDFYPFLKDNREKIEKILTFRIPYYVGPLARGNSRFAWMTRKSEETITPWNFEEVVDKGASAQSFIERMTNFDKNLPNEKVLPKHSLLYEYFTVYNELTKVKYVTEGMRKPAFLSGEQKKAIVDLLFKTNRKVTVKQLKEDYFKKIECFDSVEISGVEDRFNASLGTYHDLLKIIKDKDFLDNEENEDILEDIVLTLTLFEDREMIEERLKTYAHLFDDKVMKQLKRRRYTGWGRLSRKLINGIRDKQSGKTILDFLKSDGFANRNFMQLIHDDSLTFKEDIQKAQVSGQGDSLHEHIANLAGSPAIKKGILQTVKVVDELVKVMGRHKPENIVIEMARENQTTQKGQKNSRERMKRIEEGIKELGSQILKEHPVENTQLQNEKLYLYYLQNGRDMYVDQELDINRLSDYDVDHIVPQSFLKDDSIDNKVLTRSDKARGKSDNVPSEEVVKKMKNYWRQLLNAKLITQRKFDNLTKAERGGLSELDKAGFIKRQLVETRQITKHVAQILDSRMNTKYDENDKLIREVKVITLKSKLVSDFRKDFQFYKVREINNYHHAHDAYLNAVVGTALIKKYPKLESEFVYGDYKVYDVRKMIAKSEQEIGKATAKYFFYSNIMNFFKTEITLANGEIRKRPLIETNGETGEIVWDKGRDFATVRKVLSMPQVNIVKKTEVQTGGFSKESILPKRNSDKLIARKKDWDPKKYGGFDSPTVAYSVLVVAKVEKGKSKKLKSVKELLGITIMERSSFEKNPIDFLEAKGYKEVKKDLIIKLPKYSLFELENGRKRMLASAGELQKGNELALPSKYVNFLYLASHYEKLKGSPEDNEQKQLFVEQHKHYLDEIIEQISEFSKRVILADANLDKVLSAYNKHRDKPIREQAENIIHLFTLTNLGAPAAFKYFDTTIDRKRYTSTKEVLDATLIHQSITGLYETRIDLSQLGGDGGPAPAPAPAPGGTLNIEDEYRLHETSKGPDVPLGSTWLSDFPQAWAETGGMGLAVRQAPLIIPLKATSTPVSIKQYPMSQEARLGIKPHIQRLLDQGILVPCQSPWNTPLLPVKKPGTNDYRPVQDLREVNKRVEDIHPTVPNPYNLLSGLPPSHQWYTVLDLKDAFFCLRLHPTSQSLFAFEWRDPEMGISGQLTWTRLPQGFKNSPTLFNEALHRDLADFRIQHPDLILLQYVDDLLLAATSELDCQQGTRALLQTLGDLGYRASAKKAQICQKQVKYLGYLLKEGQRWLTEARKETVMGQPTPKTPRQLREFLGKAGFCRLFIPGFAEMAAPLYPLTKPGTLFEWGPDQQKAYQEIKQALLTAPALGLPDLTKPFELFVDEKQGYAKGVLTQKLGPWRRPVAYLSKKLDPVAAGWPPCLRMVAAIAVLTKDAGKLTMGQPLVILAPHAVEALVKQPPDRWLSNARMTHYQALLLDTDRVQFGPIVALNPATLLPLPEEGLQHDCLDILAEAHGTRPDLTDQPLPDADHTWYTDGSSFLQEGQRKAGAAVTTETEVVWAKALPAGTSAQRAELIALTQALKMAEGKKLNVYTDSRYAFATAHIHGEIYRRRGWLTSEGKEIKNKDEILALLKALFLPKRLSIIHCPGHQKGNRAEARGNRMADQAAREVATRETPETSTLLAGKRTADGSEFEKRTADGSEFESPKKKAKVE

SEQ ID NO: 2526 - protein, 2096 aa, synthetic construct
MPAAKRVKLDGGDKKYSIGLDIGTNSVGWAVITDEYKVPSKKFKVLGNTDRHSIKKNLIGALLFDSGETAEATRLKRTARRRYTRRKNRICYLQEIFSNEMAKVDDSFFHRLEESFLVEEDKKHERHPIFGNIVDEVAYHEKYPTIYHLRKKLVDSTDKADLRLIYLALAHMIKFRGHFLIEGDLNPDNSDVDKLFIQLVQTYNQLFEENPINASGVDAKAILSARLSKSRRLENLIAQLPGEKKNGLFGNLIALSLGLTPNFKSNFDLAEDAKLQLSKDTYDDDLDNLLAQIGDQYADLFLAAKNLSDAILLSDILRVNTEITKAPLSASMIKRYDEHHQDLTLLKALVRQQLPEKYKEIFFDQSKNGYAGYIDGGASQEEFYKFIKPILEKMDGTEELLVKLNREDLLRKQRTFDNGSIPHQIHLGELHAILRRQEDFYPFLKDNREKIEKILTFRIPYYVGPLARGNSRFAWMTRKSEETITPWNFEEVVDKGASAQSFIERMTNFDKNLPNEKVLPKHSLLYEYFTVYNELTKVKYVTEGMRKPAFLSGEQKKAIVDLLFKTNRKVTVKQLKEDYFKKIECFDSVEISGVEDRFNASLGTYHDLLKIIKDKDFLDNEENEDILEDIVLTLTLFEDREMIEERLKTYAHLFDDKVMKQLKRRRYTGWGRLSRKLINGIRDKQSGKTILDFLKSDGFANRNFMQLIHDDSLTFKEDIQKAQVSGQGDSLHEHIANLAGSPAIKKGILQTVKVVDELVKVMGRHKPENIVIEMARENQTTQKGQKNSRERMKRIEEGIKELGSQILKEHPVENTQLQNEKLYLYYLQNGRDMYVDQELDINRLSDYDVDHIVPQSFLKDDSIDNKVLTRSDKARGKSDNVPSEEVVKKMKNYWRQLLNAKLITQRKFDNLTKAERGGLSELDKAGFIKRQLVETRQITKHVAQILDSRMNTKYDENDKLIREVKVITLKSKLVSDFRKDFQFYKVREINNYHHAHDAYLNAVVGTALIKKYPKLESEFVYGDYKVYDVRKMIAKSEQEIGKATAKYFFYSNIMNFFKTEITLANGEIRKRPLIETNGETGEIVWDKGRDFATVRKVLSMPQVNIVKKTEVQTGGFSKESILPKRNSDKLIARKKDWDPKKYGGFDSPTVAYSVLVVAKVEKGKSKKLKSVKELLGITIMERSSFEKNPIDFLEAKGYKEVKKDLIIKLPKYSLFELENGRKRMLASAGELQKGNELALPSKYVNFLYLASHYEKLKGSPEDNEQKQLFVEQHKHYLDEIIEQISEFSKRVILADANLDKVLSAYNKHRDKPIREQAENIIHLFTLTNLGAPAAFKYFDTTIDRKRYTSTKEVLDATLIHQSITGLYETRIDLSQLGGDGGGGGEAAAKPAPGGTLNIEDEYRLHETSKGPDVPLGSTWLSDFPQAWAETGGMGLAVRQAPLIIPLKATSTPVSIKQYPMSQEARLGIKPHIQRLLDQGILVPCQSPWNTPLLPVKKPGTNDYRPVQDLREVNKRVEDIHPTVPNPYNLLSGLPPSHQWYTVLDLKDAFFCLRLHPTSQSLFAFEWRDPEMGISGQLTWTRLPQGFKNSPTLFNEALHRDLADFRIQHPDLILLQYVDDLLLAATSELDCQQGTRALLQTLGDLGYRASAKKAQICQKQVKYLGYLLKEGQRWLTEARKETVMGQPTPKTPRQLREFLGKAGFCRLFIPGFAEMAAPLYPLTKPGTLFEWGPDQQKAYQEIKQALLTAPALGLPDLTKPFELFVDEKQGYAKGVLTQKLGPWRRPVAYLSKKLDPVAAGWPPCLRMVAAIAVLTKDAGKLTMGQPLVILAPHAVEALVKQPPDRWLSNARMTHYQALLLDTDRVQFGPIVALNPATLLPLPEEGLQHDCLDILAEAHGTRPDLTDQPLPDADHTWYTDGSSFLQEGQRKAGAAVTTETEVVWAKALPAGTSAQRAELIALTQALKMAEGKKLNVYTDSRYAFATAHIHGEIYRRRGWLTSEGKEIKNKDEILALLKALFLPKRLSIIHCPGHQKGNRAEARGNRMADQAAREVATRETPETSTLLAGKRTADGSEFEKRTADGSEFESPKKKAKVE

SEQ ID NO: 2527 - protein, 2096 aa, synthetic construct
MPAAKRVKLDGGDKKYSIGLDIGTNSVGWAVITDEYKVPSKKFKVLGNTDRHSIKKNLIGALLFDSGETAEATRLKRTARRRYTRRKNRICYLQEIFSNEMAKVDDSFFHRLEESFLVEEDKKHERHPIFGNIVDEVAYHEKYPTIYHLRKKLVDSTDKADLRLIYLALAHMIKFRGHFLIEGDLNPDNSDVDKLFIQLVQTYNQLFEENPINASGVDAKAILSARLSKSRRLENLIAQLPGEKKNGLFGNLIALSLGLTPNFKSNFDLAEDAKLQLSKDTYDDDLDNLLAQIGDQYADLFLAAKNLSDAILLSDILRVNTEITKAPLSASMIKRYDEHHQDLTLLKALVRQQLPEKYKEIFFDQSKNGYAGYIDGGASQEEFYKFIKPILEKMDGTEELLVKLNREDLLRKQRTFDNGSIPHQIHLGELHAILRRQEDFYPFLKDNREKIEKILTFRIPYYVGPLARGNSRFAWMTRKSEETITPWNFEEVVDKGASAQSFIERMTNFDKNLPNEKVLPKHSLLYEYFTVYNELTKVKYVTEGMRKPAFLSGEQKKAIVDLLFKTNRKVTVKQLKEDYFKKIECFDSVEISGVEDRFNASLGTYHDLLKIIKDKDFLDNEENEDILEDIVLTLTLFEDREMIEERLKTYAHLFDDKVMKQLKRRRYTGWGRLSRKLINGIRDKQSGKTILDFLKSDGFANRNFMQLIHDDSLTFKEDIQKAQVSGQGDSLHEHIANLAGSPAIKKGILQTVKVVDELVKVMGRHKPENIVIEMARENQTTQKGQKNSRERMKRIEEGIKELGSQILKEHPVENTQLQNEKLYLYYLQNGRDMYVDQELDINRLSDYDVDHIVPQSFLKDDSIDNKVLTRSDKARGKSDNVPSEEVVKKMKNYWRQLLNAKLITQRKFDNLTKAERGGLSELDKAGFIKRQLVETRQITKHVAQILDSRMNTKYDENDKLIREVKVITLKSKLVSDFRKDFQFYKVREINNYHHAHDAYLNAVVGTALIKKYPKLESEFVYGDYKVYDVRKMIAKSEQEIGKATAKYFFYSNIMNFFKTEITLANGEIRKRPLIETNGETGEIVWDKGRDFATVRKVLSMPQVNIVKKTEVQTGGFSKESILPKRNSDKLIARKKDWDPKKYGGFDSPTVAYSVLVVAKVEKGKSKKLKSVKELLGITIMERSSFEKNPIDFLEAKGYKEVKKDLIIKLPKYSLFELENGRKRMLASAGELQKGNELALPSKYVNFLYLASHYEKLKGSPEDNEQKQLFVEQHKHYLDEIIEQISEFSKRVILADANLDKVLSAYNKHRDKPIREQAENIIHLFTLTNLGAPAAFKYFDTTIDRKRYTSTKEVLDATLIHQSITGLYETRIDLSQLGGDGGGGSPAPEAAAKGGTLNIEDEYRLHETSKGPDVPLGSTWLSDFPQAWAETGGMGLAVRQAPLIIPLKATSTPVSIKQYPMSQEARLGIKPHIQRLLDQGILVPCQSPWNTPLLPVKKPGTNDYRPVQDLREVNKRVEDIHPTVPNPYNLLSGLPPSHQWYTVLDLKDAFFCLRLHPTSQSLFAFEWRDPEMGISGQLTWTRLPQGFKNSPTLFNEALHRDLADFRIQHPDLILLQYVDDLLLAATSELDCQQGTRALLQTLGDLGYRASAKKAQICQKQVKYLGYLLKEGQRWLTEARKETVMGQPTPKTPRQLREFLGKAGFCRLFIPGFAEMAAPLYPLTKPGTLFEWGPDQQKAYQEIKQALLTAPALGLPDLTKPFELFVDEKQGYAKGVLTQKLGPWRRPVAYLSKKLDPVAAGWPPCLRMVAAIAVLTKDAGKLTMGQPLVILAPHAVEALVKQPPDRWLSNARMTHYQALLLDTDRVQFGPIVALNPATLLPLPEEGLQHDCLDILAEAHGTRPDLTDQPLPDADHTWYTDGSSFLQEGQRKAGAAVTTETEVVWAKALPAGTSAQRAELIALTQALKMAEGKKLNVYTDSRYAFATAHIHGEIYRRRGWLTSEGKEIKNKDEILALLKALFLPKRLSIIHCPGHQKGNRAEARGNRMADQAAREVATRETPETSTLLAGKRTADGSEFEKRTADGSEFESPKKKAKVE

SEQ ID NO: 2528 - protein, 2100 aa, synthetic construct
MPAAKRVKLDGGDKKYSIGLDIGTNSVGWAVITDEYKVPSKKFKVLGNTDRHSIKKNLIGALLFDSGETAEATRLKRTARRRYTRRKNRICYLQEIFSNEMAKVDDSFFHRLEESFLVEEDKKHERHPIFGNIVDEVAYHEKYPTIYHLRKKLVDSTDKADLRLIYLALAHMIKFRGHFLIEGDLNPDNSDVDKLFIQLVQTYNQLFEENPINASGVDAKAILSARLSKSRRLENLIAQLPGEKKNGLFGNLIALSLGLTPNFKSNFDLAEDAKLQLSKDTYDDDLDNLLAQIGDQYADLFLAAKNLSDAILLSDILRVNTEITKAPLSASMIKRYDEHHQDLTLLKALVRQQLPEKYKEIFFDQSKNGYAGYIDGGASQEEFYKFIKPILEKMDGTEELLVKLNREDLLRKQRTFDNGSIPHQIHLGELHAILRRQEDFYPFLKDNREKIEKILTFRIPYYVGPLARGNSRFAWMTRKSEETITPWNFEEVVDKGASAQSFIERMTNFDKNLPNEKVLPKHSLLYEYFTVYNELTKVKYVTEGMRKPAFLSGEQKKAIVDLLFKTNRKVTVKQLKEDYFKKIECFDSVEISGVEDRFNASLGTYHDLLKIIKDKDFLDNEENEDILEDIVLTLTLFEDREMIEERLKTYAHLFDDKVMKQLKRRRYTGWGRLSRKLINGIRDKQSGKTILDFLKSDGFANRNFMQLIHDDSLTFKEDIQKAQVSGQGDSLHEHIANLAGSPAIKKGILQTVKVVDELVKVMGRHKPENIVIEMARENQTTQKGQKNSRERMKRIEEGIKELGSQILKEHPVENTQLQNEKLYLYYLQNGRDMYVDQELDINRLSDYDVDHIVPQSFLKDDSIDNKVLTRSDKARGKSDNVPSEEVVKKMKNYWRQLLNAKLITQRKFDNLTKAERGGLSELDKAGFIKRQLVETRQITKHVAQILDSRMNTKYDENDKLIREVKVITLKSKLVSDFRKDFQFYKVREINNYHHAHDAYLNAVVGTALIKKYPKLESEFVYGDYKVYDVRKMIAKSEQEIGKATAKYFFYSNIMNFFKTEITLANGEIRKRPLIETNGETGEIVWDKGRDFATVRKVLSMPQVNIVKKTEVQTGGFSKESILPKRNSDKLIARKKDWDPKKYGGFDSPTVAYSVLVVAKVEKGKSKKLKSVKELLGITIMERSSFEKNPIDFLEAKGYKEVKKDLIIKLPKYSLFELENGRKRMLASAGELQKGNELALPSKYVNFLYLASHYEKLKGSPEDNEQKQLFVEQHKHYLDEIIEQISEFSKRVILADANLDKVLSAYNKHRDKPIREQAENIIHLFTLTNLGAPAAFKYFDTTIDRKRYTSTKEVLDATLIHQSITGLYETRIDLSQLGGDGGGGGGSEAAAKGGGGSGGTLNIEDEYRLHETSKGPDVPLGSTWLSDFPQAWAETGGMGLAVRQAPLIIPLKATSTPVSIKQYPMSQEARLGIKPHIQRLLDQGILVPCQSPWNTPLLPVKKPGTNDYRPVQDLREVNKRVEDIHPTVPNPYNLLSGLPPSHQWYTVLDLKDAFFCLRLHPTSQSLFAFEWRDPEMGISGQLTWTRLPQGFKNSPTLFNEALHRDLADFRIQHPDLILLQYVDDLLLAATSELDCQQGTRALLQTLGDLGYRASAKKAQICQKQVKYLGYLLKEGQRWLTEARKETVMGQPTPKTPRQLREFLGKAGFCRLFIPGFAEMAAPLYPLTKPGTLFEWGPDQQKAYQEIKQALLTAPALGLPDLTKPFELFVDEKQGYAKGVLTQKLGPWRRPVAYLSKKLDPVAAGWPPCLRMVAAIAVLTKDAGKLTMGQPLVILAPHAVEALVKQPPDRWLSNARMTHYQALLLDTDRVQFGPIVALNPATLLPLPEEGLQHDCLDILAEAHGTRPDLTDQPLPDADHTWYTDGSSFLQEGQRKAGAAVTTETEVVWAKALPAGTSAQRAELIALTQALKMAEGKKLNVYTDSRYAFATAHIHGEIYRRRGWLTSEGKEIKNKDEILALLKALFLPKRLSIIHCPGHQKGNRAEARGNRMADQAAREVATRETPETSTLLAGKRTADGSEFEKRTADGSEFESPKKKAKVE

SEQ ID NO: 2529 - protein, 2131 aa, synthetic construct
MPAAKRVKLDGGDKKYSIGLDIGTNSVGWAVITDEYKVPSKKFKVLGNTDRHSIKKNLIGALLFDSGETAEATRLKRTARRRYTRRKNRICYLQEIFSNEMAKVDDSFFHRLEESFLVEEDKKHERHPIFGNIVDEVAYHEKYPTIYHLRKKLVDSTDKADLRLIYLALAHMIKFRGHFLIEGDLNPDNSDVDKLFIQLVQTYNQLFEENPINASGVDAKAILSARLSKSRRLENLIAQLPGEKKNGLFGNLIALSLGLTPNFKSNFDLAEDAKLQLSKDTYDDDLDNLLAQIGDQYADLFLAAKNLSDAILLSDILRVNTEITKAPLSASMIKRYDEHHQDLTLLKALVRQQLPEKYKEIFFDQSKNGYAGYIDGGASQEEFYKFIKPILEKMDGTEELLVKLNREDLLRKQRTFDNGSIPHQIHLGELHAILRRQEDFYPFLKDNREKIEKILTFRIPYYVGPLARGNSRFAWMTRKSEETITPWNFEEVVDKGASAQSFIERMTNFDKNLPNEKVLPKHSLLYEYFTVYNELTKVKYVTEGMRKPAFLSGEQKKAIVDLLFKTNRKVTVKQLKEDYFKKIECFDSVEISGVEDRFNASLGTYHDLLKIIKDKDFLDNEENEDILEDIVLTLTLFEDREMIEERLKTYAHLFDDKVMKQLKRRRYTGWGRLSRKLINGIRDKQSGKTILDFLKSDGFANRNFMQLIHDDSLTFKEDIQKAQVSGQGDSLHEHIANLAGSPAIKKGILQTVKVVDELVKVMGRHKPENIVIEMARENQTTQKGQKNSRERMKRIEEGIKELGSQILKEHPVENTQLQNEKLYLYYLQNGRDMYVDQELDINRLSDYDVDHIVPQSFLKDDSIDNKVLTRSDKARGKSDNVPSEEVVKKMKNYWRQLLNAKLITQRKFDNLTKAERGGLSELDKAGFIKRQLVETRQITKHVAQILDSRMNTKYDENDKLIREVKVITLKSKLVSDFRKDFQFYKVREINNYHHAHDAYLNAVVGTALIKKYPKLESEFVYGDYKVYDVRKMIAKSEQEIGKATAKYFFYSNIMNFFKTEITLANGEIRKRPLIETNGETGEIVWDKGRDFATVRKVLSMPQVNIVKKTEVQTGGFSKESILPKRNSDKLIARKKDWDPKKYGGFDSPTVAYSVLVVAKVEKGKSKKLKSVKELLGITIMERSSFEKNPIDFLEAKGYKEVKKDLIIKLPKYSLFELENGRKRMLASAGELQKGNELALPSKYVNFLYLASHYEKLKGSPEDNEQKQLFVEQHKHYLDEIIEQISEFSKRVILADANLDKVLSAYNKHRDKPIREQAENIIHLFTLTNLGAPAAFKYFDTTIDRKRYTSTKEVLDATLIHQSITGLYETRIDLSQLGGDGGAEAAAKEAAAKEAAAKEAAAKALEAEAAAKEAAAKEAAAKEAAAKAGGTLNIEDEYRLHETSKGPDVPLGSTWLSDFPQAWAETGGMGLAVRQAPLIIPLKATSTPVSIKQYPMSQEARLGIKPHIQRLLDQGILVPCQSPWNTPLLPVKKPGTNDYRPVQDLREVNKRVEDIHPTVPNPYNLLSGLPPSHQWYTVLDLKDAFFCLRLHPTSQSLFAFEWRDPEMGISGQLTWTRLPQGFKNSPTLFNEALHRDLADFRIQHPDLILLQYVDDLLLAATSELDCQQGTRALLQTLGDLGYRASAKKAQICQKQVKYLGYLLKEGQRWLTEARKETVMGQPTPKTPRQLREFLGKAGFCRLFIPGFAEMAAPLYPLTKPGTLFEWGPDQQKAYQEIKQALLTAPALGLPDLTKPFELFVDEKQGYAKGVLTQKLGPWRRPVAYLSKKLDPVAAGWPPCLRMVAAIAVLTKDAGKLTMGQPLVILAPHAVEALVKQPPDRWLSNARMTHYQALLLDTDRVQFGPIVALNPATLLPLPEEGLQHDCLDILAEAHGTRPDLTDQPLPDADHTWYTDGSSFLQEGQRKAGAAVTTETEVVWAKALPAGTSAQRAELIALTQALKMAEGKKLNVYTDSRYAFATAHIHGEIYRRRGWLTSEGKEIKNKDEILALLKALFLPKRLSIIHCPGHQKGNRAEARGNRMADQAAREVATRETPETSTLLAGKRTADGSEFEKRTADGSEFESPKKKAKVE

SEQ ID NO: 2530 - protein, 2096 aa, synthetic construct
MPAAKRVKLDGGDKKYSIGLDIGTNSVGWAVITDEYKVPSKKFKVLGNTDRHSIKKNLIGALLFDSGETAEATRLKRTARRRYTRRKNRICYLQEIFSNEMAKVDDSFFHRLEESFLVEEDKKHERHPIFGNIVDEVAYHEKYPTIYHLRKKLVDSTDKADLRLIYLALAHMIKFRGHFLIEGDLNPDNSDVDKLFIQLVQTYNQLFEENPINASGVDAKAILSARLSKSRRLENLIAQLPGEKKNGLFGNLIALSLGLTPNFKSNFDLAEDAKLQLSKDTYDDDLDNLLAQIGDQYADLFLAAKNLSDAILLSDILRVNTEITKAPLSASMIKRYDEHHQDLTLLKALVRQQLPEKYKEIFFDQSKNGYAGYIDGGASQEEFYKFIKPILEKMDGTEELLVKLNREDLLRKQRTFDNGSIPHQIHLGELHAILRRQEDFYPFLKDNREKIEKILTFRIPYYVGPLARGNSRFAWMTRKSEETITPWNFEEVVDKGASAQSFIERMTNFDKNLPNEKVLPKHSLLYEYFTVYNELTKVKYVTEGMRKPAFLSGEQKKAIVDLLFKTNRKVTVKQLKEDYFKKIECFDSVEISGVEDRFNASLGTYHDLLKIIKDKDFLDNEENEDILEDIVLTLTLFEDREMIEERLKTYAHLFDDKVMKQLKRRRYTGWGRLSRKLINGIRDKQSGKTILDFLKSDGFANRNFMQLIHDDSLTFKEDIQKAQVSGQGDSLHEHIANLAGSPAIKKGILQTVKVVDELVKVMGRHKPENIVIEMARENQTTQKGQKNSRERMKRIEEGIKELGSQILKEHPVENTQLQNEKLYLYYLQNGRDMYVDQELDINRLSDYDVDHIVPQSFLKDDSIDNKVLTRSDKARGKSDNVPSEEVVKKMKNYWRQLLNAKLITQRKFDNLTKAERGGLSELDKAGFIKRQLVETRQITKHVAQILDSRMNTKYDENDKLIREVKVITLKSKLVSDFRKDFQFYKVREINNYHHAHDAYLNAVVGTALIKKYPKLESEFVYGDYKVYDVRKMIAKSEQEIGKATAKYFFYSNIMNFFKTEITLANGEIRKRPLIETNGETGEIVWDKGRDFATVRKVLSMPQVNIVKKTEVQTGGFSKESILPKRNSDKLIARKKDWDPKKYGGFDSPTVAYSVLVVAKVEKGKSKKLKSVKELLGITIMERSSFEKNPIDFLEAKGYKEVKKDLIIKLPKYSLFELENGRKRMLASAGELQKGNELALPSKYVNFLYLASHYEKLKGSPEDNEQKQLFVEQHKHYLDEIIEQISEFSKRVILADANLDKVLSAYNKHRDKPIREQAENIIHLFTLTNLGAPAAFKYFDTTIDRKRYTSTKEVLDATLIHQSITGLYETRIDLSQLGGDGGGGSEAAAKPAPGGTLNIEDEYRLHETSKGPDVPLGSTWLSDFPQAWAETGGMGLAVRQAPLIIPLKATSTPVSIKQYPMSQEARLGIKPHIQRLLDQGILVPCQSPWNTPLLPVKKPGTNDYRPVQDLREVNKRVEDIHPTVPNPYNLLSGLPPSHQWYTVLDLKDAFFCLRLHPTSQSLFAFEWRDPEMGISGQLTWTRLPQGFKNSPTLFNEALHRDLADFRIQHPDLILLQYVDDLLLAATSELDCQQGTRALLQTLGDLGYRASAKKAQICQKQVKYLGYLLKEGQRWLTEARKETVMGQPTPKTPRQLREFLGKAGFCRLFIPGFAEMAAPLYPLTKPGTLFEWGPDQQKAYQEIKQALLTAPALGLPDLTKPFELFVDEKQGYAKGVLTQKLGPWRRPVAYLSKKLDPVAAGWPPCLRMVAAIAVLTKDAGKLTMGQPLVILAPHAVEALVKQPPDRWLSNARMTHYQALLLDTDRVQFGPIVALNPATLLPLPEEGLQHDCLDILAEAHGTRPDLTDQPLPDADHTWYTDGSSFLQEGQRKAGAAVTTETEVVWAKALPAGTSAQRAELIALTQALKMAEGKKLNVYTDSRYAFATAHIHGEIYRRRGWLTSEGKEIKNKDEILALLKALFLPKRLSIIHCPGHQKGNRAEARGNRMADQAAREVATRETPETSTLLAGKRTADGSEFEKRTADGSEFESPKKKAKVE

SEQ ID NO: 2531 - protein, 2094 aa, synthetic construct
MPAAKRVKLDGGDKKYSIGLDIGTNSVGWAVITDEYKVPSKKFKVLGNTDRHSIKKNLIGALLFDSGETAEATRLKRTARRRYTRRKNRICYLQEIFSNEMAKVDDSFFHRLEESFLVEEDKKHERHPIFGNIVDEVAYHEKYPTIYHLRKKLVDSTDKADLRLIYLALAHMIKFRGHFLIEGDLNPDNSDVDKLFIQLVQTYNQLFEENPINASGVDAKAILSARLSKSRRLENLIAQLPGEKKNGLFGNLIALSLGLTPNFKSNFDLAEDAKLQLSKDTYDDDLDNLLAQIGDQYADLFLAAKNLSDAILLSDILRVNTEITKAPLSASMIKRYDEHHQDLTLLKALVRQQLPEKYKEIFFDQSKNGYAGYIDGGASQEEFYKFIKPILEKMDGTEELLVKLNREDLLRKQRTFDNGSIPHQIHLGELHAILRRQEDFYPFLKDNREKIEKILTFRIPYYVGPLARGNSRFAWMTRKSEETITPWNFEEVVDKGASAQSFIERMTNFDKNLPNEKVLPKHSLLYEYFTVYNELTKVKYVTEGMRKPAFLSGEQKKAIVDLLFKTNRKVTVKQLKEDYFKKIECFDSVEISGVEDRFNASLGTYHDLLKIIKDKDFLDNEENEDILEDIVLTLTLFEDREMIEERLKTYAHLFDDKVMKQLKRRRYTGWGRLSRKLINGIRDKQSGKTILDFLKSDGFANRNFMQLIHDDSLTFKEDIQKAQVSGQGDSLHEHIANLAGSPAIKKGILQTVKVVDELVKVMGRHKPENIVIEMARENQTTQKGQKNSRERMKRIEEGIKELGSQILKEHPVENTQLQNEKLYLYYLQNGRDMYVDQELDINRLSDYDVDHIVPQSFLKDDSIDNKVLTRSDKARGKSDNVPSEEVVKKMKNYWRQLLNAKLITQRKFDNLTKAERGGLSELDKAGFIKRQLVETRQITKHVAQILDSRMNTKYDENDKLIREVKVITLKSKLVSDFRKDFQFYKVREINNYHHAHDAYLNAVVGTALIKKYPKLESEFVYGDYKVYDVRKMIAKSEQEIGKATAKYFFYSNIMNFFKTEITLANGEIRKRPLIETNGETGEIVWDKGRDFATVRKVLSMPQVNIVKKTEVQTGGFSKESILPKRNSDKLIARKKDWDPKKYGGFDSPTVAYSVLVVAKVEKGKSKKLKSVKELLGITIMERSSFEKNPIDFLEAKGYKEVKKDLIIKLPKYSLFELENGRKRMLASAGELQKGNELALPSKYVNFLYLASHYEKLKGSPEDNEQKQLFVEQHKHYLDEIIEQISEFSKRVILADANLDKVLSAYNKHRDKPIREQAENIIHLFTLTNLGAPAAFKYFDTTIDRKRYTSTKEVLDATLIHQSITGLYETRIDLSQLGGDGGPAPGSSGGGGGTLNIEDEYRLHETSKGPDVPLGSTWLSDFPQAWAETGGMGLAVRQAPLIIPLKATSTPVSIKQYPMSQEARLGIKPHIQRLLDQGILVPCQSPWNTPLLPVKKPGTNDYRPVQDLREVNKRVEDIHPTVPNPYNLLSGLPPSHQWYTVLDLKDAFFCLRLHPTSQSLFAFEWRDPEMGISGQLTWTRLPQGFKNSPTLFNEALHRDLADFRIQHPDLILLQYVDDLLLAATSELDCQQGTRALLQTLGDLGYRASAKKAQICQKQVKYLGYLLKEGQRWLTEARKETVMGQPTPKTPRQLREFLGKAGFCRLFIPGFAEMAAPLYPLTKPGTLFEWGPDQQKAYQEIKQALLTAPALGLPDLTKPFELFVDEKQGYAKGVLTQKLGPWRRPVAYLSKKLDPVAAGWPPCLRMVAAIAVLTKDAGKLTMGQPLVILAPHAVEALVKQPPDRWLSNARMTHYQALLLDTDRVQFGPIVALNPATLLPLPEEGLQHDCLDILAEAHGTRPDLTDQPLPDADHTWYTDGSSFLQEGQRKAGAAVTTETEVVWAKALPAGTSAQRAELIALTQALKMAEGKKLNVYTDSRYAFATAHIHGEIYRRRGWLTSEGKEIKNKDEILALLKALFLPKRLSIIHCPGHQKGNRAEARGNRMADQAAREVATRETPETSTLLAGKRTADGSEFEKRTADGSEFESPKKKAKVE

SEQ ID NO: 2532 - protein, 2100 aa, synthetic construct
MPAAKRVKLDGGDKKYSIGLDIGTNSVGWAVITDEYKVPSKKFKVLGNTDRHSIKKNLIGALLFDSGETAEATRLKRTARRRYTRRKNRICYLQEIFSNEMAKVDDSFFHRLEESFLVEEDKKHERHPIFGNIVDEVAYHEKYPTIYHLRKKLVDSTDKADLRLIYLALAHMIKFRGHFLIEGDLNPDNSDVDKLFIQLVQTYNQLFEENPINASGVDAKAILSARLSKSRRLENLIAQLPGEKKNGLFGNLIALSLGLTPNFKSNFDLAEDAKLQLSKDTYDDDLDNLLAQIGDQYADLFLAAKNLSDAILLSDILRVNTEITKAPLSASMIKRYDEHHQDLTLLKALVRQQLPEKYKEIFFDQSKNGYAGYIDGGASQEEFYKFIKPILEKMDGTEELLVKLNREDLLRKQRTFDNGSIPHQIHLGELHAILRRQEDFYPFLKDNREKIEKILTFRIPYYVGPLARGNSRFAWMTRKSEETITPWNFEEVVDKGASAQSFIERMTNFDKNLPNEKVLPKHSLLYEYFTVYNELTKVKYVTEGMRKPAFLSGEQKKAIVDLLFKTNRKVTVKQLKEDYFKKIECFDSVEISGVEDRFNASLGTYHDLLKIIKDKDFLDNEENEDILEDIVLTLTLFEDREMIEERLKTYAHLFDDKVMKQLKRRRYTGWGRLSRKLINGIRDKQSGKTILDFLKSDGFANRNFMQLIHDDSLTFKEDIQKAQVSGQGDSLHEHIANLAGSPAIKKGILQTVKVVDELVKVMGRHKPENIVIEMARENQTTQKGQKNSRERMKRIEEGIKELGSQILKEHPVENTQLQNEKLYLYYLQNGRDMYVDQELDINRLSDYDVDHIVPQSFLKDDSIDNKVLTRSDKARGKSDNVPSEEVVKKMKNYWRQLLNAKLITQRKFDNLTKAERGGLSELDKAGFIKRQLVETRQITKHVAQILDSRMNTKYDENDKLIREVKVITLKSKLVSDFRKDFQFYKVREINNYHHAHDAYLNAVVGTALIKKYPKLESEFVYGDYKVYDVRKMIAKSEQEIGKATAKYFFYSNIMNFFKTEITLANGEIRKRPLIETNGETGEIVWDKGRDFATVRKVLSMPQVNIVKKTEVQTGGFSKESILPKRNSDKLIARKKDWDPKKYGGFDSPTVAYSVLVVAKVEKGKSKKLKSVKELLGITIMERSSFEKNPIDFLEAKGYKEVKKDLIIKLPKYSLFELENGRKRMLASAGELQKGNELALPSKYVNFLYLASHYEKLKGSPEDNEQKQLFVEQHKHYLDEIIEQISEFSKRVILADANLDKVLSAYNKHRDKPIREQAENIIHLFTLTNLGAPAAFKYFDTTIDRKRYTSTKEVLDATLIHQSITGLYETRIDLSQLGGDGGGSSGSSGSSGSSGSSGGTLNIEDEYRLHETSKGPDVPLGSTWLSDFPQAWAETGGMGLAVRQAPLIIPLKATSTPVSIKQYPMSQEARLGIKPHIQRLLDQGILVPCQSPWNTPLLPVKKPGTNDYRPVQDLREVNKRVEDIHPTVPNPYNLLSGLPPSHQWYTVLDLKDAFFCLRLHPTSQSLFAFEWRDPEMGISGQLTWTRLPQGFKNSPTLFNEALHRDLADFRIQHPDLILLQYVDDLLLAATSELDCQQGTRALLQTLGDLGYRASAKKAQICQKQVKYLGYLLKEGQRWLTEARKETVMGQPTPKTPRQLREFLGKAGFCRLFIPGFAEMAAPLYPLTKPGTLFEWGPDQQKAYQEIKQALLTAPALGLPDLTKPFELFVDEKQGYAKGVLTQKLGPWRRPVAYLSKKLDPVAAGWPPCLRMVAAIAVLTKDAGKLTMGQPLVILAPHAVEALVKQPPDRWLSNARMTHYQALLLDTDRVQFGPIVALNPATLLPLPEEGLQHDCLDILAEAHGTRPDLTDQPLPDADHTWYTDGSSFLQEGQRKAGAAVTTETEVVWAKALPAGTSAQRAELIALTQALKMAEGKKLNVYTDSRYAFATAHIHGEIYRRRGWLTSEGKEIKNKDEILALLKALFLPKRLSIIHCPGHQKGNRAEARGNRMADQAAREVATRETPETSTLLAGKRTADGSEFEKRTADGSEFESPKKKAKVE

SEQ ID NO: 2533 - protein, 2094 aa, synthetic construct
MPAAKRVKLDGGDKKYSIGLDIGTNSVGWAVITDEYKVPSKKFKVLGNTDRHSIKKNLIGALLFDSGETAEATRLKRTARRRYTRRKNRICYLQEIFSNEMAKVDDSFFHRLEESFLVEEDKKHERHPIFGNIVDEVAYHEKYPTIYHLRKKLVDSTDKADLRLIYLALAHMIKFRGHFLIEGDLNPDNSDVDKLFIQLVQTYNQLFEENPINASGVDAKAILSARLSKSRRLENLIAQLPGEKKNGLFGNLIALSLGLTPNFKSNFDLAEDAKLQLSKDTYDDDLDNLLAQIGDQYADLFLAAKNLSDAILLSDILRVNTEITKAPLSASMIKRYDEHHQDLTLLKALVRQQLPEKYKEIFFDQSKNGYAGYIDGGASQEEFYKFIKPILEKMDGTEELLVKLNREDLLRKQRTFDNGSIPHQIHLGELHAILRRQEDFYPFLKDNREKIEKILTFRIPYYVGPLARGNSRFAWMTRKSEETITPWNFEEVVDKGASAQSFIERMTNFDKNLPNEKVLPKHSLLYEYFTVYNELTKVKYVTEGMRKPAFLSGEQKKAIVDLLFKTNRKVTVKQLKEDYFKKIECFDSVEISGVEDRFNASLGTYHDLLKIIKDKDFLDNEENEDILEDIVLTLTLFEDREMIEERLKTYAHLFDDKVMKQLKRRRYTGWGRLSRKLINGIRDKQSGKTILDFLKSDGFANRNFMQLIHDDSLTFKEDIQKAQVSGQGDSLHEHIANLAGSPAIKKGILQTVKVVDELVKVMGRHKPENIVIEMARENQTTQKGQKNSRERMKRIEEGIKELGSQILKEHPVENTQLQNEKLYLYYLQNGRDMYVDQELDINRLSDYDVDHIVPQSFLKDDSIDNKVLTRSDKARGKSDNVPSEEVVKKMKNYWRQLLNAKLITQRKFDNLTKAERGGLSELDKAGFIKRQLVETRQITKHVAQILDSRMNTKYDENDKLIREVKVITLKSKLVSDFRKDFQFYKVREINNYHHAHDAYLNAVVGTALIKKYPKLESEFVYGDYKVYDVRKMIAKSEQEIGKATAKYFFYSNIMNFFKTEITLANGEIRKRPLIETNGETGEIVWDKGRDFATVRKVLSMPQVNIVKKTEVQTGGFSKESILPKRNSDKLIARKKDWDPKKYGGFDSPTVAYSVLVVAKVEKGKSKKLKSVKELLGITIMERSSFEKNPIDFLEAKGYKEVKKDLIIKLPKYSLFELENGRKRMLASAGELQKGNELALPSKYVNFLYLASHYEKLKGSPEDNEQKQLFVEQHKHYLDEIIEQISEFSKRVILADANLDKVLSAYNKHRDKPIREQAENIIHLFTLTNLGAPAAFKYFDTTIDRKRYTSTKEVLDATLIHQSITGLYETRIDLSQLGGDGGPAPGGSGSSGGTLNIEDEYRLHETSKGPDVPLGSTWLSDFPQAWAETGGMGLAVRQAPLIIPLKATSTPVSIKQYPMSQEARLGIKPHIQRLLDQGILVPCQSPWNTPLLPVKKPGTNDYRPVQDLREVNKRVEDIHPTVPNPYNLLSGLPPSHQWYTVLDLKDAFFCLRLHPTSQSLFAFEWRDPEMGISGQLTWTRLPQGFKNSPTLFNEALHRDLADFRIQHPDLILLQYVDDLLLAATSELDCQQGTRALLQTLGDLGYRASAKKAQICQKQVKYLGYLLKEGQRWLTEARKETVMGQPTPKTPRQLREFLGKAGFCRLFIPGFAEMAAPLYPLTKPGTLFEWGPDQQKAYQEIKQALLTAPALGLPDLTKPFELFVDEKQGYAKGVLTQKLGPWRRPVAYLSKKLDPVAAGWPPCLRMVAAIAVLTKDAGKLTMGQPLVILAPHAVEALVKQPPDRWLSNARMTHYQALLLDTDRVQFGPIVALNPATLLPLPEEGLQHDCLDILAEAHGTRPDLTDQPLPDADHTWYTDGSSFLQEGQRKAGAAVTTETEVVWAKALPAGTSAQRAELIALTQALKMAEGKKLNVYTDSRYAFATAHIHGEIYRRRGWLTSEGKEIKNKDEILALLKALFLPKRLSIIHCPGHQKGNRAEARGNRMADQAAREVATRETPETSTLLAGKRTADGSEFEKRTADGSEFESPKKKAKVE

SEQ ID NO: 2534 - protein, 2098 aa, synthetic construct
MPAAKRVKLDGGDKKYSIGLDIGTNSVGWAVITDEYKVPSKKFKVLGNTDRHSIKKNLIGALLFDSGETAEATRLKRTARRRYTRRKNRICYLQEIFSNEMAKVDDSFFHRLEESFLVEEDKKHERHPIFGNIVDEVAYHEKYPTIYHLRKKLVDSTDKADLRLIYLALAHMIKFRGHFLIEGDLNPDNSDVDKLFIQLVQTYNQLFEENPINASGVDAKAILSARLSKSRRLENLIAQLPGEKKNGLFGNLIALSLGLTPNFKSNFDLAEDAKLQLSKDTYDDDLDNLLAQIGDQYADLFLAAKNLSDAILLSDILRVNTEITKAPLSASMIKRYDEHHQDLTLLKALVRQQLPEKYKEIFFDQSKNGYAGYIDGGASQEEFYKFIKPILEKMDGTEELLVKLNREDLLRKQRTFDNGSIPHQIHLGELHAILRRQEDFYPFLKDNREKIEKILTFRIPYYVGPLARGNSRFAWMTRKSEETITPWNFEEVVDKGASAQSFIERMTNFDKNLPNEKVLPKHSLLYEYFTVYNELTKVKYVTEGMRKPAFLSGEQKKAIVDLLFKTNRKVTVKQLKEDYFKKIECFDSVEISGVEDRFNASLGTYHDLLKIIKDKDFLDNEENEDILEDIVLTLTLFEDREMIEERLKTYAHLFDDKVMKQLKRRRYTGWGRLSRKLINGIRDKQSGKTILDFLKSDGFANRNFMQLIHDDSLTFKEDIQKAQVSGQGDSLHEHIANLAGSPAIKKGILQTVKVVDELVKVMGRHKPENIVIEMARENQTTQKGQKNSRERMKRIEEGIKELGSQILKEHPVENTQLQNEKLYLYYLQNGRDMYVDQELDINRLSDYDVDHIVPQSFLKDDSIDNKVLTRSDKARGKSDNVPSEEVVKKMKNYWRQLLNAKLITQRKFDNLTKAERGGLSELDKAGFIKRQLVETRQITKHVAQILDSRMNTKYDENDKLIREVKVITLKSKLVSDFRKDFQFYKVREINNYHHAHDAYLNAVVGTALIKKYPKLESEFVYGDYKVYDVRKMIAKSEQEIGKATAKYFFYSNIMNFFKTEITLANGEIRKRPLIETNGETGEIVWDKGRDFATVRKVLSMPQVNIVKKTEVQTGGFSKESILPKRNSDKLIARKKDWDPKKYGGFDSPTVAYSVLVVAKVEKGKSKKLKSVKELLGITIMERSSFEKNPIDFLEAKGYKEVKKDLIIKLPKYSLFELENGRKRMLASAGELQKGNELALPSKYVNFLYLASHYEKLKGSPEDNEQKQLFVEQHKHYLDEIIEQISEFSKRVILADANLDKVLSAYNKHRDKPIREQAENIIHLFTLTNLGAPAAFKYFDTTIDRKRYTSTKEVLDATLIHQSITGLYETRIDLSQLGGDGGPAPAPAPAPAPAPGGTLNIEDEYRLHETSKGPDVPLGSTWLSDFPQAWAETGGMGLAVRQAPLIIPLKATSTPVSIKQYPMSQEARLGIKPHIQRLLDQGILVPCQSPWNTPLLPVKKPGTNDYRPVQDLREVNKRVEDIHPTVPNPYNLLSGLPPSHQWYTVLDLKDAFFCLRLHPTSQSLFAFEWRDPEMGISGQLTWTRLPQGFKNSPTLFNEALHRDLADFRIQHPDLILLQYVDDLLLAATSELDCQQGTRALLQTLGDLGYRASAKKAQICQKQVKYLGYLLKEGQRWLTEARKETVMGQPTPKTPRQLREFLGKAGFCRLFIPGFAEMAAPLYPLTKPGTLFEWGPDQQKAYQEIKQALLTAPALGLPDLTKPFELFVDEKQGYAKGVLTQKLGPWRRPVAYLSKKLDPVAAGWPPCLRMVAAIAVLTKDAGKLTMGQPLVILAPHAVEALVKQPPDRWLSNARMTHYQALLLDTDRVQFGPIVALNPATLLPLPEEGLQHDCLDILAEAHGTRPDLTDQPLPDADHTWYTDGSSFLQEGQRKAGAAVTTETEVVWAKALPAGTSAQRAELIALTQALKMAEGKKLNVYTDSRYAFATAHIHGEIYRRRGWLTSEGKEIKNKDEILALLKALFLPKRLSIIHCPGHQKGNRAEARGNRMADQAAREVATRETPETSTLLAGKRTADGSEFEKRTADGSEFESPKKKAKVE

SEQ ID NO: 2535 - protein, 2096 aa, synthetic construct
MPAAKRVKLDGGDKKYSIGLDIGTNSVGWAVITDEYKVPSKKFKVLGNTDRHSIKKNLIGALLFDSGETAEATRLKRTARRRYTRRKNRICYLQEIFSNEMAKVDDSFFHRLEESFLVEEDKKHERHPIFGNIVDEVAYHEKYPTIYHLRKKLVDSTDKADLRLIYLALAHMIKFRGHFLIEGDLNPDNSDVDKLFIQLVQTYNQLFEENPINASGVDAKAILSARLSKSRRLENLIAQLPGEKKNGLFGNLIALSLGLTPNFKSNFDLAEDAKLQLSKDTYDDDLDNLLAQIGDQYADLFLAAKNLSDAILLSDILRVNTEITKAPLSASMIKRYDEHHQDLTLLKALVRQQLPEKYKEIFFDQSKNGYAGYIDGGASQEEFYKFIKPILEKMDGTEELLVKLNREDLLRKQRTFDNGSIPHQIHLGELHAILRRQEDFYPFLKDNREKIEKILTFRIPYYVGPLARGNSRFAWMTRKSEETITPWNFEEVVDKGASAQSFIERMTNFDKNLPNEKVLPKHSLLYEYFTVYNELTKVKYVTEGMRKPAFLSGEQKKAIVDLLFKTNRKVTVKQLKEDYFKKIECFDSVEISGVEDRFNASLGTYHDLLKIIKDKDFLDNEENEDILEDIVLTLTLFEDREMIEERLKTYAHLFDDKVMKQLKRRRYTGWGRLSRKLINGIRDKQSGKTILDFLKSDGFANRNFMQLIHDDSLTFKEDIQKAQVSGQGDSLHEHIANLAGSPAIKKGILQTVKVVDELVKVMGRHKPENIVIEMARENQTTQKGQKNSRERMKRIEEGIKELGSQILKEHPVENTQLQNEKLYLYYLQNGRDMYVDQELDINRLSDYDVDHIVPQSFLKDDSIDNKVLTRSDKARGKSDNVPSEEVVKKMKNYWRQLLNAKLITQRKFDNLTKAERGGLSELDKAGFIKRQLVETRQITKHVAQILDSRMNTKYDENDKLIREVKVITLKSKLVSDFRKDFQFYKVREINNYHHAHDAYLNAVVGTALIKKYPKLESEFVYGDYKVYDVRKMIAKSEQEIGKATAKYFFYSNIMNFFKTEITLANGEIRKRPLIETNGETGEIVWDKGRDFATVRKVLSMPQVNIVKKTEVQTGGFSKESILPKRNSDKLIARKKDWDPKKYGGFDSPTVAYSVLVVAKVEKGKSKKLKSVKELLGITIMERSSFEKNPIDFLEAKGYKEVKKDLIIKLPKYSLFELENGRKRMLASAGELQKGNELALPSKYVNFLYLASHYEKLKGSPEDNEQKQLFVEQHKHYLDEIIEQISEFSKRVILADANLDKVLSAYNKHRDKPIREQAENIIHLFTLTNLGAPAAFKYFDTTIDRKRYTSTKEVLDATLIHQSITGLYETRIDLSQLGGDGGGSSEAAAKPAPGGTLNIEDEYRLHETSKGPDVPLGSTWLSDFPQAWAETGGMGLAVRQAPLIIPLKATSTPVSIKQYPMSQEARLGIKPHIQRLLDQGILVPCQSPWNTPLLPVKKPGTNDYRPVQDLREVNKRVEDIHPTVPNPYNLLSGLPPSHQWYTVLDLKDAFFCLRLHPTSQSLFAFEWRDPEMGISGQLTWTRLPQGFKNSPTLFNEALHRDLADFRIQHPDLILLQYVDDLLLAATSELDCQQGTRALLQTLGDLGYRASAKKAQICQKQVKYLGYLLKEGQRWLTEARKETVMGQPTPKTPRQLREFLGKAGFCRLFIPGFAEMAAPLYPLTKPGTLFEWGPDQQKAYQEIKQALLTAPALGLPDLTKPFELFVDEKQGYAKGVLTQKLGPWRRPVAYLSKKLDPVAAGWPPCLRMVAAIAVLTKDAGKLTMGQPLVILAPHAVEALVKQPPDRWLSNARMTHYQALLLDTDRVQFGPIVALNPATLLPLPEEGLQHDCLDILAEAHGTRPDLTDQPLPDADHTWYTDGSSFLQEGQRKAGAAVTTETEVVWAKALPAGTSAQRAELIALTQALKMAEGKKLNVYTDSRYAFATAHIHGEIYRRRGWLTSEGKEIKNKDEILALLKALFLPKRLSIIHCPGHQKGNRAEARGNRMADQAAREVATRETPETSTLLAGKRTADGSEFEKRTADGSEFESPKKKAKVE

SEQ ID NO: 2536 - protein, 2110 aa, synthetic construct
MPAAKRVKLDGGDKKYSIGLDIGTNSVGWAVITDEYKVPSKKFKVLGNTDRHSIKKNLIGALLFDSGETAEATRLKRTARRRYTRRKNRICYLQEIFSNEMAKVDDSFFHRLEESFLVEEDKKHERHPIFGNIVDEVAYHEKYPTIYHLRKKLVDSTDKADLRLIYLALAHMIKFRGHFLIEGDLNPDNSDVDKLFIQLVQTYNQLFEENPINASGVDAKAILSARLSKSRRLENLIAQLPGEKKNGLFGNLIALSLGLTPNFKSNFDLAEDAKLQLSKDTYDDDLDNLLAQIGDQYADLFLAAKNLSDAILLSDILRVNTEITKAPLSASMIKRYDEHHQDLTLLKALVRQQLPEKYKEIFFDQSKNGYAGYIDGGASQEEFYKFIKPILEKMDGTEELLVKLNREDLLRKQRTFDNGSIPHQIHLGELHAILRRQEDFYPFLKDNREKIEKILTFRIPYYVGPLARGNSRFAWMTRKSEETITPWNFEEVVDKGASAQSFIERMTNFDKNLPNEKVLPKHSLLYEYFTVYNELTKVKYVTEGMRKPAFLSGEQKKAIVDLLFKTNRKVTVKQLKEDYFKKIECFDSVEISGVEDRFNASLGTYHDLLKIIKDKDFLDNEENEDILEDIVLTLTLFEDREMIEERLKTYAHLFDDKVMKQLKRRRYTGWGRLSRKLINGIRDKQSGKTILDFLKSDGFANRNFMQLIHDDSLTFKEDIQKAQVSGQGDSLHEHIANLAGSPAIKKGILQTVKVVDELVKVMGRHKPENIVIEMARENQTTQKGQKNSRERMKRIEEGIKELGSQILKEHPVENTQLQNEKLYLYYLQNGRDMYVDQELDINRLSDYDVDHIVPQSFLKDDSIDNKVLTRSDKARGKSDNVPSEEVVKKMKNYWRQLLNAKLITQRKFDNLTKAERGGLSELDKAGFIKRQLVETRQITKHVAQILDSRMNTKYDENDKLIREVKVITLKSKLVSDFRKDFQFYKVREINNYHHAHDAYLNAVVGTALIKKYPKLESEFVYGDYKVYDVRKMIAKSEQEIGKATAKYFFYSNIMNFFKTEITLANGEIRKRPLIETNGETGEIVWDKGRDFATVRKVLSMPQVNIVKKTEVQTGGFSKESILPKRNSDKLIARKKDWDPKKYGGFDSPTVAYSVLVVAKVEKGKSKKLKSVKELLGITIMERSSFEKNPIDFLEAKGYKEVKKDLIIKLPKYSLFELENGRKRMLASAGELQKGNELALPSKYVNFLYLASHYEKLKGSPEDNEQKQLFVEQHKHYLDEIIEQISEFSKRVILADANLDKVLSAYNKHRDKPIREQAENIIHLFTLTNLGAPAAFKYFDTTIDRKRYTSTKEVLDATLIHQSITGLYETRIDLSQLGGDGGEAAAKEAAAKEAAAKEAAAKEAAAKGGTLNIEDEYRLHETSKGPDVPLGSTWLSDFPQAWAETGGMGLAVRQAPLIIPLKATSTPVSIKQYPMSQEARLGIKPHIQRLLDQGILVPCQSPWNTPLLPVKKPGTNDYRPVQDLREVNKRVEDIHPTVPNPYNLLSGLPPSHQWYTVLDLKDAFFCLRLHPTSQSLFAFEWRDPEMGISGQLTWTRLPQGFKNSPTLFNEALHRDLADFRIQHPDLILLQYVDDLLLAATSELDCQQGTRALLQTLGDLGYRASAKKAQICQKQVKYLGYLLKEGQRWLTEARKETVMGQPTPKTPRQLREFLGKAGFCRLFIPGFAEMAAPLYPLTKPGTLFEWGPDQQKAYQEIKQALLTAPALGLPDLTKPFELFVDEKQGYAKGVLTQKLGPWRRPVAYLSKKLDPVAAGWPPCLRMVAAIAVLTKDAGKLTMGQPLVILAPHAVEALVKQPPDRWLSNARMTHYQALLLDTDRVQFGPIVALNPATLLPLPEEGLQHDCLDILAEAHGTRPDLTDQPLPDADHTWYTDGSSFLQEGQRKAGAAVTTETEVVWAKALPAGTSAQRAELIALTQALKMAEGKKLNVYTDSRYAFATAHIHGEIYRRRGWLTSEGKEIKNKDEILALLKALFLPKRLSIIHCPGHQKGNRAEARGNRMADQAAREVATRETPETSTLLAGKRTADGSEFEKRTADGSEFESPKKKAKVE

SEQ ID NO: 2537 - protein, 2097 aa, synthetic construct
MPAAKRVKLDGGDKKYSIGLDIGTNSVGWAVITDEYKVPSKKFKVLGNTDRHSIKKNLIGALLFDSGETAEATRLKRTARRRYTRRKNRICYLQEIFSNEMAKVDDSFFHRLEESFLVEEDKKHERHPIFGNIVDEVAYHEKYPTIYHLRKKLVDSTDKADLRLIYLALAHMIKFRGHFLIEGDLNPDNSDVDKLFIQLVQTYNQLFEENPINASGVDAKAILSARLSKSRRLENLIAQLPGEKKNGLFGNLIALSLGLTPNFKSNFDLAEDAKLQLSKDTYDDDLDNLLAQIGDQYADLFLAAKNLSDAILLSDILRVNTEITKAPLSASMIKRYDEHHQDLTLLKALVRQQLPEKYKEIFFDQSKNGYAGYIDGGASQEEFYKFIKPILEKMDGTEELLVKLNREDLLRKQRTFDNGSIPHQIHLGELHAILRRQEDFYPFLKDNREKIEKILTFRIPYYVGPLARGNSRFAWMTRKSEETITPWNFEEVVDKGASAQSFIERMTNFDKNLPNEKVLPKHSLLYEYFTVYNELTKVKYVTEGMRKPAFLSGEQKKAIVDLLFKTNRKVTVKQLKEDYFKKIECFDSVEISGVEDRFNASLGTYHDLLKIIKDKDFLDNEENEDILEDIVLTLTLFEDREMIEERLKTYAHLFDDKVMKQLKRRRYTGWGRLSRKLINGIRDKQSGKTILDFLKSDGFANRNFMQLIHDDSLTFKEDIQKAQVSGQGDSLHEHIANLAGSPAIKKGILQTVKVVDELVKVMGRHKPENIVIEMARENQTTQKGQKNSRERMKRIEEGIKELGSQILKEHPVENTQLQNEKLYLYYLQNGRDMYVDQELDINRLSDYDVDHIVPQSFLKDDSIDNKVLTRSDKARGKSDNVPSEEVVKKMKNYWRQLLNAKLITQRKFDNLTKAERGGLSELDKAGFIKRQLVETRQITKHVAQILDSRMNTKYDENDKLIREVKVITLKSKLVSDFRKDFQFYKVREINNYHHAHDAYLNAVVGTALIKKYPKLESEFVYGDYKVYDVRKMIAKSEQEIGKATAKYFFYSNIMNFFKTEITLANGEIRKRPLIETNGETGEIVWDKGRDFATVRKVLSMPQVNIVKKTEVQTGGFSKESILPKRNSDKLIARKKDWDPKKYGGFDSPTVAYSVLVVAKVEKGKSKKLKSVKELLGITIMERSSFEKNPIDFLEAKGYKEVKKDLIIKLPKYSLFELENGRKRMLASAGELQKGNELALPSKYVNFLYLASHYEKLKGSPEDNEQKQLFVEQHKHYLDEIIEQISEFSKRVILADANLDKVLSAYNKHRDKPIREQAENIIHLFTLTNLGAPAAFKYFDTTIDRKRYTSTKEVLDATLIHQSITGLYETRIDLSQLGGDGGGSSGSSGSSGSSGGTLNIEDEYRLHETSKGPDVPLGSTWLSDFPQAWAETGGMGLAVRQAPLIIPLKATSTPVSIKQYPMSQEARLGIKPHIQRLLDQGILVPCQSPWNTPLLPVKKPGTNDYRPVQDLREVNKRVEDIHPTVPNPYNLLSGLPPSHQWYTVLDLKDAFFCLRLHPTSQSLFAFEWRDPEMGISGQLTWTRLPQGFKNSPTLFNEALHRDLADFRIQHPDLILLQYVDDLLLAATSELDCQQGTRALLQTLGDLGYRASAKKAQICQKQVKYLGYLLKEGQRWLTEARKETVMGQPTPKTPRQLREFLGKAGFCRLFIPGFAEMAAPLYPLTKPGTLFEWGPDQQKAYQEIKQALLTAPALGLPDLTKPFELFVDEKQGYAKGVLTQKLGPWRRPVAYLSKKLDPVAAGWPPCLRMVAAIAVLTKDAGKLTMGQPLVILAPHAVEALVKQPPDRWLSNARMTHYQALLLDTDRVQFGPIVALNPATLLPLPEEGLQHDCLDILAEAHGTRPDLTDQPLPDADHTWYTDGSSFLQEGQRKAGAAVTTETEVVWAKALPAGTSAQRAELIALTQALKMAEGKKLNVYTDSRYAFATAHIHGEIYRRRGWLTSEGKEIKNKDEILALLKALFLPKRLSIIHCPGHQKGNRAEARGNRMADQAAREVATRETPETSTLLAGKRTADGSEFEKRTADGSEFESPKKKAKVE

SEQ ID NO: 2538 - protein, 2096 aa, synthetic construct
MPAAKRVKLDGGDKKYSIGLDIGTNSVGWAVITDEYKVPSKKFKVLGNTDRHSIKKNLIGALLFDSGETAEATRLKRTARRRYTRRKNRICYLQEIFSNEMAKVDDSFFHRLEESFLVEEDKKHERHPIFGNIVDEVAYHEKYPTIYHLRKKLVDSTDKADLRLIYLALAHMIKFRGHFLIEGDLNPDNSDVDKLFIQLVQTYNQLFEENPINASGVDAKAILSARLSKSRRLENLIAQLPGEKKNGLFGNLIALSLGLTPNFKSNFDLAEDAKLQLSKDTYDDDLDNLLAQIGDQYADLFLAAKNLSDAILLSDILRVNTEITKAPLSASMIKRYDEHHQDLTLLKALVRQQLPEKYKEIFFDQSKNGYAGYIDGGASQEEFYKFIKPILEKMDGTEELLVKLNREDLLRKQRTFDNGSIPHQIHLGELHAILRRQEDFYPFLKDNREKIEKILTFRIPYYVGPLARGNSRFAWMTRKSEETITPWNFEEVVDKGASAQSFIERMTNFDKNLPNEKVLPKHSLLYEYFTVYNELTKVKYVTEGMRKPAFLSGEQKKAIVDLLFKTNRKVTVKQLKEDYFKKIECFDSVEISGVEDRFNASLGTYHDLLKIIKDKDFLDNEENEDILEDIVLTLTLFEDREMIEERLKTYAHLFDDKVMKQLKRRRYTGWGRLSRKLINGIRDKQSGKTILDFLKSDGFANRNFMQLIHDDSLTFKEDIQKAQVSGQGDSLHEHIANLAGSPAIKKGILQTVKVVDELVKVMGRHKPENIVIEMARENQTTQKGQKNSRERMKRIEEGIKELGSQILKEHPVENTQLQNEKLYLYYLQNGRDMYVDQELDINRLSDYDVDHIVPQSFLKDDSIDNKVLTRSDKARGKSDNVPSEEVVKKMKNYWRQLLNAKLITQRKFDNLTKAERGGLSELDKAGFIKRQLVETRQITKHVAQILDSRMNTKYDENDKLIREVKVITLKSKLVSDFRKDFQFYKVREINNYHHAHDAYLNAVVGTALIKKYPKLESEFVYGDYKVYDVRKMIAKSEQEIGKATAKYFFYSNIMNFFKTEITLANGEIRKRPLIETNGETGEIVWDKGRDFATVRKVLSMPQVNIVKKTEVQTGGFSKESILPKRNSDKLIARKKDWDPKKYGGFDSPTVAYSVLVVAKVEKGKSKKLKSVKELLGITIMERSSFEKNPIDFLEAKGYKEVKKDLIIKLPKYSLFELENGRKRMLASAGELQKGNELALPSKYVNFLYLASHYEKLKGSPEDNEQKQLFVEQHKHYLDEIIEQISEFSKRVILADANLDKVLSAYNKHRDKPIREQAENIIHLFTLTNLGAPAAFKYFDTTIDRKRYTSTKEVLDATLIHQSITGLYETRIDLSQLGGDGGGGSGSSEAAAKGGTLNIEDEYRLHETSKGPDVPLGSTWLSDFPQAWAETGGMGLAVRQAPLIIPLKATSTPVSIKQYPMSQEARLGIKPHIQRLLDQGILVPCQSPWNTPLLPVKKPGTNDYRPVQDLREVNKRVEDIHPTVPNPYNLLSGLPPSHQWYTVLDLKDAFFCLRLHPTSQSLFAFEWRDPEMGISGQLTWTRLPQGFKNSPTLFNEALHRDLADFRIQHPDLILLQYVDDLLLAATSELDCQQGTRALLQTLGDLGYRASAKKAQICQKQVKYLGYLLKEGQRWLTEARKETVMGQPTPKTPRQLREFLGKAGFCRLFIPGFAEMAAPLYPLTKPGTLFEWGPDQQKAYQEIKQALLTAPALGLPDLTKPFELFVDEKQGYAKGVLTQKLGPWRRPVAYLSKKLDPVAAGWPPCLRMVAAIAVLTKDAGKLTMGQPLVILAPHAVEALVKQPPDRWLSNARMTHYQALLLDTDRVQFGPIVALNPATLLPLPEEGLQHDCLDILAEAHGTRPDLTDQPLPDADHTWYTDGSSFLQEGQRKAGAAVTTETEVVWAKALPAGTSAQRAELIALTQALKMAEGKKLNVYTDSRYAFATAHIHGEIYRRRGWLTSEGKEIKNKDEILALLKALFLPKRLSIIHCPGHQKGNRAEARGNRMADQAAREVATRETPETSTLLAGKRTADGSEFEKRTADGSEFESPKKKAKVE

SEQ ID NO: 2539 - protein, 2090 aa, synthetic construct
MPAAKRVKLDGGDKKYSIGLDIGTNSVGWAVITDEYKVPSKKFKVLGNTDRHSIKKNLIGALLFDSGETAEATRLKRTARRRYTRRKNRICYLQEIFSNEMAKVDDSFFHRLEESFLVEEDKKHERHPIFGNIVDEVAYHEKYPTIYHLRKKLVDSTDKADLRLIYLALAHMIKFRGHFLIEGDLNPDNSDVDKLFIQLVQTYNQLFEENPINASGVDAKAILSARLSKSRRLENLIAQLPGEKKNGLFGNLIALSLGLTPNFKSNFDLAEDAKLQLSKDTYDDDLDNLLAQIGDQYADLFLAAKNLSDAILLSDILRVNTEITKAPLSASMIKRYDEHHQDLTLLKALVRQQLPEKYKEIFFDQSKNGYAGYIDGGASQEEFYKFIKPILEKMDGTEELLVKLNREDLLRKQRTFDNGSIPHQIHLGELHAILRRQEDFYPFLKDNREKIEKILTFRIPYYVGPLARGNSRFAWMTRKSEETITPWNFEEVVDKGASAQSFIERMTNFDKNLPNEKVLPKHSLLYEYFTVYNELTKVKYVTEGMRKPAFLSGEQKKAIVDLLFKTNRKVTVKQLKEDYFKKIECFDSVEISGVEDRFNASLGTYHDLLKIIKDKDFLDNEENEDILEDIVLTLTLFEDREMIEERLKTYAHLFDDKVMKQLKRRRYTGWGRLSRKLINGIRDKQSGKTILDFLKSDGFANRNFMQLIHDDSLTFKEDIQKAQVSGQGDSLHEHIANLAGSPAIKKGILQTVKVVDELVKVMGRHKPENIVIEMARENQTTQKGQKNSRERMKRIEEGIKELGSQILKEHPVENTQLQNEKLYLYYLQNGRDMYVDQELDINRLSDYDVDHIVPQSFLKDDSIDNKVLTRSDKARGKSDNVPSEEVVKKMKNYWRQLLNAKLITQRKFDNLTKAERGGLSELDKAGFIKRQLVETRQITKHVAQILDSRMNTKYDENDKLIREVKVITLKSKLVSDFRKDFQFYKVREINNYHHAHDAYLNAVVGTALIKKYPKLESEFVYGDYKVYDVRKMIAKSEQEIGKATAKYFFYSNIMNFFKTEITLANGEIRKRPLIETNGETGEIVWDKGRDFATVRKVLSMPQVNIVKKTEVQTGGFSKESILPKRNSDKLIARKKDWDPKKYGGFDSPTVAYSVLVVAKVEKGKSKKLKSVKELLGITIMERSSFEKNPIDFLEAKGYKEVKKDLIIKLPKYSLFELENGRKRMLASAGELQKGNELALPSKYVNFLYLASHYEKLKGSPEDNEQKQLFVEQHKHYLDEIIEQISEFSKRVILADANLDKVLSAYNKHRDKPIREQAENIIHLFTLTNLGAPAAFKYFDTTIDRKRYTSTKEVLDATLIHQSITGLYETRIDLSQLGGDGGEAAAKGGTLNIEDEYRLHETSKGPDVPLGSTWLSDFPQAWAETGGMGLAVRQAPLIIPLKATSTPVSIKQYPMSQEARLGIKPHIQRLLDQGILVPCQSPWNTPLLPVKKPGTNDYRPVQDLREVNKRVEDIHPTVPNPYNLLSGLPPSHQWYTVLDLKDAFFCLRLHPTSQSLFAFEWRDPEMGISGQLTWTRLPQGFKNSPTLFNEALHRDLADFRIQHPDLILLQYVDDLLLAATSELDCQQGTRALLQTLGDLGYRASAKKAQICQKQVKYLGYLLKEGQRWLTEARKETVMGQPTPKTPRQLREFLGKAGFCRLFIPGFAEMAAPLYPLTKPGTLFEWGPDQQKAYQEIKQALLTAPALGLPDLTKPFELFVDEKQGYAKGVLTQKLGPWRRPVAYLSKKLDPVAAGWPPCLRMVAAIAVLTKDAGKLTMGQPLVILAPHAVEALVKQPPDRWLSNARMTHYQALLLDTDRVQFGPIVALNPATLLPLPEEGLQHDCLDILAEAHGTRPDLTDQPLPDADHTWYTDGSSFLQEGQRKAGAAVTTETEVVWAKALPAGTSAQRAELIALTQALKMAEGKKLNVYTDSRYAFATAHIHGEIYRRRGWLTSEGKEIKNKDEILALLKALFLPKRLSIIHCPGHQKGNRAEARGNRMADQAAREVATRETPETSTLLAGKRTADGSEFEKRTADGSEFESPKKKAKVE

SEQ ID NO: 2540 - protein, 2091 aa, synthetic construct
MPAAKRVKLDGGDKKYSIGLDIGTNSVGWAVITDEYKVPSKKFKVLGNTDRHSIKKNLIGALLFDSGETAEATRLKRTARRRYTRRKNRICYLQEIFSNEMAKVDDSFFHRLEESFLVEEDKKHERHPIFGNIVDEVAYHEKYPTIYHLRKKLVDSTDKADLRLIYLALAHMIKFRGHFLIEGDLNPDNSDVDKLFIQLVQTYNQLFEENPINASGVDAKAILSARLSKSRRLENLIAQLPGEKKNGLFGNLIALSLGLTPNFKSNFDLAEDAKLQLSKDTYDDDLDNLLAQIGDQYADLFLAAKNLSDAILLSDILRVNTEITKAPLSASMIKRYDEHHQDLTLLKALVRQQLPEKYKEIFFDQSKNGYAGYIDGGASQEEFYKFIKPILEKMDGTEELLVKLNREDLLRKQRTFDNGSIPHQIHLGELHAILRRQEDFYPFLKDNREKIEKILTFRIPYYVGPLARGNSRFAWMTRKSEETITPWNFEEVVDKGASAQSFIERMTNFDKNLPNEKVLPKHSLLYEYFTVYNELTKVKYVTEGMRKPAFLSGEQKKAIVDLLFKTNRKVTVKQLKEDYFKKIECFDSVEISGVEDRFNASLGTYHDLLKIIKDKDFLDNEENEDILEDIVLTLTLFEDREMIEERLKTYAHLFDDKVMKQLKRRRYTGWGRLSRKLINGIRDKQSGKTILDFLKSDGFANRNFMQLIHDDSLTFKEDIQKAQVSGQGDSLHEHIANLAGSPAIKKGILQTVKVVDELVKVMGRHKPENIVIEMARENQTTQKGQKNSRERMKRIEEGIKELGSQILKEHPVENTQLQNEKLYLYYLQNGRDMYVDQELDINRLSDYDVDHIVPQSFLKDDSIDNKVLTRSDKARGKSDNVPSEEVVKKMKNYWRQLLNAKLITQRKFDNLTKAERGGLSELDKAGFIKRQLVETRQITKHVAQILDSRMNTKYDENDKLIREVKVITLKSKLVSDFRKDFQFYKVREINNYHHAHDAYLNAVVGTALIKKYPKLESEFVYGDYKVYDVRKMIAKSEQEIGKATAKYFFYSNIMNFFKTEITLANGEIRKRPLIETNGETGEIVWDKGRDFATVRKVLSMPQVNIVKKTEVQTGGFSKESILPKRNSDKLIARKKDWDPKKYGGFDSPTVAYSVLVVAKVEKGKSKKLKSVKELLGITIMERSSFEKNPIDFLEAKGYKEVKKDLIIKLPKYSLFELENGRKRMLASAGELQKGNELALPSKYVNFLYLASHYEKLKGSPEDNEQKQLFVEQHKHYLDEIIEQISEFSKRVILADANLDKVLSAYNKHRDKPIREQAENIIHLFTLTNLGAPAAFKYFDTTIDRKRYTSTKEVLDATLIHQSITGLYETRIDLSQLGGDGGPAPGGGGGTLNIEDEYRLHETSKGPDVPLGSTWLSDFPQAWAETGGMGLAVRQAPLIIPLKATSTPVSIKQYPMSQEARLGIKPHIQRLLDQGILVPCQSPWNTPLLPVKKPGTNDYRPVQDLREVNKRVEDIHPTVPNPYNLLSGLPPSHQWYTVLDLKDAFFCLRLHPTSQSLFAFEWRDPEMGISGQLTWTRLPQGFKNSPTLFNEALHRDLADFRIQHPDLILLQYVDDLLLAATSELDCQQGTRALLQTLGDLGYRASAKKAQICQKQVKYLGYLLKEGQRWLTEARKETVMGQPTPKTPRQLREFLGKAGFCRLFIPGFAEMAAPLYPLTKPGTLFEWGPDQQKAYQEIKQALLTAPALGLPDLTKPFELFVDEKQGYAKGVLTQKLGPWRRPVAYLSKKLDPVAAGWPPCLRMVAAIAVLTKDAGKLTMGQPLVILAPHAVEALVKQPPDRWLSNARMTHYQALLLDTDRVQFGPIVALNPATLLPLPEEGLQHDCLDILAEAHGTRPDLTDQPLPDADHTWYTDGSSFLQEGQRKAGAAVTTETEVVWAKALPAGTSAQRAELIALTQALKMAEGKKLNVYTDSRYAFATAHIHGEIYRRRGWLTSEGKEIKNKDEILALLKALFLPKRLSIIHCPGHQKGNRAEARGNRMADQAAREVATRETPETSTLLAGKRTADGSEFEKRTADGSEFESPKKKAKVE

SEQ ID NO: 2541 - protein, 2115 aa, synthetic construct
MPAAKRVKLDGGDKKYSIGLDIGTNSVGWAVITDEYKVPSKKFKVLGNTDRHSIKKNLIGALLFDSGETAEATRLKRTARRRYTRRKNRICYLQEIFSNEMAKVDDSFFHRLEESFLVEEDKKHERHPIFGNIVDEVAYHEKYPTIYHLRKKLVDSTDKADLRLIYLALAHMIKFRGHFLIEGDLNPDNSDVDKLFIQLVQTYNQLFEENPINASGVDAKAILSARLSKSRRLENLIAQLPGEKKNGLFGNLIALSLGLTPNFKSNFDLAEDAKLQLSKDTYDDDLDNLLAQIGDQYADLFLAAKNLSDAILLSDILRVNTEITKAPLSASMIKRYDEHHQDLTLLKALVRQQLPEKYKEIFFDQSKNGYAGYIDGGASQEEFYKFIKPILEKMDGTEELLVKLNREDLLRKQRTFDNGSIPHQIHLGELHAILRRQEDFYPFLKDNREKIEKILTFRIPYYVGPLARGNSRFAWMTRKSEETITPWNFEEVVDKGASAQSFIERMTNFDKNLPNEKVLPKHSLLYEYFTVYNELTKVKYVTEGMRKPAFLSGEQKKAIVDLLFKTNRKVTVKQLKEDYFKKIECFDSVEISGVEDRFNASLGTYHDLLKIIKDKDFLDNEENEDILEDIVLTLTLFEDREMIEERLKTYAHLFDDKVMKQLKRRRYTGWGRLSRKLINGIRDKQSGKTILDFLKSDGFANRNFMQLIHDDSLTFKEDIQKAQVSGQGDSLHEHIANLAGSPAIKKGILQTVKVVDELVKVMGRHKPENIVIEMARENQTTQKGQKNSRERMKRIEEGIKELGSQILKEHPVENTQLQNEKLYLYYLQNGRDMYVDQELDINRLSDYDVDHIVPQSFLKDDSIDNKVLTRSDKARGKSDNVPSEEVVKKMKNYWRQLLNAKLITQRKFDNLTKAERGGLSELDKAGFIKRQLVETRQITKHVAQILDSRMNTKYDENDKLIREVKVITLKSKLVSDFRKDFQFYKVREINNYHHAHDAYLNAVVGTALIKKYPKLESEFVYGDYKVYDVRKMIAKSEQEIGKATAKYFFYSNIMNFFKTEITLANGEIRKRPLIETNGETGEIVWDKGRDFATVRKVLSMPQVNIVKKTEVQTGGFSKESILPKRNSDKLIARKKDWDPKKYGGFDSPTVAYSVLVVAKVEKGKSKKLKSVKELLGITIMERSSFEKNPIDFLEAKGYKEVKKDLIIKLPKYSLFELENGRKRMLASAGELQKGNELALPSKYVNFLYLASHYEKLKGSPEDNEQKQLFVEQHKHYLDEIIEQISEFSKRVILADANLDKVLSAYNKHRDKPIREQAENIIHLFTLTNLGAPAAFKYFDTTIDRKRYTSTKEVLDATLIHQSITGLYETRIDLSQLGGDGGEAAAKEAAAKEAAAKEAAAKEAAAKEAAAKGGTLNIEDEYRLHETSKGPDVPLGSTWLSDFPQAWAETGGMGLAVRQAPLIIPLKATSTPVSIKQYPMSQEARLGIKPHIQRLLDQGILVPCQSPWNTPLLPVKKPGTNDYRPVQDLREVNKRVEDIHPTVPNPYNLLSGLPPSHQWYTVLDLKDAFFCLRLHPTSQSLFAFEWRDPEMGISGQLTWTRLPQGFKNSPTLFNEALHRDLADFRIQHPDLILLQYVDDLLLAATSELDCQQGTRALLQTLGDLGYRASAKKAQICQKQVKYLGYLLKEGQRWLTEARKETVMGQPTPKTPRQLREFLGKAGFCRLFIPGFAEMAAPLYPLTKPGTLFEWGPDQQKAYQEIKQALLTAPALGLPDLTKPFELFVDEKQGYAKGVLTQKLGPWRRPVAYLSKKLDPVAAGWPPCLRMVAAIAVLTKDAGKLTMGQPLVILAPHAVEALVKQPPDRWLSNARMTHYQALLLDTDRVQFGPIVALNPATLLPLPEEGLQHDCLDILAEAHGTRPDLTDQPLPDADHTWYTDGSSFLQEGQRKAGAAVTTETEVVWAKALPAGTSAQRAELIALTQALKMAEGKKLNVYTDSRYAFATAHIHGEIYRRRGWLTSEGKEIKNKDEILALLKALFLPKRLSIIHCPGHQKGNRAEARGNRMADQAAREVATRETPETSTLLAGKRTADGSEFEKRTADGSEFESPKKKAKVE

SEQ ID NO: 2542 - protein, 2096 aa, synthetic construct
MPAAKRVKLDGGDKKYSIGLDIGTNSVGWAVITDEYKVPSKKFKVLGNTDRHSIKKNLIGALLFDSGETAEATRLKRTARRRYTRRKNRICYLQEIFSNEMAKVDDSFFHRLEESFLVEEDKKHERHPIFGNIVDEVAYHEKYPTIYHLRKKLVDSTDKADLRLIYLALAHMIKFRGHFLIEGDLNPDNSDVDKLFIQLVQTYNQLFEENPINASGVDAKAILSARLSKSRRLENLIAQLPGEKKNGLFGNLIALSLGLTPNFKSNFDLAEDAKLQLSKDTYDDDLDNLLAQIGDQYADLFLAAKNLSDAILLSDILRVNTEITKAPLSASMIKRYDEHHQDLTLLKALVRQQLPEKYKEIFFDQSKNGYAGYIDGGASQEEFYKFIKPILEKMDGTEELLVKLNREDLLRKQRTFDNGSIPHQIHLGELHAILRRQEDFYPFLKDNREKIEKILTFRIPYYVGPLARGNSRFAWMTRKSEETITPWNFEEVVDKGASAQSFIERMTNFDKNLPNEKVLPKHSLLYEYFTVYNELTKVKYVTEGMRKPAFLSGEQKKAIVDLLFKTNRKVTVKQLKEDYFKKIECFDSVEISGVEDRFNASLGTYHDLLKIIKDKDFLDNEENEDILEDIVLTLTLFEDREMIEERLKTYAHLFDDKVMKQLKRRRYTGWGRLSRKLINGIRDKQSGKTILDFLKSDGFANRNFMQLIHDDSLTFKEDIQKAQVSGQGDSLHEHIANLAGSPAIKKGILQTVKVVDELVKVMGRHKPENIVIEMARENQTTQKGQKNSRERMKRIEEGIKELGSQILKEHPVENTQLQNEKLYLYYLQNGRDMYVDQELDINRLSDYDVDHIVPQSFLKDDSIDNKVLTRSDKARGKSDNVPSEEVVKKMKNYWRQLLNAKLITQRKFDNLTKAERGGLSELDKAGFIKRQLVETRQITKHVAQILDSRMNTKYDENDKLIREVKVITLKSKLVSDFRKDFQFYKVREINNYHHAHDAYLNAVVGTALIKKYPKLESEFVYGDYKVYDVRKMIAKSEQEIGKATAKYFFYSNIMNFFKTEITLANGEIRKRPLIETNGETGEIVWDKGRDFATVRKVLSMPQVNIVKKTEVQTGGFSKESILPKRNSDKLIARKKDWDPKKYGGFDSPTVAYSVLVVAKVEKGKSKKLKSVKELLGITIMERSSFEKNPIDFLEAKGYKEVKKDLIIKLPKYSLFELENGRKRMLASAGELQKGNELALPSKYVNFLYLASHYEKLKGSPEDNEQKQLFVEQHKHYLDEIIEQISEFSKRVILADANLDKVLSAYNKHRDKPIREQAENIIHLFTLTNLGAPAAFKYFDTTIDRKRYTSTKEVLDATLIHQSITGLYETRIDLSQLGGDGGPAPGSSEAAAKGGTLNIEDEYRLHETSKGPDVPLGSTWLSDFPQAWAETGGMGLAVRQAPLIIPLKATSTPVSIKQYPMSQEARLGIKPHIQRLLDQGILVPCQSPWNTPLLPVKKPGTNDYRPVQDLREVNKRVEDIHPTVPNPYNLLSGLPPSHQWYTVLDLKDAFFCLRLHPTSQSLFAFEWRDPEMGISGQLTWTRLPQGFKNSPTLFNEALHRDLADFRIQHPDLILLQYVDDLLLAATSELDCQQGTRALLQTLGDLGYRASAKKAQICQKQVKYLGYLLKEGQRWLTEARKETVMGQPTPKTPRQLREFLGKAGFCRLFIPGFAEMAAPLYPLTKPGTLFEWGPDQQKAYQEIKQALLTAPALGLPDLTKPFELFVDEKQGYAKGVLTQKLGPWRRPVAYLSKKLDPVAAGWPPCLRMVAAIAVLTKDAGKLTMGQPLVILAPHAVEALVKQPPDRWLSNARMTHYQALLLDTDRVQFGPIVALNPATLLPLPEEGLQHDCLDILAEAHGTRPDLTDQPLPDADHTWYTDGSSFLQEGQRKAGAAVTTETEVVWAKALPAGTSAQRAELIALTQALKMAEGKKLNVYTDSRYAFATAHIHGEIYRRRGWLTSEGKEIKNKDEILALLKALFLPKRLSIIHCPGHQKGNRAEARGNRMADQAAREVATRETPETSTLLAGKRTADGSEFEKRTADGSEFESPKKKAKVE

SEQ ID NO: 2543 - protein, 2094 aa, synthetic construct
MPAAKRVKLDGGDKKYSIGLDIGTNSVGWAVITDEYKVPSKKFKVLGNTDRHSIKKNLIGALLFDSGETAEATRLKRTARRRYTRRKNRICYLQEIFSNEMAKVDDSFFHRLEESFLVEEDKKHERHPIFGNIVDEVAYHEKYPTIYHLRKKLVDSTDKADLRLIYLALAHMIKFRGHFLIEGDLNPDNSDVDKLFIQLVQTYNQLFEENPINASGVDAKAILSARLSKSRRLENLIAQLPGEKKNGLFGNLIALSLGLTPNFKSNFDLAEDAKLQLSKDTYDDDLDNLLAQIGDQYADLFLAAKNLSDAILLSDILRVNTEITKAPLSASMIKRYDEHHQDLTLLKALVRQQLPEKYKEIFFDQSKNGYAGYIDGGASQEEFYKFIKPILEKMDGTEELLVKLNREDLLRKQRTFDNGSIPHQIHLGELHAILRRQEDFYPFLKDNREKIEKILTFRIPYYVGPLARGNSRFAWMTRKSEETITPWNFEEVVDKGASAQSFIERMTNFDKNLPNEKVLPKHSLLYEYFTVYNELTKVKYVTEGMRKPAFLSGEQKKAIVDLLFKTNRKVTVKQLKEDYFKKIECFDSVEISGVEDRFNASLGTYHDLLKIIKDKDFLDNEENEDILEDIVLTLTLFEDREMIEERLKTYAHLFDDKVMKQLKRRRYTGWGRLSRKLINGIRDKQSGKTILDFLKSDGFANRNFMQLIHDDSLTFKEDIQKAQVSGQGDSLHEHIANLAGSPAIKKGILQTVKVVDELVKVMGRHKPENIVIEMARENQTTQKGQKNSRERMKRIEEGIKELGSQILKEHPVENTQLQNEKLYLYYLQNGRDMYVDQELDINRLSDYDVDHIVPQSFLKDDSIDNKVLTRSDKARGKSDNVPSEEVVKKMKNYWRQLLNAKLITQRKFDNLTKAERGGLSELDKAGFIKRQLVETRQITKHVAQILDSRMNTKYDENDKLIREVKVITLKSKLVSDFRKDFQFYKVREINNYHHAHDAYLNAVVGTALIKKYPKLESEFVYGDYKVYDVRKMIAKSEQEIGKATAKYFFYSNIMNFFKTEITLANGEIRKRPLIETNGETGEIVWDKGRDFATVRKVLSMPQVNIVKKTEVQTGGFSKESILPKRNSDKLIARKKDWDPKKYGGFDSPTVAYSVLVVAKVEKGKSKKLKSVKELLGITIMERSSFEKNPIDFLEAKGYKEVKKDLIIKLPKYSLFELENGRKRMLASAGELQKGNELALPSKYVNFLYLASHYEKLKGSPEDNEQKQLFVEQHKHYLDEIIEQISEFSKRVILADANLDKVLSAYNKHRDKPIREQAENIIHLFTLTNLGAPAAFKYFDTTIDRKRYTSTKEVLDATLIHQSITGLYETRIDLSQLGGDGGGGGPAPGGSGGTLNIEDEYRLHETSKGPDVPLGSTWLSDFPQAWAETGGMGLAVRQAPLIIPLKATSTPVSIKQYPMSQEARLGIKPHIQRLLDQGILVPCQSPWNTPLLPVKKPGTNDYRPVQDLREVNKRVEDIHPTVPNPYNLLSGLPPSHQWYTVLDLKDAFFCLRLHPTSQSLFAFEWRDPEMGISGQLTWTRLPQGFKNSPTLFNEALHRDLADFRIQHPDLILLQYVDDLLLAATSELDCQQGTRALLQTLGDLGYRASAKKAQICQKQVKYLGYLLKEGQRWLTEARKETVMGQPTPKTPRQLREFLGKAGFCRLFIPGFAEMAAPLYPLTKPGTLFEWGPDQQKAYQEIKQALLTAPALGLPDLTKPFELFVDEKQGYAKGVLTQKLGPWRRPVAYLSKKLDPVAAGWPPCLRMVAAIAVLTKDAGKLTMGQPLVILAPHAVEALVKQPPDRWLSNARMTHYQALLLDTDRVQFGPIVALNPATLLPLPEEGLQHDCLDILAEAHGTRPDLTDQPLPDADHTWYTDGSSFLQEGQRKAGAAVTTETEVVWAKALPAGTSAQRAELIALTQALKMAEGKKLNVYTDSRYAFATAHIHGEIYRRRGWLTSEGKEIKNKDEILALLKALFLPKRLSIIHCPGHQKGNRAEARGNRMADQAAREVATRETPETSTLLAGKRTADGSEFEKRTADGSEFESPKKKAKVE

SEQ ID NO: 2544 - protein, 2097 aa, synthetic construct
MPAAKRVKLDGGDKKYSIGLDIGTNSVGWAVITDEYKVPSKKFKVLGNTDRHSIKKNLIGALLFDSGETAEATRLKRTARRRYTRRKNRICYLQEIFSNEMAKVDDSFFHRLEESFLVEEDKKHERHPIFGNIVDEVAYHEKYPTIYHLRKKLVDSTDKADLRLIYLALAHMIKFRGHFLIEGDLNPDNSDVDKLFIQLVQTYNQLFEENPINASGVDAKAILSARLSKSRRLENLIAQLPGEKKNGLFGNLIALSLGLTPNFKSNFDLAEDAKLQLSKDTYDDDLDNLLAQIGDQYADLFLAAKNLSDAILLSDILRVNTEITKAPLSASMIKRYDEHHQDLTLLKALVRQQLPEKYKEIFFDQSKNGYAGYIDGGASQEEFYKFIKPILEKMDGTEELLVKLNREDLLRKQRTFDNGSIPHQIHLGELHAILRRQEDFYPFLKDNREKIEKILTFRIPYYVGPLARGNSRFAWMTRKSEETITPWNFEEVVDKGASAQSFIERMTNFDKNLPNEKVLPKHSLLYEYFTVYNELTKVKYVTEGMRKPAFLSGEQKKAIVDLLFKTNRKVTVKQLKEDYFKKIECFDSVEISGVEDRFNASLGTYHDLLKIIKDKDFLDNEENEDILEDIVLTLTLFEDREMIEERLKTYAHLFDDKVMKQLKRRRYTGWGRLSRKLINGIRDKQSGKTILDFLKSDGFANRNFMQLIHDDSLTFKEDIQKAQVSGQGDSLHEHIANLAGSPAIKKGILQTVKVVDELVKVMGRHKPENIVIEMARENQTTQKGQKNSRERMKRIEEGIKELGSQILKEHPVENTQLQNEKLYLYYLQNGRDMYVDQELDINRLSDYDVDHIVPQSFLKDDSIDNKVLTRSDKARGKSDNVPSEEVVKKMKNYWRQLLNAKLITQRKFDNLTKAERGGLSELDKAGFIKRQLVETRQITKHVAQILDSRMNTKYDENDKLIREVKVITLKSKLVSDFRKDFQFYKVREINNYHHAHDAYLNAVVGTALIKKYPKLESEFVYGDYKVYDVRKMIAKSEQEIGKATAKYFFYSNIMNFFKTEITLANGEIRKRPLIETNGETGEIVWDKGRDFATVRKVLSMPQVNIVKKTEVQTGGFSKESILPKRNSDKLIARKKDWDPKKYGGFDSPTVAYSVLVVAKVEKGKSKKLKSVKELLGITIMERSSFEKNPIDFLEAKGYKEVKKDLIIKLPKYSLFELENGRKRMLASAGELQKGNELALPSKYVNFLYLASHYEKLKGSPEDNEQKQLFVEQHKHYLDEIIEQISEFSKRVILADANLDKVLSAYNKHRDKPIREQAENIIHLFTLTNLGAPAAFKYFDTTIDRKRYTSTKEVLDATLIHQSITGLYETRIDLSQLGGDGGGGSGGSGGSGGSGGTLNIEDEYRLHETSKGPDVPLGSTWLSDFPQAWAETGGMGLAVRQAPLIIPLKATSTPVSIKQYPMSQEARLGIKPHIQRLLDQGILVPCQSPWNTPLLPVKKPGTNDYRPVQDLREVNKRVEDIHPTVPNPYNLLSGLPPSHQWYTVLDLKDAFFCLRLHPTSQSLFAFEWRDPEMGISGQLTWTRLPQGFKNSPTLFNEALHRDLADFRIQHPDLILLQYVDDLLLAATSELDCQQGTRALLQTLGDLGYRASAKKAQICQKQVKYLGYLLKEGQRWLTEARKETVMGQPTPKTPRQLREFLGKAGFCRLFIPGFAEMAAPLYPLTKPGTLFEWGPDQQKAYQEIKQALLTAPALGLPDLTKPFELFVDEKQGYAKGVLTQKLGPWRRPVAYLSKKLDPVAAGWPPCLRMVAAIAVLTKDAGKLTMGQPLVILAPHAVEALVKQPPDRWLSNARMTHYQALLLDTDRVQFGPIVALNPATLLPLPEEGLQHDCLDILAEAHGTRPDLTDQPLPDADHTWYTDGSSFLQEGQRKAGAAVTTETEVVWAKALPAGTSAQRAELIALTQALKMAEGKKLNVYTDSRYAFATAHIHGEIYRRRGWLTSEGKEIKNKDEILALLKALFLPKRLSIIHCPGHQKGNRAEARGNRMADQAAREVATRETPETSTLLAGKRTADGSEFEKRTADGSEFESPKKKAKVE

SEQ ID NO: 2545 - protein, 2094 aa, synthetic construct
MPAAKRVKLDGGDKKYSIGLDIGTNSVGWAVITDEYKVPSKKFKVLGNTDRHSIKKNLIGALLFDSGETAEATRLKRTARRRYTRRKNRICYLQEIFSNEMAKVDDSFFHRLEESFLVEEDKKHERHPIFGNIVDEVAYHEKYPTIYHLRKKLVDSTDKADLRLIYLALAHMIKFRGHFLIEGDLNPDNSDVDKLFIQLVQTYNQLFEENPINASGVDAKAILSARLSKSRRLENLIAQLPGEKKNGLFGNLIALSLGLTPNFKSNFDLAEDAKLQLSKDTYDDDLDNLLAQIGDQYADLFLAAKNLSDAILLSDILRVNTEITKAPLSASMIKRYDEHHQDLTLLKALVRQQLPEKYKEIFFDQSKNGYAGYIDGGASQEEFYKFIKPILEKMDGTEELLVKLNREDLLRKQRTFDNGSIPHQIHLGELHAILRRQEDFYPFLKDNREKIEKILTFRIPYYVGPLARGNSRFAWMTRKSEETITPWNFEEVVDKGASAQSFIERMTNFDKNLPNEKVLPKHSLLYEYFTVYNELTKVKYVTEGMRKPAFLSGEQKKAIVDLLFKTNRKVTVKQLKEDYFKKIECFDSVEISGVEDRFNASLGTYHDLLKIIKDKDFLDNEENEDILEDIVLTLTLFEDREMIEERLKTYAHLFDDKVMKQLKRRRYTGWGRLSRKLINGIRDKQSGKTILDFLKSDGFANRNFMQLIHDDSLTFKEDIQKAQVSGQGDSLHEHIANLAGSPAIKKGILQTVKVVDELVKVMGRHKPENIVIEMARENQTTQKGQKNSRERMKRIEEGIKELGSQILKEHPVENTQLQNEKLYLYYLQNGRDMYVDQELDINRLSDYDVDHIVPQSFLKDDSIDNKVLTRSDKARGKSDNVPSEEVVKKMKNYWRQLLNAKLITQRKFDNLTKAERGGLSELDKAGFIKRQLVETRQITKHVAQILDSRMNTKYDENDKLIREVKVITLKSKLVSDFRKDFQFYKVREINNYHHAHDAYLNAVVGTALIKKYPKLESEFVYGDYKVYDVRKMIAKSEQEIGKATAKYFFYSNIMNFFKTEITLANGEIRKRPLIETNGETGEIVWDKGRDFATVRKVLSMPQVNIVKKTEVQTGGFSKESILPKRNSDKLIARKKDWDPKKYGGFDSPTVAYSVLVVAKVEKGKSKKLKSVKELLGITIMERSSFEKNPIDFLEAKGYKEVKKDLIIKLPKYSLFELENGRKRMLASAGELQKGNELALPSKYVNFLYLASHYEKLKGSPEDNEQKQLFVEQHKHYLDEIIEQISEFSKRVILADANLDKVLSAYNKHRDKPIREQAENIIHLFTLTNLGAPAAFKYFDTTIDRKRYTSTKEVLDATLIHQSITGLYETRIDLSQLGGDGGGGSGSSGGGGGTLNIEDEYRLHETSKGPDVPLGSTWLSDFPQAWAETGGMGLAVRQAPLIIPLKATSTPVSIKQYPMSQEARLGIKPHIQRLLDQGILVPCQSPWNTPLLPVKKPGTNDYRPVQDLREVNKRVEDIHPTVPNPYNLLSGLPPSHQWYTVLDLKDAFFCLRLHPTSQSLFAFEWRDPEMGISGQLTWTRLPQGFKNSPTLFNEALHRDLADFRIQHPDLILLQYVDDLLLAATSELDCQQGTRALLQTLGDLGYRASAKKAQICQKQVKYLGYLLKEGQRWLTEARKETVMGQPTPKTPRQLREFLGKAGFCRLFIPGFAEMAAPLYPLTKPGTLFEWGPDQQKAYQEIKQALLTAPALGLPDLTKPFELFVDEKQGYAKGVLTQKLGPWRRPVAYLSKKLDPVAAGWPPCLRMVAAIAVLTKDAGKLTMGQPLVILAPHAVEALVKQPPDRWLSNARMTHYQALLLDTDRVQFGPIVALNPATLLPLPEEGLQHDCLDILAEAHGTRPDLTDQPLPDADHTWYTDGSSFLQEGQRKAGAAVTTETEVVWAKALPAGTSAQRAELIALTQALKMAEGKKLNVYTDSRYAFATAHIHGEIYRRRGWLTSEGKEIKNKDEILALLKALFLPKRLSIIHCPGHQKGNRAEARGNRMADQAAREVATRETPETSTLLAGKRTADGSEFEKRTADGSEFESPKKKAKVE

SEQ ID NO: 2546 - protein, 2091 aa, synthetic construct
MPAAKRVKLDGGDKKYSIGLDIGTNSVGWAVITDEYKVPSKKFKVLGNTDRHSIKKNLIGALLFDSGETAEATRLKRTARRRYTRRKNRICYLQEIFSNEMAKVDDSFFHRLEESFLVEEDKKHERHPIFGNIVDEVAYHEKYPTIYHLRKKLVDSTDKADLRLIYLALAHMIKFRGHFLIEGDLNPDNSDVDKLFIQLVQTYNQLFEENPINASGVDAKAILSARLSKSRRLENLIAQLPGEKKNGLFGNLIALSLGLTPNFKSNFDLAEDAKLQLSKDTYDDDLDNLLAQIGDQYADLFLAAKNLSDAILLSDILRVNTEITKAPLSASMIKRYDEHHQDLTLLKALVRQQLPEKYKEIFFDQSKNGYAGYIDGGASQEEFYKFIKPILEKMDGTEELLVKLNREDLLRKQRTFDNGSIPHQIHLGELHAILRRQEDFYPFLKDNREKIEKILTFRIPYYVGPLARGNSRFAWMTRKSEETITPWNFEEVVDKGASAQSFIERMTNFDKNLPNEKVLPKHSLLYEYFTVYNELTKVKYVTEGMRKPAFLSGEQKKAIVDLLFKTNRKVTVKQLKEDYFKKIECFDSVEISGVEDRFNASLGTYHDLLKIIKDKDFLDNEENEDILEDIVLTLTLFEDREMIEERLKTYAHLFDDKVMKQLKRRRYTGWGRLSRKLINGIRDKQSGKTILDFLKSDGFANRNFMQLIHDDSLTFKEDIQKAQVSGQGDSLHEHIANLAGSPAIKKGILQTVKVVDELVKVMGRHKPENIVIEMARENQTTQKGQKNSRERMKRIEEGIKELGSQILKEHPVENTQLQNEKLYLYYLQNGRDMYVDQELDINRLSDYDVDHIVPQSFLKDDSIDNKVLTRSDKARGKSDNVPSEEVVKKMKNYWRQLLNAKLITQRKFDNLTKAERGGLSELDKAGFIKRQLVETRQITKHVAQILDSRMNTKYDENDKLIREVKVITLKSKLVSDFRKDFQFYKVREINNYHHAHDAYLNAVVGTALIKKYPKLESEFVYGDYKVYDVRKMIAKSEQEIGKATAKYFFYSNIMNFFKTEITLANGEIRKRPLIETNGETGEIVWDKGRDFATVRKVLSMPQVNIVKKTEVQTGGFSKESILPKRNSDKLIARKKDWDPKKYGGFDSPTVAYSVLVVAKVEKGKSKKLKSVKELLGITIMERSSFEKNPIDFLEAKGYKEVKKDLIIKLPKYSLFELENGRKRMLASAGELQKGNELALPSKYVNFLYLASHYEKLKGSPEDNEQKQLFVEQHKHYLDEIIEQISEFSKRVILADANLDKVLSAYNKHRDKPIREQAENIIHLFTLTNLGAPAAFKYFDTTIDRKRYTSTKEVLDATLIHQSITGLYETRIDLSQLGGDGGPAPGGSGGTLNIEDEYRLHETSKGPDVPLGSTWLSDFPQAWAETGGMGLAVRQAPLIIPLKATSTPVSIKQYPMSQEARLGIKPHIQRLLDQGILVPCQSPWNTPLLPVKKPGTNDYRPVQDLREVNKRVEDIHPTVPNPYNLLSGLPPSHQWYTVLDLKDAFFCLRLHPTSQSLFAFEWRDPEMGISGQLTWTRLPQGFKNSPTLFNEALHRDLADFRIQHPDLILLQYVDDLLLAATSELDCQQGTRALLQTLGDLGYRASAKKAQICQKQVKYLGYLLKEGQRWLTEARKETVMGQPTPKTPRQLREFLGKAGFCRLFIPGFAEMAAPLYPLTKPGTLFEWGPDQQKAYQEIKQALLTAPALGLPDLTKPFELFVDEKQGYAKGVLTQKLGPWRRPVAYLSKKLDPVAAGWPPCLRMVAAIAVLTKDAGKLTMGQPLVILAPHAVEALVKQPPDRWLSNARMTHYQALLLDTDRVQFGPIVALNPATLLPLPEEGLQHDCLDILAEAHGTRPDLTDQPLPDADHTWYTDGSSFLQEGQRKAGAAVTTETEVVWAKALPAGTSAQRAELIALTQALKMAEGKKLNVYTDSRYAFATAHIHGEIYRRRGWLTSEGKEIKNKDEILALLKALFLPKRLSIIHCPGHQKGNRAEARGNRMADQAAREVATRETPETSTLLAGKRTADGSEFEKRTADGSEFESPKKKAKVE

SEQ ID NO: 2547 - protein, 2091 aa, synthetic construct
MPAAKRVKLDGGDKKYSIGLDIGTNSVGWAVITDEYKVPSKKFKVLGNTDRHSIKKNLIGALLFDSGETAEATRLKRTARRRYTRRKNRICYLQEIFSNEMAKVDDSFFHRLEESFLVEEDKKHERHPIFGNIVDEVAYHEKYPTIYHLRKKLVDSTDKADLRLIYLALAHMIKFRGHFLIEGDLNPDNSDVDKLFIQLVQTYNQLFEENPINASGVDAKAILSARLSKSRRLENLIAQLPGEKKNGLFGNLIALSLGLTPNFKSNFDLAEDAKLQLSKDTYDDDLDNLLAQIGDQYADLFLAAKNLSDAILLSDILRVNTEITKAPLSASMIKRYDEHHQDLTLLKALVRQQLPEKYKEIFFDQSKNGYAGYIDGGASQEEFYKFIKPILEKMDGTEELLVKLNREDLLRKQRTFDNGSIPHQIHLGELHAILRRQEDFYPFLKDNREKIEKILTFRIPYYVGPLARGNSRFAWMTRKSEETITPWNFEEVVDKGASAQSFIERMTNFDKNLPNEKVLPKHSLLYEYFTVYNELTKVKYVTEGMRKPAFLSGEQKKAIVDLLFKTNRKVTVKQLKEDYFKKIECFDSVEISGVEDRFNASLGTYHDLLKIIKDKDFLDNEENEDILEDIVLTLTLFEDREMIEERLKTYAHLFDDKVMKQLKRRRYTGWGRLSRKLINGIRDKQSGKTILDFLKSDGFANRNFMQLIHDDSLTFKEDIQKAQVSGQGDSLHEHIANLAGSPAIKKGILQTVKVVDELVKVMGRHKPENIVIEMARENQTTQKGQKNSRERMKRIEEGIKELGSQILKEHPVENTQLQNEKLYLYYLQNGRDMYVDQELDINRLSDYDVDHIVPQSFLKDDSIDNKVLTRSDKARGKSDNVPSEEVVKKMKNYWRQLLNAKLITQRKFDNLTKAERGGLSELDKAGFIKRQLVETRQITKHVAQILDSRMNTKYDENDKLIREVKVITLKSKLVSDFRKDFQFYKVREINNYHHAHDAYLNAVVGTALIKKYPKLESEFVYGDYKVYDVRKMIAKSEQEIGKATAKYFFYSNIMNFFKTEITLANGEIRKRPLIETNGETGEIVWDKGRDFATVRKVLSMPQVNIVKKTEVQTGGFSKESILPKRNSDKLIARKKDWDPKKYGGFDSPTVAYSVLVVAKVEKGKSKKLKSVKELLGITIMERSSFEKNPIDFLEAKGYKEVKKDLIIKLPKYSLFELENGRKRMLASAGELQKGNELALPSKYVNFLYLASHYEKLKGSPEDNEQKQLFVEQHKHYLDEIIEQISEFSKRVILADANLDKVLSAYNKHRDKPIREQAENIIHLFTLTNLGAPAAFKYFDTTIDRKRYTSTKEVLDATLIHQSITGLYETRIDLSQLGGDGGGGGPAPGGTLNIEDEYRLHETSKGPDVPLGSTWLSDFPQAWAETGGMGLAVRQAPLIIPLKATSTPVSIKQYPMSQEARLGIKPHIQRLLDQGILVPCQSPWNTPLLPVKKPGTNDYRPVQDLREVNKRVEDIHPTVPNPYNLLSGLPPSHQWYTVLDLKDAFFCLRLHPTSQSLFAFEWRDPEMGISGQLTWTRLPQGFKNSPTLFNEALHRDLADFRIQHPDLILLQYVDDLLLAATSELDCQQGTRALLQTLGDLGYRASAKKAQICQKQVKYLGYLLKEGQRWLTEARKETVMGQPTPKTPRQLREFLGKAGFCRLFIPGFAEMAAPLYPLTKPGTLFEWGPDQQKAYQEIKQALLTAPALGLPDLTKPFELFVDEKQGYAKGVLTQKLGPWRRPVAYLSKKLDPVAAGWPPCLRMVAAIAVLTKDAGKLTMGQPLVILAPHAVEALVKQPPDRWLSNARMTHYQALLLDTDRVQFGPIVALNPATLLPLPEEGLQHDCLDILAEAHGTRPDLTDQPLPDADHTWYTDGSSFLQEGQRKAGAAVTTETEVVWAKALPAGTSAQRAELIALTQALKMAEGKKLNVYTDSRYAFATAHIHGEIYRRRGWLTSEGKEIKNKDEILALLKALFLPKRLSIIHCPGHQKGNRAEARGNRMADQAAREVATRETPETSTLLAGKRTADGSEFEKRTADGSEFESPKKKAKVE

SEQ ID NO: 2548 - protein, 2096 aa, synthetic construct
MPAAKRVKLDGGDKKYSIGLDIGTNSVGWAVITDEYKVPSKKFKVLGNTDRHSIKKNLIGALLFDSGETAEATRLKRTARRRYTRRKNRICYLQEIFSNEMAKVDDSFFHRLEESFLVEEDKKHERHPIFGNIVDEVAYHEKYPTIYHLRKKLVDSTDKADLRLIYLALAHMIKFRGHFLIEGDLNPDNSDVDKLFIQLVQTYNQLFEENPINASGVDAKAILSARLSKSRRLENLIAQLPGEKKNGLFGNLIALSLGLTPNFKSNFDLAEDAKLQLSKDTYDDDLDNLLAQIGDQYADLFLAAKNLSDAILLSDILRVNTEITKAPLSASMIKRYDEHHQDLTLLKALVRQQLPEKYKEIFFDQSKNGYAGYIDGGASQEEFYKFIKPILEKMDGTEELLVKLNREDLLRKQRTFDNGSIPHQIHLGELHAILRRQEDFYPFLKDNREKIEKILTFRIPYYVGPLARGNSRFAWMTRKSEETITPWNFEEVVDKGASAQSFIERMTNFDKNLPNEKVLPKHSLLYEYFTVYNELTKVKYVTEGMRKPAFLSGEQKKAIVDLLFKTNRKVTVKQLKEDYFKKIECFDSVEISGVEDRFNASLGTYHDLLKIIKDKDFLDNEENEDILEDIVLTLTLFEDREMIEERLKTYAHLFDDKVMKQLKRRRYTGWGRLSRKLINGIRDKQSGKTILDFLKSDGFANRNFMQLIHDDSLTFKEDIQKAQVSGQGDSLHEHIANLAGSPAIKKGILQTVKVVDELVKVMGRHKPENIVIEMARENQTTQKGQKNSRERMKRIEEGIKELGSQILKEHPVENTQLQNEKLYLYYLQNGRDMYVDQELDINRLSDYDVDHIVPQSFLKDDSIDNKVLTRSDKARGKSDNVPSEEVVKKMKNYWRQLLNAKLITQRKFDNLTKAERGGLSELDKAGFIKRQLVETRQITKHVAQILDSRMNTKYDENDKLIREVKVITLKSKLVSDFRKDFQFYKVREINNYHHAHDAYLNAVVGTALIKKYPKLESEFVYGDYKVYDVRKMIAKSEQEIGKATAKYFFYSNIMNFFKTEITLANGEIRKRPLIETNGETGEIVWDKGRDFATVRKVLSMPQVNIVKKTEVQTGGFSKESILPKRNSDKLIARKKDWDPKKYGGFDSPTVAYSVLVVAKVEKGKSKKLKSVKELLGITIMERSSFEKNPIDFLEAKGYKEVKKDLIIKLPKYSLFELENGRKRMLASAGELQKGNELALPSKYVNFLYLASHYEKLKGSPEDNEQKQLFVEQHKHYLDEIIEQISEFSKRVILADANLDKVLSAYNKHRDKPIREQAENIIHLFTLTNLGAPAAFKYFDTTIDRKRYTSTKEVLDATLIHQSITGLYETRIDLSQLGGDGGEAAAKGGSGSSGGTLNIEDEYRLHETSKGPDVPLGSTWLSDFPQAWAETGGMGLAVRQAPLIIPLKATSTPVSIKQYPMSQEARLGIKPHIQRLLDQGILVPCQSPWNTPLLPVKKPGTNDYRPVQDLREVNKRVEDIHPTVPNPYNLLSGLPPSHQWYTVLDLKDAFFCLRLHPTSQSLFAFEWRDPEMGISGQLTWTRLPQGFKNSPTLFNEALHRDLADFRIQHPDLILLQYVDDLLLAATSELDCQQGTRALLQTLGDLGYRASAKKAQICQKQVKYLGYLLKEGQRWLTEARKETVMGQPTPKTPRQLREFLGKAGFCRLFIPGFAEMAAPLYPLTKPGTLFEWGPDQQKAYQEIKQALLTAPALGLPDLTKPFELFVDEKQGYAKGVLTQKLGPWRRPVAYLSKKLDPVAAGWPPCLRMVAAIAVLTKDAGKLTMGQPLVILAPHAVEALVKQPPDRWLSNARMTHYQALLLDTDRVQFGPIVALNPATLLPLPEEGLQHDCLDILAEAHGTRPDLTDQPLPDADHTWYTDGSSFLQEGQRKAGAAVTTETEVVWAKALPAGTSAQRAELIALTQALKMAEGKKLNVYTDSRYAFATAHIHGEIYRRRGWLTSEGKEIKNKDEILALLKALFLPKRLSIIHCPGHQKGNRAEARGNRMADQAAREVATRETPETSTLLAGKRTADGSEFEKRTADGSEFESPKKKAKVE

SEQ ID NO: 2549 - protein, 2093 aa, synthetic construct
MPAAKRVKLDGGDKKYSIGLDIGTNSVGWAVITDEYKVPSKKFKVLGNTDRHSIKKNLIGALLFDSGETAEATRLKRTARRRYTRRKNRICYLQEIFSNEMAKVDDSFFHRLEESFLVEEDKKHERHPIFGNIVDEVAYHEKYPTIYHLRKKLVDSTDKADLRLIYLALAHMIKFRGHFLIEGDLNPDNSDVDKLFIQLVQTYNQLFEENPINASGVDAKAILSARLSKSRRLENLIAQLPGEKKNGLFGNLIALSLGLTPNFKSNFDLAEDAKLQLSKDTYDDDLDNLLAQIGDQYADLFLAAKNLSDAILLSDILRVNTEITKAPLSASMIKRYDEHHQDLTLLKALVRQQLPEKYKEIFFDQSKNGYAGYIDGGASQEEFYKFIKPILEKMDGTEELLVKLNREDLLRKQRTFDNGSIPHQIHLGELHAILRRQEDFYPFLKDNREKIEKILTFRIPYYVGPLARGNSRFAWMTRKSEETITPWNFEEVVDKGASAQSFIERMTNFDKNLPNEKVLPKHSLLYEYFTVYNELTKVKYVTEGMRKPAFLSGEQKKAIVDLLFKTNRKVTVKQLKEDYFKKIECFDSVEISGVEDRFNASLGTYHDLLKIIKDKDFLDNEENEDILEDIVLTLTLFEDREMIEERLKTYAHLFDDKVMKQLKRRRYTGWGRLSRKLINGIRDKQSGKTILDFLKSDGFANRNFMQLIHDDSLTFKEDIQKAQVSGQGDSLHEHIANLAGSPAIKKGILQTVKVVDELVKVMGRHKPENIVIEMARENQTTQKGQKNSRERMKRIEEGIKELGSQILKEHPVENTQLQNEKLYLYYLQNGRDMYVDQELDINRLSDYDVDHIVPQSFLKDDSIDNKVLTRSDKARGKSDNVPSEEVVKKMKNYWRQLLNAKLITQRKFDNLTKAERGGLSELDKAGFIKRQLVETRQITKHVAQILDSRMNTKYDENDKLIREVKVITLKSKLVSDFRKDFQFYKVREINNYHHAHDAYLNAVVGTALIKKYPKLESEFVYGDYKVYDVRKMIAKSEQEIGKATAKYFFYSNIMNFFKTEITLANGEIRKRPLIETNGETGEIVWDKGRDFATVRKVLSMPQVNIVKKTEVQTGGFSKESILPKRNSDKLIARKKDWDPKKYGGFDSPTVAYSVLVVAKVEKGKSKKLKSVKELLGITIMERSSFEKNPIDFLEAKGYKEVKKDLIIKLPKYSLFELENGRKRMLASAGELQKGNELALPSKYVNFLYLASHYEKLKGSPEDNEQKQLFVEQHKHYLDEIIEQISEFSKRVILADANLDKVLSAYNKHRDKPIREQAENIIHLFTLTNLGAPAAFKYFDTTIDRKRYTSTKEVLDATLIHQSITGLYETRIDLSQLGGDGGGGGGGGGGGGTLNIEDEYRLHETSKGPDVPLGSTWLSDFPQAWAETGGMGLAVRQAPLIIPLKATSTPVSIKQYPMSQEARLGIKPHIQRLLDQGILVPCQSPWNTPLLPVKKPGTNDYRPVQDLREVNKRVEDIHPTVPNPYNLLSGLPPSHQWYTVLDLKDAFFCLRLHPTSQSLFAFEWRDPEMGISGQLTWTRLPQGFKNSPTLFNEALHRDLADFRIQHPDLILLQYVDDLLLAATSELDCQQGTRALLQTLGDLGYRASAKKAQICQKQVKYLGYLLKEGQRWLTEARKETVMGQPTPKTPRQLREFLGKAGFCRLFIPGFAEMAAPLYPLTKPGTLFEWGPDQQKAYQEIKQALLTAPALGLPDLTKPFELFVDEKQGYAKGVLTQKLGPWRRPVAYLSKKLDPVAAGWPPCLRMVAAIAVLTKDAGKLTMGQPLVILAPHAVEALVKQPPDRWLSNARMTHYQALLLDTDRVQFGPIVALNPATLLPLPEEGLQHDCLDILAEAHGTRPDLTDQPLPDADHTWYTDGSSFLQEGQRKAGAAVTTETEVVWAKALPAGTSAQRAELIALTQALKMAEGKKLNVYTDSRYAFATAHIHGEIYRRRGWLTSEGKEIKNKDEILALLKALFLPKRLSIIHCPGHQKGNRAEARGNRMADQAAREVATRETPETSTLLAGKRTADGSEFEKRTADGSEFESPKKKAKVE

SEQ ID NO: 2550 - protein, 2096 aa, synthetic construct
MPAAKRVKLDGGDKKYSIGLDIGTNSVGWAVITDEYKVPSKKFKVLGNTDRHSIKKNLIGALLFDSGETAEATRLKRTARRRYTRRKNRICYLQEIFSNEMAKVDDSFFHRLEESFLVEEDKKHERHPIFGNIVDEVAYHEKYPTIYHLRKKLVDSTDKADLRLIYLALAHMIKFRGHFLIEGDLNPDNSDVDKLFIQLVQTYNQLFEENPINASGVDAKAILSARLSKSRRLENLIAQLPGEKKNGLFGNLIALSLGLTPNFKSNFDLAEDAKLQLSKDTYDDDLDNLLAQIGDQYADLFLAAKNLSDAILLSDILRVNTEITKAPLSASMIKRYDEHHQDLTLLKALVRQQLPEKYKEIFFDQSKNGYAGYIDGGASQEEFYKFIKPILEKMDGTEELLVKLNREDLLRKQRTFDNGSIPHQIHLGELHAILRRQEDFYPFLKDNREKIEKILTFRIPYYVGPLARGNSRFAWMTRKSEETITPWNFEEVVDKGASAQSFIERMTNFDKNLPNEKVLPKHSLLYEYFTVYNELTKVKYVTEGMRKPAFLSGEQKKAIVDLLFKTNRKVTVKQLKEDYFKKIECFDSVEISGVEDRFNASLGTYHDLLKIIKDKDFLDNEENEDILEDIVLTLTLFEDREMIEERLKTYAHLFDDKVMKQLKRRRYTGWGRLSRKLINGIRDKQSGKTILDFLKSDGFANRNFMQLIHDDSLTFKEDIQKAQVSGQGDSLHEHIANLAGSPAIKKGILQTVKVVDELVKVMGRHKPENIVIEMARENQTTQKGQKNSRERMKRIEEGIKELGSQILKEHPVENTQLQNEKLYLYYLQNGRDMYVDQELDINRLSDYDVDHIVPQSFLKDDSIDNKVLTRSDKARGKSDNVPSEEVVKKMKNYWRQLLNAKLITQRKFDNLTKAERGGLSELDKAGFIKRQLVETRQITKHVAQILDSRMNTKYDENDKLIREVKVITLKSKLVSDFRKDFQFYKVREINNYHHAHDAYLNAVVGTALIKKYPKLESEFVYGDYKVYDVRKMIAKSEQEIGKATAKYFFYSNIMNFFKTEITLANGEIRKRPLIETNGETGEIVWDKGRDFATVRKVLSMPQVNIVKKTEVQTGGFSKESILPKRNSDKLIARKKDWDPKKYGGFDSPTVAYSVLVVAKVEKGKSKKLKSVKELLGITIMERSSFEKNPIDFLEAKGYKEVKKDLIIKLPKYSLFELENGRKRMLASAGELQKGNELALPSKYVNFLYLASHYEKLKGSPEDNEQKQLFVEQHKHYLDEIIEQISEFSKRVILADANLDKVLSAYNKHRDKPIREQAENIIHLFTLTNLGAPAAFKYFDTTIDRKRYTSTKEVLDATLIHQSITGLYETRIDLSQLGGDGGGSSEAAAKGGGGGTLNIEDEYRLHETSKGPDVPLGSTWLSDFPQAWAETGGMGLAVRQAPLIIPLKATSTPVSIKQYPMSQEARLGIKPHIQRLLDQGILVPCQSPWNTPLLPVKKPGTNDYRPVQDLREVNKRVEDIHPTVPNPYNLLSGLPPSHQWYTVLDLKDAFFCLRLHPTSQSLFAFEWRDPEMGISGQLTWTRLPQGFKNSPTLFNEALHRDLADFRIQHPDLILLQYVDDLLLAATSELDCQQGTRALLQTLGDLGYRASAKKAQICQKQVKYLGYLLKEGQRWLTEARKETVMGQPTPKTPRQLREFLGKAGFCRLFIPGFAEMAAPLYPLTKPGTLFEWGPDQQKAYQEIKQALLTAPALGLPDLTKPFELFVDEKQGYAKGVLTQKLGPWRRPVAYLSKKLDPVAAGWPPCLRMVAAIAVLTKDAGKLTMGQPLVILAPHAVEALVKQPPDRWLSNARMTHYQALLLDTDRVQFGPIVALNPATLLPLPEEGLQHDCLDILAEAHGTRPDLTDQPLPDADHTWYTDGSSFLQEGQRKAGAAVTTETEVVWAKALPAGTSAQRAELIALTQALKMAEGKKLNVYTDSRYAFATAHIHGEIYRRRGWLTSEGKEIKNKDEILALLKALFLPKRLSIIHCPGHQKGNRAEARGNRMADQAAREVATRETPETSTLLAGKRTADGSEFEKRTADGSEFESPKKKAKVE

SEQ ID NO: 2551 - protein, 2096 aa, synthetic construct
MPAAKRVKLDGGDKKYSIGLDIGTNSVGWAVITDEYKVPSKKFKVLGNTDRHSIKKNLIGALLFDSGETAEATRLKRTARRRYTRRKNRICYLQEIFSNEMAKVDDSFFHRLEESFLVEEDKKHERHPIFGNIVDEVAYHEKYPTIYHLRKKLVDSTDKADLRLIYLALAHMIKFRGHFLIEGDLNPDNSDVDKLFIQLVQTYNQLFEENPINASGVDAKAILSARLSKSRRLENLIAQLPGEKKNGLFGNLIALSLGLTPNFKSNFDLAEDAKLQLSKDTYDDDLDNLLAQIGDQYADLFLAAKNLSDAILLSDILRVNTEITKAPLSASMIKRYDEHHQDLTLLKALVRQQLPEKYKEIFFDQSKNGYAGYIDGGASQEEFYKFIKPILEKMDGTEELLVKLNREDLLRKQRTFDNGSIPHQIHLGELHAILRRQEDFYPFLKDNREKIEKILTFRIPYYVGPLARGNSRFAWMTRKSEETITPWNFEEVVDKGASAQSFIERMTNFDKNLPNEKVLPKHSLLYEYFTVYNELTKVKYVTEGMRKPAFLSGEQKKAIVDLLFKTNRKVTVKQLKEDYFKKIECFDSVEISGVEDRFNASLGTYHDLLKIIKDKDFLDNEENEDILEDIVLTLTLFEDREMIEERLKTYAHLFDDKVMKQLKRRRYTGWGRLSRKLINGIRDKQSGKTILDFLKSDGFANRNFMQLIHDDSLTFKEDIQKAQVSGQGDSLHEHIANLAGSPAIKKGILQTVKVVDELVKVMGRHKPENIVIEMARENQTTQKGQKNSRERMKRIEEGIKELGSQILKEHPVENTQLQNEKLYLYYLQNGRDMYVDQELDINRLSDYDVDHIVPQSFLKDDSIDNKVLTRSDKARGKSDNVPSEEVVKKMKNYWRQLLNAKLITQRKFDNLTKAERGGLSELDKAGFIKRQLVETRQITKHVAQILDSRMNTKYDENDKLIREVKVITLKSKLVSDFRKDFQFYKVREINNYHHAHDAYLNAVVGTALIKKYPKLESEFVYGDYKVYDVRKMIAKSEQEIGKATAKYFFYSNIMNFFKTEITLANGEIRKRPLIETNGETGEIVWDKGRDFATVRKVLSMPQVNIVKKTEVQTGGFSKESILPKRNSDKLIARKKDWDPKKYGGFDSPTVAYSVLVVAKVEKGKSKKLKSVKELLGITIMERSSFEKNPIDFLEAKGYKEVKKDLIIKLPKYSLFELENGRKRMLASAGELQKGNELALPSKYVNFLYLASHYEKLKGSPEDNEQKQLFVEQHKHYLDEIIEQISEFSKRVILADANLDKVLSAYNKHRDKPIREQAENIIHLFTLTNLGAPAAFKYFDTTIDRKRYTSTKEVLDATLIHQSITGLYETRIDLSQLGGDGGEAAAKGGSGGGGGTLNIEDEYRLHETSKGPDVPLGSTWLSDFPQAWAETGGMGLAVRQAPLIIPLKATSTPVSIKQYPMSQEARLGIKPHIQRLLDQGILVPCQSPWNTPLLPVKKPGTNDYRPVQDLREVNKRVEDIHPTVPNPYNLLSGLPPSHQWYTVLDLKDAFFCLRLHPTSQSLFAFEWRDPEMGISGQLTWTRLPQGFKNSPTLFNEALHRDLADFRIQHPDLILLQYVDDLLLAATSELDCQQGTRALLQTLGDLGYRASAKKAQICQKQVKYLGYLLKEGQRWLTEARKETVMGQPTPKTPRQLREFLGKAGFCRLFIPGFAEMAAPLYPLTKPGTLFEWGPDQQKAYQEIKQALLTAPALGLPDLTKPFELFVDEKQGYAKGVLTQKLGPWRRPVAYLSKKLDPVAAGWPPCLRMVAAIAVLTKDAGKLTMGQPLVILAPHAVEALVKQPPDRWLSNARMTHYQALLLDTDRVQFGPIVALNPATLLPLPEEGLQHDCLDILAEAHGTRPDLTDQPLPDADHTWYTDGSSFLQEGQRKAGAAVTTETEVVWAKALPAGTSAQRAELIALTQALKMAEGKKLNVYTDSRYAFATAHIHGEIYRRRGWLTSEGKEIKNKDEILALLKALFLPKRLSIIHCPGHQKGNRAEARGNRMADQAAREVATRETPETSTLLAGKRTADGSEFEKRTADGSEFESPKKKAKVE

SEQ ID NO: 2552 - protein, 2094 aa, synthetic construct
MPAAKRVKLDGGDKKYSIGLDIGTNSVGWAVITDEYKVPSKKFKVLGNTDRHSIKKNLIGALLFDSGETAEATRLKRTARRRYTRRKNRICYLQEIFSNEMAKVDDSFFHRLEESFLVEEDKKHERHPIFGNIVDEVAYHEKYPTIYHLRKKLVDSTDKADLRLIYLALAHMIKFRGHFLIEGDLNPDNSDVDKLFIQLVQTYNQLFEENPINASGVDAKAILSARLSKSRRLENLIAQLPGEKKNGLFGNLIALSLGLTPNFKSNFDLAEDAKLQLSKDTYDDDLDNLLAQIGDQYADLFLAAKNLSDAILLSDILRVNTEITKAPLSASMIKRYDEHHQDLTLLKALVRQQLPEKYKEIFFDQSKNGYAGYIDGGASQEEFYKFIKPILEKMDGTEELLVKLNREDLLRKQRTFDNGSIPHQIHLGELHAILRRQEDFYPFLKDNREKIEKILTFRIPYYVGPLARGNSRFAWMTRKSEETITPWNFEEVVDKGASAQSFIERMTNFDKNLPNEKVLPKHSLLYEYFTVYNELTKVKYVTEGMRKPAFLSGEQKKAIVDLLFKTNRKVTVKQLKEDYFKKIECFDSVEISGVEDRFNASLGTYHDLLKIIKDKDFLDNEENEDILEDIVLTLTLFEDREMIEERLKTYAHLFDDKVMKQLKRRRYTGWGRLSRKLINGIRDKQSGKTILDFLKSDGFANRNFMQLIHDDSLTFKEDIQKAQVSGQGDSLHEHIANLAGSPAIKKGILQTVKVVDELVKVMGRHKPENIVIEMARENQTTQKGQKNSRERMKRIEEGIKELGSQILKEHPVENTQLQNEKLYLYYLQNGRDMYVDQELDINRLSDYDVDHIVPQSFLKDDSIDNKVLTRSDKARGKSDNVPSEEVVKKMKNYWRQLLNAKLITQRKFDNLTKAERGGLSELDKAGFIKRQLVETRQITKHVAQILDSRMNTKYDENDKLIREVKVITLKSKLVSDFRKDFQFYKVREINNYHHAHDAYLNAVVGTALIKKYPKLESEFVYGDYKVYDVRKMIAKSEQEIGKATAKYFFYSNIMNFFKTEITLANGEIRKRPLIETNGETGEIVWDKGRDFATVRKVLSMPQVNIVKKTEVQTGGFSKESILPKRNSDKLIARKKDWDPKKYGGFDSPTVAYSVLVVAKVEKGKSKKLKSVKELLGITIMERSSFEKNPIDFLEAKGYKEVKKDLIIKLPKYSLFELENGRKRMLASAGELQKGNELALPSKYVNFLYLASHYEKLKGSPEDNEQKQLFVEQHKHYLDEIIEQISEFSKRVILADANLDKVLSAYNKHRDKPIREQAENIIHLFTLTNLGAPAAFKYFDTTIDRKRYTSTKEVLDATLIHQSITGLYETRIDLSQLGGDGGGSSPAPGGSGGTLNIEDEYRLHETSKGPDVPLGSTWLSDFPQAWAETGGMGLAVRQAPLIIPLKATSTPVSIKQYPMSQEARLGIKPHIQRLLDQGILVPCQSPWNTPLLPVKKPGTNDYRPVQDLREVNKRVEDIHPTVPNPYNLLSGLPPSHQWYTVLDLKDAFFCLRLHPTSQSLFAFEWRDPEMGISGQLTWTRLPQGFKNSPTLFNEALHRDLADFRIQHPDLILLQYVDDLLLAATSELDCQQGTRALLQTLGDLGYRASAKKAQICQKQVKYLGYLLKEGQRWLTEARKETVMGQPTPKTPRQLREFLGKAGFCRLFIPGFAEMAAPLYPLTKPGTLFEWGPDQQKAYQEIKQALLTAPALGLPDLTKPFELFVDEKQGYAKGVLTQKLGPWRRPVAYLSKKLDPVAAGWPPCLRMVAAIAVLTKDAGKLTMGQPLVILAPHAVEALVKQPPDRWLSNARMTHYQALLLDTDRVQFGPIVALNPATLLPLPEEGLQHDCLDILAEAHGTRPDLTDQPLPDADHTWYTDGSSFLQEGQRKAGAAVTTETEVVWAKALPAGTSAQRAELIALTQALKMAEGKKLNVYTDSRYAFATAHIHGEIYRRRGWLTSEGKEIKNKDEILALLKALFLPKRLSIIHCPGHQKGNRAEARGNRMADQAAREVATRETPETSTLLAGKRTADGSEFEKRTADGSEFESPKKKAKVE

SEQ ID NO: 2553 - protein, 2096 aa, synthetic construct
MPAAKRVKLDGGDKKYSIGLDIGTNSVGWAVITDEYKVPSKKFKVLGNTDRHSIKKNLIGALLFDSGETAEATRLKRTARRRYTRRKNRICYLQEIFSNEMAKVDDSFFHRLEESFLVEEDKKHERHPIFGNIVDEVAYHEKYPTIYHLRKKLVDSTDKADLRLIYLALAHMIKFRGHFLIEGDLNPDNSDVDKLFIQLVQTYNQLFEENPINASGVDAKAILSARLSKSRRLENLIAQLPGEKKNGLFGNLIALSLGLTPNFKSNFDLAEDAKLQLSKDTYDDDLDNLLAQIGDQYADLFLAAKNLSDAILLSDILRVNTEITKAPLSASMIKRYDEHHQDLTLLKALVRQQLPEKYKEIFFDQSKNGYAGYIDGGASQEEFYKFIKPILEKMDGTEELLVKLNREDLLRKQRTFDNGSIPHQIHLGELHAILRRQEDFYPFLKDNREKIEKILTFRIPYYVGPLARGNSRFAWMTRKSEETITPWNFEEVVDKGASAQSFIERMTNFDKNLPNEKVLPKHSLLYEYFTVYNELTKVKYVTEGMRKPAFLSGEQKKAIVDLLFKTNRKVTVKQLKEDYFKKIECFDSVEISGVEDRFNASLGTYHDLLKIIKDKDFLDNEENEDILEDIVLTLTLFEDREMIEERLKTYAHLFDDKVMKQLKRRRYTGWGRLSRKLINGIRDKQSGKTILDFLKSDGFANRNFMQLIHDDSLTFKEDIQKAQVSGQGDSLHEHIANLAGSPAIKKGILQTVKVVDELVKVMGRHKPENIVIEMARENQTTQKGQKNSRERMKRIEEGIKELGSQILKEHPVENTQLQNEKLYLYYLQNGRDMYVDQELDINRLSDYDVDHIVPQSFLKDDSIDNKVLTRSDKARGKSDNVPSEEVVKKMKNYWRQLLNAKLITQRKFDNLTKAERGGLSELDKAGFIKRQLVETRQITKHVAQILDSRMNTKYDENDKLIREVKVITLKSKLVSDFRKDFQFYKVREINNYHHAHDAYLNAVVGTALIKKYPKLESEFVYGDYKVYDVRKMIAKSEQEIGKATAKYFFYSNIMNFFKTEITLANGEIRKRPLIETNGETGEIVWDKGRDFATVRKVLSMPQVNIVKKTEVQTGGFSKESILPKRNSDKLIARKKDWDPKKYGGFDSPTVAYSVLVVAKVEKGKSKKLKSVKELLGITIMERSSFEKNPIDFLEAKGYKEVKKDLIIKLPKYSLFELENGRKRMLASAGELQKGNELALPSKYVNFLYLASHYEKLKGSPEDNEQKQLFVEQHKHYLDEIIEQISEFSKRVILADANLDKVLSAYNKHRDKPIREQAENIIHLFTLTNLGAPAAFKYFDTTIDRKRYTSTKEVLDATLIHQSITGLYETRIDLSQLGGDGGGSSEAAAKGGSGGTLNIEDEYRLHETSKGPDVPLGSTWLSDFPQAWAETGGMGLAVRQAPLIIPLKATSTPVSIKQYPMSQEARLGIKPHIQRLLDQGILVPCQSPWNTPLLPVKKPGTNDYRPVQDLREVNKRVEDIHPTVPNPYNLLSGLPPSHQWYTVLDLKDAFFCLRLHPTSQSLFAFEWRDPEMGISGQLTWTRLPQGFKNSPTLFNEALHRDLADFRIQHPDLILLQYVDDLLLAATSELDCQQGTRALLQTLGDLGYRASAKKAQICQKQVKYLGYLLKEGQRWLTEARKETVMGQPTPKTPRQLREFLGKAGFCRLFIPGFAEMAAPLYPLTKPGTLFEWGPDQQKAYQEIKQALLTAPALGLPDLTKPFELFVDEKQGYAKGVLTQKLGPWRRPVAYLSKKLDPVAAGWPPCLRMVAAIAVLTKDAGKLTMGQPLVILAPHAVEALVKQPPDRWLSNARMTHYQALLLDTDRVQFGPIVALNPATLLPLPEEGLQHDCLDILAEAHGTRPDLTDQPLPDADHTWYTDGSSFLQEGQRKAGAAVTTETEVVWAKALPAGTSAQRAELIALTQALKMAEGKKLNVYTDSRYAFATAHIHGEIYRRRGWLTSEGKEIKNKDEILALLKALFLPKRLSIIHCPGHQKGNRAEARGNRMADQAAREVATRETPETSTLLAGKRTADGSEFEKRTADGSEFESPKKKAKVE

SEQ ID NO: 2554 - protein, 2094 aa, synthetic construct
MPAAKRVKLDGGDKKYSIGLDIGTNSVGWAVITDEYKVPSKKFKVLGNTDRHSIKKNLIGALLFDSGETAEATRLKRTARRRYTRRKNRICYLQEIFSNEMAKVDDSFFHRLEESFLVEEDKKHERHPIFGNIVDEVAYHEKYPTIYHLRKKLVDSTDKADLRLIYLALAHMIKFRGHFLIEGDLNPDNSDVDKLFIQLVQTYNQLFEENPINASGVDAKAILSARLSKSRRLENLIAQLPGEKKNGLFGNLIALSLGLTPNFKSNFDLAEDAKLQLSKDTYDDDLDNLLAQIGDQYADLFLAAKNLSDAILLSDILRVNTEITKAPLSASMIKRYDEHHQDLTLLKALVRQQLPEKYKEIFFDQSKNGYAGYIDGGASQEEFYKFIKPILEKMDGTEELLVKLNREDLLRKQRTFDNGSIPHQIHLGELHAILRRQEDFYPFLKDNREKIEKILTFRIPYYVGPLARGNSRFAWMTRKSEETITPWNFEEVVDKGASAQSFIERMTNFDKNLPNEKVLPKHSLLYEYFTVYNELTKVKYVTEGMRKPAFLSGEQKKAIVDLLFKTNRKVTVKQLKEDYFKKIECFDSVEISGVEDRFNASLGTYHDLLKIIKDKDFLDNEENEDILEDIVLTLTLFEDREMIEERLKTYAHLFDDKVMKQLKRRRYTGWGRLSRKLINGIRDKQSGKTILDFLKSDGFANRNFMQLIHDDSLTFKEDIQKAQVSGQGDSLHEHIANLAGSPAIKKGILQTVKVVDELVKVMGRHKPENIVIEMARENQTTQKGQKNSRERMKRIEEGIKELGSQILKEHPVENTQLQNEKLYLYYLQNGRDMYVDQELDINRLSDYDVDHIVPQSFLKDDSIDNKVLTRSDKARGKSDNVPSEEVVKKMKNYWRQLLNAKLITQRKFDNLTKAERGGLSELDKAGFIKRQLVETRQITKHVAQILDSRMNTKYDENDKLIREVKVITLKSKLVSDFRKDFQFYKVREINNYHHAHDAYLNAVVGTALIKKYPKLESEFVYGDYKVYDVRKMIAKSEQEIGKATAKYFFYSNIMNFFKTEITLANGEIRKRPLIETNGETGEIVWDKGRDFATVRKVLSMPQVNIVKKTEVQTGGFSKESILPKRNSDKLIARKKDWDPKKYGGFDSPTVAYSVLVVAKVEKGKSKKLKSVKELLGITIMERSSFEKNPIDFLEAKGYKEVKKDLIIKLPKYSLFELENGRKRMLASAGELQKGNELALPSKYVNFLYLASHYEKLKGSPEDNEQKQLFVEQHKHYLDEIIEQISEFSKRVILADANLDKVLSAYNKHRDKPIREQAENIIHLFTLTNLGAPAAFKYFDTTIDRKRYTSTKEVLDATLIHQSITGLYETRIDLSQLGGDGGGSSGGGPAPGGTLNIEDEYRLHETSKGPDVPLGSTWLSDFPQAWAETGGMGLAVRQAPLIIPLKATSTPVSIKQYPMSQEARLGIKPHIQRLLDQGILVPCQSPWNTPLLPVKKPGTNDYRPVQDLREVNKRVEDIHPTVPNPYNLLSGLPPSHQWYTVLDLKDAFFCLRLHPTSQSLFAFEWRDPEMGISGQLTWTRLPQGFKNSPTLFNEALHRDLADFRIQHPDLILLQYVDDLLLAATSELDCQQGTRALLQTLGDLGYRASAKKAQICQKQVKYLGYLLKEGQRWLTEARKETVMGQPTPKTPRQLREFLGKAGFCRLFIPGFAEMAAPLYPLTKPGTLFEWGPDQQKAYQEIKQALLTAPALGLPDLTKPFELFVDEKQGYAKGVLTQKLGPWRRPVAYLSKKLDPVAAGWPPCLRMVAAIAVLTKDAGKLTMGQPLVILAPHAVEALVKQPPDRWLSNARMTHYQALLLDTDRVQFGPIVALNPATLLPLPEEGLQHDCLDILAEAHGTRPDLTDQPLPDADHTWYTDGSSFLQEGQRKAGAAVTTETEVVWAKALPAGTSAQRAELIALTQALKMAEGKKLNVYTDSRYAFATAHIHGEIYRRRGWLTSEGKEIKNKDEILALLKALFLPKRLSIIHCPGHQKGNRAEARGNRMADQAAREVATRETPETSTLLAGKRTADGSEFEKRTADGSEFESPKKKAKVE

SEQ ID NO: 2555 - protein, 2100 aa, synthetic construct
MPAAKRVKLDGGDKKYSIGLDIGTNSVGWAVITDEYKVPSKKFKVLGNTDRHSIKKNLIGALLFDSGETAEATRLKRTARRRYTRRKNRICYLQEIFSNEMAKVDDSFFHRLEESFLVEEDKKHERHPIFGNIVDEVAYHEKYPTIYHLRKKLVDSTDKADLRLIYLALAHMIKFRGHFLIEGDLNPDNSDVDKLFIQLVQTYNQLFEENPINASGVDAKAILSARLSKSRRLENLIAQLPGEKKNGLFGNLIALSLGLTPNFKSNFDLAEDAKLQLSKDTYDDDLDNLLAQIGDQYADLFLAAKNLSDAILLSDILRVNTEITKAPLSASMIKRYDEHHQDLTLLKALVRQQLPEKYKEIFFDQSKNGYAGYIDGGASQEEFYKFIKPILEKMDGTEELLVKLNREDLLRKQRTFDNGSIPHQIHLGELHAILRRQEDFYPFLKDNREKIEKILTFRIPYYVGPLARGNSRFAWMTRKSEETITPWNFEEVVDKGASAQSFIERMTNFDKNLPNEKVLPKHSLLYEYFTVYNELTKVKYVTEGMRKPAFLSGEQKKAIVDLLFKTNRKVTVKQLKEDYFKKIECFDSVEISGVEDRFNASLGTYHDLLKIIKDKDFLDNEENEDILEDIVLTLTLFEDREMIEERLKTYAHLFDDKVMKQLKRRRYTGWGRLSRKLINGIRDKQSGKTILDFLKSDGFANRNFMQLIHDDSLTFKEDIQKAQVSGQGDSLHEHIANLAGSPAIKKGILQTVKVVDELVKVMGRHKPENIVIEMARENQTTQKGQKNSRERMKRIEEGIKELGSQILKEHPVENTQLQNEKLYLYYLQNGRDMYVDQELDINRLSDYDVDHIVPQSFLKDDSIDNKVLTRSDKARGKSDNVPSEEVVKKMKNYWRQLLNAKLITQRKFDNLTKAERGGLSELDKAGFIKRQLVETRQITKHVAQILDSRMNTKYDENDKLIREVKVITLKSKLVSDFRKDFQFYKVREINNYHHAHDAYLNAVVGTALIKKYPKLESEFVYGDYKVYDVRKMIAKSEQEIGKATAKYFFYSNIMNFFKTEITLANGEIRKRPLIETNGETGEIVWDKGRDFATVRKVLSMPQVNIVKKTEVQTGGFSKESILPKRNSDKLIARKKDWDPKKYGGFDSPTVAYSVLVVAKVEKGKSKKLKSVKELLGITIMERSSFEKNPIDFLEAKGYKEVKKDLIIKLPKYSLFELENGRKRMLASAGELQKGNELALPSKYVNFLYLASHYEKLKGSPEDNEQKQLFVEQHKHYLDEIIEQISEFSKRVILADANLDKVLSAYNKHRDKPIREQAENIIHLFTLTNLGAPAAFKYFDTTIDRKRYTSTKEVLDATLIHQSITGLYETRIDLSQLGGDGGGGSGGSGGSGGSGGSGGTLNIEDEYRLHETSKGPDVPLGSTWLSDFPQAWAETGGMGLAVRQAPLIIPLKATSTPVSIKQYPMSQEARLGIKPHIQRLLDQGILVPCQSPWNTPLLPVKKPGTNDYRPVQDLREVNKRVEDIHPTVPNPYNLLSGLPPSHQWYTVLDLKDAFFCLRLHPTSQSLFAFEWRDPEMGISGQLTWTRLPQGFKNSPTLFNEALHRDLADFRIQHPDLILLQYVDDLLLAATSELDCQQGTRALLQTLGDLGYRASAKKAQICQKQVKYLGYLLKEGQRWLTEARKETVMGQPTPKTPRQLREFLGKAGFCRLFIPGFAEMAAPLYPLTKPGTLFEWGPDQQKAYQEIKQALLTAPALGLPDLTKPFELFVDEKQGYAKGVLTQKLGPWRRPVAYLSKKLDPVAAGWPPCLRMVAAIAVLTKDAGKLTMGQPLVILAPHAVEALVKQPPDRWLSNARMTHYQALLLDTDRVQFGPIVALNPATLLPLPEEGLQHDCLDILAEAHGTRPDLTDQPLPDADHTWYTDGSSFLQEGQRKAGAAVTTETEVVWAKALPAGTSAQRAELIALTQALKMAEGKKLNVYTDSRYAFATAHIHGEIYRRRGWLTSEGKEIKNKDEILALLKALFLPKRLSIIHCPGHQKGNRAEARGNRMADQAAREVATRETPETSTLLAGKRTADGSEFEKRTADGSEFESPKKKAKVE

SEQ ID NO: 2556 - protein, 2096 aa, synthetic construct
MPAAKRVKLDGGDKKYSIGLDIGTNSVGWAVITDEYKVPSKKFKVLGNTDRHSIKKNLIGALLFDSGETAEATRLKRTARRRYTRRKNRICYLQEIFSNEMAKVDDSFFHRLEESFLVEEDKKHERHPIFGNIVDEVAYHEKYPTIYHLRKKLVDSTDKADLRLIYLALAHMIKFRGHFLIEGDLNPDNSDVDKLFIQLVQTYNQLFEENPINASGVDAKAILSARLSKSRRLENLIAQLPGEKKNGLFGNLIALSLGLTPNFKSNFDLAEDAKLQLSKDTYDDDLDNLLAQIGDQYADLFLAAKNLSDAILLSDILRVNTEITKAPLSASMIKRYDEHHQDLTLLKALVRQQLPEKYKEIFFDQSKNGYAGYIDGGASQEEFYKFIKPILEKMDGTEELLVKLNREDLLRKQRTFDNGSIPHQIHLGELHAILRRQEDFYPFLKDNREKIEKILTFRIPYYVGPLARGNSRFAWMTRKSEETITPWNFEEVVDKGASAQSFIERMTNFDKNLPNEKVLPKHSLLYEYFTVYNELTKVKYVTEGMRKPAFLSGEQKKAIVDLLFKTNRKVTVKQLKEDYFKKIECFDSVEISGVEDRFNASLGTYHDLLKIIKDKDFLDNEENEDILEDIVLTLTLFEDREMIEERLKTYAHLFDDKVMKQLKRRRYTGWGRLSRKLINGIRDKQSGKTILDFLKSDGFANRNFMQLIHDDSLTFKEDIQKAQVSGQGDSLHEHIANLAGSPAIKKGILQTVKVVDELVKVMGRHKPENIVIEMARENQTTQKGQKNSRERMKRIEEGIKELGSQILKEHPVENTQLQNEKLYLYYLQNGRDMYVDQELDINRLSDYDVDHIVPQSFLKDDSIDNKVLTRSDKARGKSDNVPSEEVVKKMKNYWRQLLNAKLITQRKFDNLTKAERGGLSELDKAGFIKRQLVETRQITKHVAQILDSRMNTKYDENDKLIREVKVITLKSKLVSDFRKDFQFYKVREINNYHHAHDAYLNAVVGTALIKKYPKLESEFVYGDYKVYDVRKMIAKSEQEIGKATAKYFFYSNIMNFFKTEITLANGEIRKRPLIETNGETGEIVWDKGRDFATVRKVLSMPQVNIVKKTEVQTGGFSKESILPKRNSDKLIARKKDWDPKKYGGFDSPTVAYSVLVVAKVEKGKSKKLKSVKELLGITIMERSSFEKNPIDFLEAKGYKEVKKDLIIKLPKYSLFELENGRKRMLASAGELQKGNELALPSKYVNFLYLASHYEKLKGSPEDNEQKQLFVEQHKHYLDEIIEQISEFSKRVILADANLDKVLSAYNKHRDKPIREQAENIIHLFTLTNLGAPAAFKYFDTTIDRKRYTSTKEVLDATLIHQSITGLYETRIDLSQLGGDGGEAAAKGGGPAPGGTLNIEDEYRLHETSKGPDVPLGSTWLSDFPQAWAETGGMGLAVRQAPLIIPLKATSTPVSIKQYPMSQEARLGIKPHIQRLLDQGILVPCQSPWNTPLLPVKKPGTNDYRPVQDLREVNKRVEDIHPTVPNPYNLLSGLPPSHQWYTVLDLKDAFFCLRLHPTSQSLFAFEWRDPEMGISGQLTWTRLPQGFKNSPTLFNEALHRDLADFRIQHPDLILLQYVDDLLLAATSELDCQQGTRALLQTLGDLGYRASAKKAQICQKQVKYLGYLLKEGQRWLTEARKETVMGQPTPKTPRQLREFLGKAGFCRLFIPGFAEMAAPLYPLTKPGTLFEWGPDQQKAYQEIKQALLTAPALGLPDLTKPFELFVDEKQGYAKGVLTQKLGPWRRPVAYLSKKLDPVAAGWPPCLRMVAAIAVLTKDAGKLTMGQPLVILAPHAVEALVKQPPDRWLSNARMTHYQALLLDTDRVQFGPIVALNPATLLPLPEEGLQHDCLDILAEAHGTRPDLTDQPLPDADHTWYTDGSSFLQEGQRKAGAAVTTETEVVWAKALPAGTSAQRAELIALTQALKMAEGKKLNVYTDSRYAFATAHIHGEIYRRRGWLTSEGKEIKNKDEILALLKALFLPKRLSIIHCPGHQKGNRAEARGNRMADQAAREVATRETPETSTLLAGKRTADGSEFEKRTADGSEFESPKKKAKVE

SEQ ID NO: 2557 - protein, 2094 aa, synthetic construct
MPAAKRVKLDGGDKKYSIGLDIGTNSVGWAVITDEYKVPSKKFKVLGNTDRHSIKKNLIGALLFDSGETAEATRLKRTARRRYTRRKNRICYLQEIFSNEMAKVDDSFFHRLEESFLVEEDKKHERHPIFGNIVDEVAYHEKYPTIYHLRKKLVDSTDKADLRLIYLALAHMIKFRGHFLIEGDLNPDNSDVDKLFIQLVQTYNQLFEENPINASGVDAKAILSARLSKSRRLENLIAQLPGEKKNGLFGNLIALSLGLTPNFKSNFDLAEDAKLQLSKDTYDDDLDNLLAQIGDQYADLFLAAKNLSDAILLSDILRVNTEITKAPLSASMIKRYDEHHQDLTLLKALVRQQLPEKYKEIFFDQSKNGYAGYIDGGASQEEFYKFIKPILEKMDGTEELLVKLNREDLLRKQRTFDNGSIPHQIHLGELHAILRRQEDFYPFLKDNREKIEKILTFRIPYYVGPLARGNSRFAWMTRKSEETITPWNFEEVVDKGASAQSFIERMTNFDKNLPNEKVLPKHSLLYEYFTVYNELTKVKYVTEGMRKPAFLSGEQKKAIVDLLFKTNRKVTVKQLKEDYFKKIECFDSVEISGVEDRFNASLGTYHDLLKIIKDKDFLDNEENEDILEDIVLTLTLFEDREMIEERLKTYAHLFDDKVMKQLKRRRYTGWGRLSRKLINGIRDKQSGKTILDFLKSDGFANRNFMQLIHDDSLTFKEDIQKAQVSGQGDSLHEHIANLAGSPAIKKGILQTVKVVDELVKVMGRHKPENIVIEMARENQTTQKGQKNSRERMKRIEEGIKELGSQILKEHPVENTQLQNEKLYLYYLQNGRDMYVDQELDINRLSDYDVDHIVPQSFLKDDSIDNKVLTRSDKARGKSDNVPSEEVVKKMKNYWRQLLNAKLITQRKFDNLTKAERGGLSELDKAGFIKRQLVETRQITKHVAQILDSRMNTKYDENDKLIREVKVITLKSKLVSDFRKDFQFYKVREINNYHHAHDAYLNAVVGTALIKKYPKLESEFVYGDYKVYDVRKMIAKSEQEIGKATAKYFFYSNIMNFFKTEITLANGEIRKRPLIETNGETGEIVWDKGRDFATVRKVLSMPQVNIVKKTEVQTGGFSKESILPKRNSDKLIARKKDWDPKKYGGFDSPTVAYSVLVVAKVEKGKSKKLKSVKELLGITIMERSSFEKNPIDFLEAKGYKEVKKDLIIKLPKYSLFELENGRKRMLASAGELQKGNELALPSKYVNFLYLASHYEKLKGSPEDNEQKQLFVEQHKHYLDEIIEQISEFSKRVILADANLDKVLSAYNKHRDKPIREQAENIIHLFTLTNLGAPAAFKYFDTTIDRKRYTSTKEVLDATLIHQSITGLYETRIDLSQLGGDGGGSSGSSGSSGGTLNIEDEYRLHETSKGPDVPLGSTWLSDFPQAWAETGGMGLAVRQAPLIIPLKATSTPVSIKQYPMSQEARLGIKPHIQRLLDQGILVPCQSPWNTPLLPVKKPGTNDYRPVQDLREVNKRVEDIHPTVPNPYNLLSGLPPSHQWYTVLDLKDAFFCLRLHPTSQSLFAFEWRDPEMGISGQLTWTRLPQGFKNSPTLFNEALHRDLADFRIQHPDLILLQYVDDLLLAATSELDCQQGTRALLQTLGDLGYRASAKKAQICQKQVKYLGYLLKEGQRWLTEARKETVMGQPTPKTPRQLREFLGKAGFCRLFIPGFAEMAAPLYPLTKPGTLFEWGPDQQKAYQEIKQALLTAPALGLPDLTKPFELFVDEKQGYAKGVLTQKLGPWRRPVAYLSKKLDPVAAGWPPCLRMVAAIAVLTKDAGKLTMGQPLVILAPHAVEALVKQPPDRWLSNARMTHYQALLLDTDRVQFGPIVALNPATLLPLPEEGLQHDCLDILAEAHGTRPDLTDQPLPDADHTWYTDGSSFLQEGQRKAGAAVTTETEVVWAKALPAGTSAQRAELIALTQALKMAEGKKLNVYTDSRYAFATAHIHGEIYRRRGWLTSEGKEIKNKDEILALLKALFLPKRLSIIHCPGHQKGNRAEARGNRMADQAAREVATRETPETSTLLAGKRTADGSEFEKRTADGSEFESPKKKAKVE

SEQ ID NO: 2558 - protein, 2094 aa, synthetic construct
MPAAKRVKLDGGDKKYSIGLDIGTNSVGWAVITDEYKVPSKKFKVLGNTDRHSIKKNLIGALLFDSGETAEATRLKRTARRRYTRRKNRICYLQEIFSNEMAKVDDSFFHRLEESFLVEEDKKHERHPIFGNIVDEVAYHEKYPTIYHLRKKLVDSTDKADLRLIYLALAHMIKFRGHFLIEGDLNPDNSDVDKLFIQLVQTYNQLFEENPINASGVDAKAILSARLSKSRRLENLIAQLPGEKKNGLFGNLIALSLGLTPNFKSNFDLAEDAKLQLSKDTYDDDLDNLLAQIGDQYADLFLAAKNLSDAILLSDILRVNTEITKAPLSASMIKRYDEHHQDLTLLKALVRQQLPEKYKEIFFDQSKNGYAGYIDGGASQEEFYKFIKPILEKMDGTEELLVKLNREDLLRKQRTFDNGSIPHQIHLGELHAILRRQEDFYPFLKDNREKIEKILTFRIPYYVGPLARGNSRFAWMTRKSEETITPWNFEEVVDKGASAQSFIERMTNFDKNLPNEKVLPKHSLLYEYFTVYNELTKVKYVTEGMRKPAFLSGEQKKAIVDLLFKTNRKVTVKQLKEDYFKKIECFDSVEISGVEDRFNASLGTYHDLLKIIKDKDFLDNEENEDILEDIVLTLTLFEDREMIEERLKTYAHLFDDKVMKQLKRRRYTGWGRLSRKLINGIRDKQSGKTILDFLKSDGFANRNFMQLIHDDSLTFKEDIQKAQVSGQGDSLHEHIANLAGSPAIKKGILQTVKVVDELVKVMGRHKPENIVIEMARENQTTQKGQKNSRERMKRIEEGIKELGSQILKEHPVENTQLQNEKLYLYYLQNGRDMYVDQELDINRLSDYDVDHIVPQSFLKDDSIDNKVLTRSDKARGKSDNVPSEEVVKKMKNYWRQLLNAKLITQRKFDNLTKAERGGLSELDKAGFIKRQLVETRQITKHVAQILDSRMNTKYDENDKLIREVKVITLKSKLVSDFRKDFQFYKVREINNYHHAHDAYLNAVVGTALIKKYPKLESEFVYGDYKVYDVRKMIAKSEQEIGKATAKYFFYSNIMNFFKTEITLANGEIRKRPLIETNGETGEIVWDKGRDFATVRKVLSMPQVNIVKKTEVQTGGFSKESILPKRNSDKLIARKKDWDPKKYGGFDSPTVAYSVLVVAKVEKGKSKKLKSVKELLGITIMERSSFEKNPIDFLEAKGYKEVKKDLIIKLPKYSLFELENGRKRMLASAGELQKGNELALPSKYVNFLYLASHYEKLKGSPEDNEQKQLFVEQHKHYLDEIIEQISEFSKRVILADANLDKVLSAYNKHRDKPIREQAENIIHLFTLTNLGAPAAFKYFDTTIDRKRYTSTKEVLDATLIHQSITGLYETRIDLSQLGGDGGGGSGSSPAPGGTLNIEDEYRLHETSKGPDVPLGSTWLSDFPQAWAETGGMGLAVRQAPLIIPLKATSTPVSIKQYPMSQEARLGIKPHIQRLLDQGILVPCQSPWNTPLLPVKKPGTNDYRPVQDLREVNKRVEDIHPTVPNPYNLLSGLPPSHQWYTVLDLKDAFFCLRLHPTSQSLFAFEWRDPEMGISGQLTWTRLPQGFKNSPTLFNEALHRDLADFRIQHPDLILLQYVDDLLLAATSELDCQQGTRALLQTLGDLGYRASAKKAQICQKQVKYLGYLLKEGQRWLTEARKETVMGQPTPKTPRQLREFLGKAGFCRLFIPGFAEMAAPLYPLTKPGTLFEWGPDQQKAYQEIKQALLTAPALGLPDLTKPFELFVDEKQGYAKGVLTQKLGPWRRPVAYLSKKLDPVAAGWPPCLRMVAAIAVLTKDAGKLTMGQPLVILAPHAVEALVKQPPDRWLSNARMTHYQALLLDTDRVQFGPIVALNPATLLPLPEEGLQHDCLDILAEAHGTRPDLTDQPLPDADHTWYTDGSSFLQEGQRKAGAAVTTETEVVWAKALPAGTSAQRAELIALTQALKMAEGKKLNVYTDSRYAFATAHIHGEIYRRRGWLTSEGKEIKNKDEILALLKALFLPKRLSIIHCPGHQKGNRAEARGNRMADQAAREVATRETPETSTLLAGKRTADGSEFEKRTADGSEFESPKKKAKVE

SEQ ID NO: 2559 - protein, 2091 aa, synthetic construct
MPAAKRVKLDGGDKKYSIGLDIGTNSVGWAVITDEYKVPSKKFKVLGNTDRHSIKKNLIGALLFDSGETAEATRLKRTARRRYTRRKNRICYLQEIFSNEMAKVDDSFFHRLEESFLVEEDKKHERHPIFGNIVDEVAYHEKYPTIYHLRKKLVDSTDKADLRLIYLALAHMIKFRGHFLIEGDLNPDNSDVDKLFIQLVQTYNQLFEENPINASGVDAKAILSARLSKSRRLENLIAQLPGEKKNGLFGNLIALSLGLTPNFKSNFDLAEDAKLQLSKDTYDDDLDNLLAQIGDQYADLFLAAKNLSDAILLSDILRVNTEITKAPLSASMIKRYDEHHQDLTLLKALVRQQLPEKYKEIFFDQSKNGYAGYIDGGASQEEFYKFIKPILEKMDGTEELLVKLNREDLLRKQRTFDNGSIPHQIHLGELHAILRRQEDFYPFLKDNREKIEKILTFRIPYYVGPLARGNSRFAWMTRKSEETITPWNFEEVVDKGASAQSFIERMTNFDKNLPNEKVLPKHSLLYEYFTVYNELTKVKYVTEGMRKPAFLSGEQKKAIVDLLFKTNRKVTVKQLKEDYFKKIECFDSVEISGVEDRFNASLGTYHDLLKIIKDKDFLDNEENEDILEDIVLTLTLFEDREMIEERLKTYAHLFDDKVMKQLKRRRYTGWGRLSRKLINGIRDKQSGKTILDFLKSDGFANRNFMQLIHDDSLTFKEDIQKAQVSGQGDSLHEHIANLAGSPAIKKGILQTVKVVDELVKVMGRHKPENIVIEMARENQTTQKGQKNSRERMKRIEEGIKELGSQILKEHPVENTQLQNEKLYLYYLQNGRDMYVDQELDINRLSDYDVDHIVPQSFLKDDSIDNKVLTRSDKARGKSDNVPSEEVVKKMKNYWRQLLNAKLITQRKFDNLTKAERGGLSELDKAGFIKRQLVETRQITKHVAQILDSRMNTKYDENDKLIREVKVITLKSKLVSDFRKDFQFYKVREINNYHHAHDAYLNAVVGTALIKKYPKLESEFVYGDYKVYDVRKMIAKSEQEIGKATAKYFFYSNIMNFFKTEITLANGEIRKRPLIETNGETGEIVWDKGRDFATVRKVLSMPQVNIVKKTEVQTGGFSKESILPKRNSDKLIARKKDWDPKKYGGFDSPTVAYSVLVVAKVEKGKSKKLKSVKELLGITIMERSSFEKNPIDFLEAKGYKEVKKDLIIKLPKYSLFELENGRKRMLASAGELQKGNELALPSKYVNFLYLASHYEKLKGSPEDNEQKQLFVEQHKHYLDEIIEQISEFSKRVILADANLDKVLSAYNKHRDKPIREQAENIIHLFTLTNLGAPAAFKYFDTTIDRKRYTSTKEVLDATLIHQSITGLYETRIDLSQLGGDGGGGSGGGGGTLNIEDEYRLHETSKGPDVPLGSTWLSDFPQAWAETGGMGLAVRQAPLIIPLKATSTPVSIKQYPMSQEARLGIKPHIQRLLDQGILVPCQSPWNTPLLPVKKPGTNDYRPVQDLREVNKRVEDIHPTVPNPYNLLSGLPPSHQWYTVLDLKDAFFCLRLHPTSQSLFAFEWRDPEMGISGQLTWTRLPQGFKNSPTLFNEALHRDLADFRIQHPDLILLQYVDDLLLAATSELDCQQGTRALLQTLGDLGYRASAKKAQICQKQVKYLGYLLKEGQRWLTEARKETVMGQPTPKTPRQLREFLGKAGFCRLFIPGFAEMAAPLYPLTKPGTLFEWGPDQQKAYQEIKQALLTAPALGLPDLTKPFELFVDEKQGYAKGVLTQKLGPWRRPVAYLSKKLDPVAAGWPPCLRMVAAIAVLTKDAGKLTMGQPLVILAPHAVEALVKQPPDRWLSNARMTHYQALLLDTDRVQFGPIVALNPATLLPLPEEGLQHDCLDILAEAHGTRPDLTDQPLPDADHTWYTDGSSFLQEGQRKAGAAVTTETEVVWAKALPAGTSAQRAELIALTQALKMAEGKKLNVYTDSRYAFATAHIHGEIYRRRGWLTSEGKEIKNKDEILALLKALFLPKRLSIIHCPGHQKGNRAEARGNRMADQAAREVATRETPETSTLLAGKRTADGSEFEKRTADGSEFESPKKKAKVE

SEQ ID NO: 2560 - protein, 2092 aa, synthetic construct
MPAAKRVKLDGGDKKYSIGLDIGTNSVGWAVITDEYKVPSKKFKVLGNTDRHSIKKNLIGALLFDSGETAEATRLKRTARRRYTRRKNRICYLQEIFSNEMAKVDDSFFHRLEESFLVEEDKKHERHPIFGNIVDEVAYHEKYPTIYHLRKKLVDSTDKADLRLIYLALAHMIKFRGHFLIEGDLNPDNSDVDKLFIQLVQTYNQLFEENPINASGVDAKAILSARLSKSRRLENLIAQLPGEKKNGLFGNLIALSLGLTPNFKSNFDLAEDAKLQLSKDTYDDDLDNLLAQIGDQYADLFLAAKNLSDAILLSDILRVNTEITKAPLSASMIKRYDEHHQDLTLLKALVRQQLPEKYKEIFFDQSKNGYAGYIDGGASQEEFYKFIKPILEKMDGTEELLVKLNREDLLRKQRTFDNGSIPHQIHLGELHAILRRQEDFYPFLKDNREKIEKILTFRIPYYVGPLARGNSRFAWMTRKSEETITPWNFEEVVDKGASAQSFIERMTNFDKNLPNEKVLPKHSLLYEYFTVYNELTKVKYVTEGMRKPAFLSGEQKKAIVDLLFKTNRKVTVKQLKEDYFKKIECFDSVEISGVEDRFNASLGTYHDLLKIIKDKDFLDNEENEDILEDIVLTLTLFEDREMIEERLKTYAHLFDDKVMKQLKRRRYTGWGRLSRKLINGIRDKQSGKTILDFLKSDGFANRNFMQLIHDDSLTFKEDIQKAQVSGQGDSLHEHIANLAGSPAIKKGILQTVKVVDELVKVMGRHKPENIVIEMARENQTTQKGQKNSRERMKRIEEGIKELGSQILKEHPVENTQLQNEKLYLYYLQNGRDMYVDQELDINRLSDYDVDHIVPQSFLKDDSIDNKVLTRSDKARGKSDNVPSEEVVKKMKNYWRQLLNAKLITQRKFDNLTKAERGGLSELDKAGFIKRQLVETRQITKHVAQILDSRMNTKYDENDKLIREVKVITLKSKLVSDFRKDFQFYKVREINNYHHAHDAYLNAVVGTALIKKYPKLESEFVYGDYKVYDVRKMIAKSEQEIGKATAKYFFYSNIMNFFKTEITLANGEIRKRPLIETNGETGEIVWDKGRDFATVRKVLSMPQVNIVKKTEVQTGGFSKESILPKRNSDKLIARKKDWDPKKYGGFDSPTVAYSVLVVAKVEKGKSKKLKSVKELLGITIMERSSFEKNPIDFLEAKGYKEVKKDLIIKLPKYSLFELENGRKRMLASAGELQKGNELALPSKYVNFLYLASHYEKLKGSPEDNEQKQLFVEQHKHYLDEIIEQISEFSKRVILADANLDKVLSAYNKHRDKPIREQAENIIHLFTLTNLGAPAAFKYFDTTIDRKRYTSTKEVLDATLIHQSITGLYETRIDLSQLGGDGGGGGGGGGGGTLNIEDEYRLHETSKGPDVPLGSTWLSDFPQAWAETGGMGLAVRQAPLIIPLKATSTPVSIKQYPMSQEARLGIKPHIQRLLDQGILVPCQSPWNTPLLPVKKPGTNDYRPVQDLREVNKRVEDIHPTVPNPYNLLSGLPPSHQWYTVLDLKDAFFCLRLHPTSQSLFAFEWRDPEMGISGQLTWTRLPQGFKNSPTLFNEALHRDLADFRIQHPDLILLQYVDDLLLAATSELDCQQGTRALLQTLGDLGYRASAKKAQICQKQVKYLGYLLKEGQRWLTEARKETVMGQPTPKTPRQLREFLGKAGFCRLFIPGFAEMAAPLYPLTKPGTLFEWGPDQQKAYQEIKQALLTAPALGLPDLTKPFELFVDEKQGYAKGVLTQKLGPWRRPVAYLSKKLDPVAAGWPPCLRMVAAIAVLTKDAGKLTMGQPLVILAPHAVEALVKQPPDRWLSNARMTHYQALLLDTDRVQFGPIVALNPATLLPLPEEGLQHDCLDILAEAHGTRPDLTDQPLPDADHTWYTDGSSFLQEGQRKAGAAVTTETEVVWAKALPAGTSAQRAELIALTQALKMAEGKKLNVYTDSRYAFATAHIHGEIYRRRGWLTSEGKEIKNKDEILALLKALFLPKRLSIIHCPGHQKGNRAEARGNRMADQAAREVATRETPETSTLLAGKRTADGSEFEKRTADGSEFESPKKKAKVE

SEQ ID NO: 2561 - protein, 2100 aa, synthetic construct
MPAAKRVKLDGGDKKYSIGLDIGTNSVGWAVITDEYKVPSKKFKVLGNTDRHSIKKNLIGALLFDSGETAEATRLKRTARRRYTRRKNRICYLQEIFSNEMAKVDDSFFHRLEESFLVEEDKKHERHPIFGNIVDEVAYHEKYPTIYHLRKKLVDSTDKADLRLIYLALAHMIKFRGHFLIEGDLNPDNSDVDKLFIQLVQTYNQLFEENPINASGVDAKAILSARLSKSRRLENLIAQLPGEKKNGLFGNLIALSLGLTPNFKSNFDLAEDAKLQLSKDTYDDDLDNLLAQIGDQYADLFLAAKNLSDAILLSDILRVNTEITKAPLSASMIKRYDEHHQDLTLLKALVRQQLPEKYKEIFFDQSKNGYAGYIDGGASQEEFYKFIKPILEKMDGTEELLVKLNREDLLRKQRTFDNGSIPHQIHLGELHAILRRQEDFYPFLKDNREKIEKILTFRIPYYVGPLARGNSRFAWMTRKSEETITPWNFEEVVDKGASAQSFIERMTNFDKNLPNEKVLPKHSLLYEYFTVYNELTKVKYVTEGMRKPAFLSGEQKKAIVDLLFKTNRKVTVKQLKEDYFKKIECFDSVEISGVEDRFNASLGTYHDLLKIIKDKDFLDNEENEDILEDIVLTLTLFEDREMIEERLKTYAHLFDDKVMKQLKRRRYTGWGRLSRKLINGIRDKQSGKTILDFLKSDGFANRNFMQLIHDDSLTFKEDIQKAQVSGQGDSLHEHIANLAGSPAIKKGILQTVKVVDELVKVMGRHKPENIVIEMARENQTTQKGQKNSRERMKRIEEGIKELGSQILKEHPVENTQLQNEKLYLYYLQNGRDMYVDQELDINRLSDYDVDHIVPQSFLKDDSIDNKVLTRSDKARGKSDNVPSEEVVKKMKNYWRQLLNAKLITQRKFDNLTKAERGGLSELDKAGFIKRQLVETRQITKHVAQILDSRMNTKYDENDKLIREVKVITLKSKLVSDFRKDFQFYKVREINNYHHAHDAYLNAVVGTALIKKYPKLESEFVYGDYKVYDVRKMIAKSEQEIGKATAKYFFYSNIMNFFKTEITLANGEIRKRPLIETNGETGEIVWDKGRDFATVRKVLSMPQVNIVKKTEVQTGGFSKESILPKRNSDKLIARKKDWDPKKYGGFDSPTVAYSVLVVAKVEKGKSKKLKSVKELLGITIMERSSFEKNPIDFLEAKGYKEVKKDLIIKLPKYSLFELENGRKRMLASAGELQKGNELALPSKYVNFLYLASHYEKLKGSPEDNEQKQLFVEQHKHYLDEIIEQISEFSKRVILADANLDKVLSAYNKHRDKPIREQAENIIHLFTLTNLGAPAAFKYFDTTIDRKRYTSTKEVLDATLIHQSITGLYETRIDLSQLGGDGGEAAAKGGGGSEAAAKGGTLNIEDEYRLHETSKGPDVPLGSTWLSDFPQAWAETGGMGLAVRQAPLIIPLKATSTPVSIKQYPMSQEARLGIKPHIQRLLDQGILVPCQSPWNTPLLPVKKPGTNDYRPVQDLREVNKRVEDIHPTVPNPYNLLSGLPPSHQWYTVLDLKDAFFCLRLHPTSQSLFAFEWRDPEMGISGQLTWTRLPQGFKNSPTLFNEALHRDLADFRIQHPDLILLQYVDDLLLAATSELDCQQGTRALLQTLGDLGYRASAKKAQICQKQVKYLGYLLKEGQRWLTEARKETVMGQPTPKTPRQLREFLGKAGFCRLFIPGFAEMAAPLYPLTKPGTLFEWGPDQQKAYQEIKQALLTAPALGLPDLTKPFELFVDEKQGYAKGVLTQKLGPWRRPVAYLSKKLDPVAAGWPPCLRMVAAIAVLTKDAGKLTMGQPLVILAPHAVEALVKQPPDRWLSNARMTHYQALLLDTDRVQFGPIVALNPATLLPLPEEGLQHDCLDILAEAHGTRPDLTDQPLPDADHTWYTDGSSFLQEGQRKAGAAVTTETEVVWAKALPAGTSAQRAELIALTQALKMAEGKKLNVYTDSRYAFATAHIHGEIYRRRGWLTSEGKEIKNKDEILALLKALFLPKRLSIIHCPGHQKGNRAEARGNRMADQAAREVATRETPETSTLLAGKRTADGSEFEKRTADGSEFESPKKKAKVE

SEQ ID NO: 2562 - protein, 2091 aa, synthetic construct
MPAAKRVKLDGGDKKYSIGLDIGTNSVGWAVITDEYKVPSKKFKVLGNTDRHSIKKNLIGALLFDSGETAEATRLKRTARRRYTRRKNRICYLQEIFSNEMAKVDDSFFHRLEESFLVEEDKKHERHPIFGNIVDEVAYHEKYPTIYHLRKKLVDSTDKADLRLIYLALAHMIKFRGHFLIEGDLNPDNSDVDKLFIQLVQTYNQLFEENPINASGVDAKAILSARLSKSRRLENLIAQLPGEKKNGLFGNLIALSLGLTPNFKSNFDLAEDAKLQLSKDTYDDDLDNLLAQIGDQYADLFLAAKNLSDAILLSDILRVNTEITKAPLSASMIKRYDEHHQDLTLLKALVRQQLPEKYKEIFFDQSKNGYAGYIDGGASQEEFYKFIKPILEKMDGTEELLVKLNREDLLRKQRTFDNGSIPHQIHLGELHAILRRQEDFYPFLKDNREKIEKILTFRIPYYVGPLARGNSRFAWMTRKSEETITPWNFEEVVDKGASAQSFIERMTNFDKNLPNEKVLPKHSLLYEYFTVYNELTKVKYVTEGMRKPAFLSGEQKKAIVDLLFKTNRKVTVKQLKEDYFKKIECFDSVEISGVEDRFNASLGTYHDLLKIIKDKDFLDNEENEDILEDIVLTLTLFEDREMIEERLKTYAHLFDDKVMKQLKRRRYTGWGRLSRKLINGIRDKQSGKTILDFLKSDGFANRNFMQLIHDDSLTFKEDIQKAQVSGQGDSLHEHIANLAGSPAIKKGILQTVKVVDELVKVMGRHKPENIVIEMARENQTTQKGQKNSRERMKRIEEGIKELGSQILKEHPVENTQLQNEKLYLYYLQNGRDMYVDQELDINRLSDYDVDHIVPQSFLKDDSIDNKVLTRSDKARGKSDNVPSEEVVKKMKNYWRQLLNAKLITQRKFDNLTKAERGGLSELDKAGFIKRQLVETRQITKHVAQILDSRMNTKYDENDKLIREVKVITLKSKLVSDFRKDFQFYKVREINNYHHAHDAYLNAVVGTALIKKYPKLESEFVYGDYKVYDVRKMIAKSEQEIGKATAKYFFYSNIMNFFKTEITLANGEIRKRPLIETNGETGEIVWDKGRDFATVRKVLSMPQVNIVKKTEVQTGGFSKESILPKRNSDKLIARKKDWDPKKYGGFDSPTVAYSVLVVAKVEKGKSKKLKSVKELLGITIMERSSFEKNPIDFLEAKGYKEVKKDLIIKLPKYSLFELENGRKRMLASAGELQKGNELALPSKYVNFLYLASHYEKLKGSPEDNEQKQLFVEQHKHYLDEIIEQISEFSKRVILADANLDKVLSAYNKHRDKPIREQAENIIHLFTLTNLGAPAAFKYFDTTIDRKRYTSTKEVLDATLIHQSITGLYETRIDLSQLGGDGGGGGGGGGGTLNIEDEYRLHETSKGPDVPLGSTWLSDFPQAWAETGGMGLAVRQAPLIIPLKATSTPVSIKQYPMSQEARLGIKPHIQRLLDQGILVPCQSPWNTPLLPVKKPGTNDYRPVQDLREVNKRVEDIHPTVPNPYNLLSGLPPSHQWYTVLDLKDAFFCLRLHPTSQSLFAFEWRDPEMGISGQLTWTRLPQGFKNSPTLFNEALHRDLADFRIQHPDLILLQYVDDLLLAATSELDCQQGTRALLQTLGDLGYRASAKKAQICQKQVKYLGYLLKEGQRWLTEARKETVMGQPTPKTPRQLREFLGKAGFCRLFIPGFAEMAAPLYPLTKPGTLFEWGPDQQKAYQEIKQALLTAPALGLPDLTKPFELFVDEKQGYAKGVLTQKLGPWRRPVAYLSKKLDPVAAGWPPCLRMVAAIAVLTKDAGKLTMGQPLVILAPHAVEALVKQPPDRWLSNARMTHYQALLLDTDRVQFGPIVALNPATLLPLPEEGLQHDCLDILAEAHGTRPDLTDQPLPDADHTWYTDGSSFLQEGQRKAGAAVTTETEVVWAKALPAGTSAQRAELIALTQALKMAEGKKLNVYTDSRYAFATAHIHGEIYRRRGWLTSEGKEIKNKDEILALLKALFLPKRLSIIHCPGHQKGNRAEARGNRMADQAAREVATRETPETSTLLAGKRTADGSEFEKRTADGSEFESPKKKAKVE

SEQ ID NO: 2563 - protein, 2094 aa, synthetic construct
MPAAKRVKLDGGDKKYSIGLDIGTNSVGWAVITDEYKVPSKKFKVLGNTDRHSIKKNLIGALLFDSGETAEATRLKRTARRRYTRRKNRICYLQEIFSNEMAKVDDSFFHRLEESFLVEEDKKHERHPIFGNIVDEVAYHEKYPTIYHLRKKLVDSTDKADLRLIYLALAHMIKFRGHFLIEGDLNPDNSDVDKLFIQLVQTYNQLFEENPINASGVDAKAILSARLSKSRRLENLIAQLPGEKKNGLFGNLIALSLGLTPNFKSNFDLAEDAKLQLSKDTYDDDLDNLLAQIGDQYADLFLAAKNLSDAILLSDILRVNTEITKAPLSASMIKRYDEHHQDLTLLKALVRQQLPEKYKEIFFDQSKNGYAGYIDGGASQEEFYKFIKPILEKMDGTEELLVKLNREDLLRKQRTFDNGSIPHQIHLGELHAILRRQEDFYPFLKDNREKIEKILTFRIPYYVGPLARGNSRFAWMTRKSEETITPWNFEEVVDKGASAQSFIERMTNFDKNLPNEKVLPKHSLLYEYFTVYNELTKVKYVTEGMRKPAFLSGEQKKAIVDLLFKTNRKVTVKQLKEDYFKKIECFDSVEISGVEDRFNASLGTYHDLLKIIKDKDFLDNEENEDILEDIVLTLTLFEDREMIEERLKTYAHLFDDKVMKQLKRRRYTGWGRLSRKLINGIRDKQSGKTILDFLKSDGFANRNFMQLIHDDSLTFKEDIQKAQVSGQGDSLHEHIANLAGSPAIKKGILQTVKVVDELVKVMGRHKPENIVIEMARENQTTQKGQKNSRERMKRIEEGIKELGSQILKEHPVENTQLQNEKLYLYYLQNGRDMYVDQELDINRLSDYDVDHIVPQSFLKDDSIDNKVLTRSDKARGKSDNVPSEEVVKKMKNYWRQLLNAKLITQRKFDNLTKAERGGLSELDKAGFIKRQLVETRQITKHVAQILDSRMNTKYDENDKLIREVKVITLKSKLVSDFRKDFQFYKVREINNYHHAHDAYLNAVVGTALIKKYPKLESEFVYGDYKVYDVRKMIAKSEQEIGKATAKYFFYSNIMNFFKTEITLANGEIRKRPLIETNGETGEIVWDKGRDFATVRKVLSMPQVNIVKKTEVQTGGFSKESILPKRNSDKLIARKKDWDPKKYGGFDSPTVAYSVLVVAKVEKGKSKKLKSVKELLGITIMERSSFEKNPIDFLEAKGYKEVKKDLIIKLPKYSLFELENGRKRMLASAGELQKGNELALPSKYVNFLYLASHYEKLKGSPEDNEQKQLFVEQHKHYLDEIIEQISEFSKRVILADANLDKVLSAYNKHRDKPIREQAENIIHLFTLTNLGAPAAFKYFDTTIDRKRYTSTKEVLDATLIHQSITGLYETRIDLSQLGGDGGGGSPAPGSSGGTLNIEDEYRLHETSKGPDVPLGSTWLSDFPQAWAETGGMGLAVRQAPLIIPLKATSTPVSIKQYPMSQEARLGIKPHIQRLLDQGILVPCQSPWNTPLLPVKKPGTNDYRPVQDLREVNKRVEDIHPTVPNPYNLLSGLPPSHQWYTVLDLKDAFFCLRLHPTSQSLFAFEWRDPEMGISGQLTWTRLPQGFKNSPTLFNEALHRDLADFRIQHPDLILLQYVDDLLLAATSELDCQQGTRALLQTLGDLGYRASAKKAQICQKQVKYLGYLLKEGQRWLTEARKETVMGQPTPKTPRQLREFLGKAGFCRLFIPGFAEMAAPLYPLTKPGTLFEWGPDQQKAYQEIKQALLTAPALGLPDLTKPFELFVDEKQGYAKGVLTQKLGPWRRPVAYLSKKLDPVAAGWPPCLRMVAAIAVLTKDAGKLTMGQPLVILAPHAVEALVKQPPDRWLSNARMTHYQALLLDTDRVQFGPIVALNPATLLPLPEEGLQHDCLDILAEAHGTRPDLTDQPLPDADHTWYTDGSSFLQEGQRKAGAAVTTETEVVWAKALPAGTSAQRAELIALTQALKMAEGKKLNVYTDSRYAFATAHIHGEIYRRRGWLTSEGKEIKNKDEILALLKALFLPKRLSIIHCPGHQKGNRAEARGNRMADQAAREVATRETPETSTLLAGKRTADGSEFEKRTADGSEFESPKKKAKVE

SEQ ID NO: 2564 - protein, 2096 aa, synthetic construct
MPAAKRVKLDGGDKKYSIGLDIGTNSVGWAVITDEYKVPSKKFKVLGNTDRHSIKKNLIGALLFDSGETAEATRLKRTARRRYTRRKNRICYLQEIFSNEMAKVDDSFFHRLEESFLVEEDKKHERHPIFGNIVDEVAYHEKYPTIYHLRKKLVDSTDKADLRLIYLALAHMIKFRGHFLIEGDLNPDNSDVDKLFIQLVQTYNQLFEENPINASGVDAKAILSARLSKSRRLENLIAQLPGEKKNGLFGNLIALSLGLTPNFKSNFDLAEDAKLQLSKDTYDDDLDNLLAQIGDQYADLFLAAKNLSDAILLSDILRVNTEITKAPLSASMIKRYDEHHQDLTLLKALVRQQLPEKYKEIFFDQSKNGYAGYIDGGASQEEFYKFIKPILEKMDGTEELLVKLNREDLLRKQRTFDNGSIPHQIHLGELHAILRRQEDFYPFLKDNREKIEKILTFRIPYYVGPLARGNSRFAWMTRKSEETITPWNFEEVVDKGASAQSFIERMTNFDKNLPNEKVLPKHSLLYEYFTVYNELTKVKYVTEGMRKPAFLSGEQKKAIVDLLFKTNRKVTVKQLKEDYFKKIECFDSVEISGVEDRFNASLGTYHDLLKIIKDKDFLDNEENEDILEDIVLTLTLFEDREMIEERLKTYAHLFDDKVMKQLKRRRYTGWGRLSRKLINGIRDKQSGKTILDFLKSDGFANRNFMQLIHDDSLTFKEDIQKAQVSGQGDSLHEHIANLAGSPAIKKGILQTVKVVDELVKVMGRHKPENIVIEMARENQTTQKGQKNSRERMKRIEEGIKELGSQILKEHPVENTQLQNEKLYLYYLQNGRDMYVDQELDINRLSDYDVDHIVPQSFLKDDSIDNKVLTRSDKARGKSDNVPSEEVVKKMKNYWRQLLNAKLITQRKFDNLTKAERGGLSELDKAGFIKRQLVETRQITKHVAQILDSRMNTKYDENDKLIREVKVITLKSKLVSDFRKDFQFYKVREINNYHHAHDAYLNAVVGTALIKKYPKLESEFVYGDYKVYDVRKMIAKSEQEIGKATAKYFFYSNIMNFFKTEITLANGEIRKRPLIETNGETGEIVWDKGRDFATVRKVLSMPQVNIVKKTEVQTGGFSKESILPKRNSDKLIARKKDWDPKKYGGFDSPTVAYSVLVVAKVEKGKSKKLKSVKELLGITIMERSSFEKNPIDFLEAKGYKEVKKDLIIKLPKYSLFELENGRKRMLASAGELQKGNELALPSKYVNFLYLASHYEKLKGSPEDNEQKQLFVEQHKHYLDEIIEQISEFSKRVILADANLDKVLSAYNKHRDKPIREQAENIIHLFTLTNLGAPAAFKYFDTTIDRKRYTSTKEVLDATLIHQSITGLYETRIDLSQLGGDGGPAPGGSEAAAKGGTLNIEDEYRLHETSKGPDVPLGSTWLSDFPQAWAETGGMGLAVRQAPLIIPLKATSTPVSIKQYPMSQEARLGIKPHIQRLLDQGILVPCQSPWNTPLLPVKKPGTNDYRPVQDLREVNKRVEDIHPTVPNPYNLLSGLPPSHQWYTVLDLKDAFFCLRLHPTSQSLFAFEWRDPEMGISGQLTWTRLPQGFKNSPTLFNEALHRDLADFRIQHPDLILLQYVDDLLLAATSELDCQQGTRALLQTLGDLGYRASAKKAQICQKQVKYLGYLLKEGQRWLTEARKETVMGQPTPKTPRQLREFLGKAGFCRLFIPGFAEMAAPLYPLTKPGTLFEWGPDQQKAYQEIKQALLTAPALGLPDLTKPFELFVDEKQGYAKGVLTQKLGPWRRPVAYLSKKLDPVAAGWPPCLRMVAAIAVLTKDAGKLTMGQPLVILAPHAVEALVKQPPDRWLSNARMTHYQALLLDTDRVQFGPIVALNPATLLPLPEEGLQHDCLDILAEAHGTRPDLTDQPLPDADHTWYTDGSSFLQEGQRKAGAAVTTETEVVWAKALPAGTSAQRAELIALTQALKMAEGKKLNVYTDSRYAFATAHIHGEIYRRRGWLTSEGKEIKNKDEILALLKALFLPKRLSIIHCPGHQKGNRAEARGNRMADQAAREVATRETPETSTLLAGKRTADGSEFEKRTADGSEFESPKKKAKVE

SEQ ID NO: 2565 - protein, 2094 aa, synthetic construct
MPAAKRVKLDGGDKKYSIGLDIGTNSVGWAVITDEYKVPSKKFKVLGNTDRHSIKKNLIGALLFDSGETAEATRLKRTARRRYTRRKNRICYLQEIFSNEMAKVDDSFFHRLEESFLVEEDKKHERHPIFGNIVDEVAYHEKYPTIYHLRKKLVDSTDKADLRLIYLALAHMIKFRGHFLIEGDLNPDNSDVDKLFIQLVQTYNQLFEENPINASGVDAKAILSARLSKSRRLENLIAQLPGEKKNGLFGNLIALSLGLTPNFKSNFDLAEDAKLQLSKDTYDDDLDNLLAQIGDQYADLFLAAKNLSDAILLSDILRVNTEITKAPLSASMIKRYDEHHQDLTLLKALVRQQLPEKYKEIFFDQSKNGYAGYIDGGASQEEFYKFIKPILEKMDGTEELLVKLNREDLLRKQRTFDNGSIPHQIHLGELHAILRRQEDFYPFLKDNREKIEKILTFRIPYYVGPLARGNSRFAWMTRKSEETITPWNFEEVVDKGASAQSFIERMTNFDKNLPNEKVLPKHSLLYEYFTVYNELTKVKYVTEGMRKPAFLSGEQKKAIVDLLFKTNRKVTVKQLKEDYFKKIECFDSVEISGVEDRFNASLGTYHDLLKIIKDKDFLDNEENEDILEDIVLTLTLFEDREMIEERLKTYAHLFDDKVMKQLKRRRYTGWGRLSRKLINGIRDKQSGKTILDFLKSDGFANRNFMQLIHDDSLTFKEDIQKAQVSGQGDSLHEHIANLAGSPAIKKGILQTVKVVDELVKVMGRHKPENIVIEMARENQTTQKGQKNSRERMKRIEEGIKELGSQILKEHPVENTQLQNEKLYLYYLQNGRDMYVDQELDINRLSDYDVDHIVPQSFLKDDSIDNKVLTRSDKARGKSDNVPSEEVVKKMKNYWRQLLNAKLITQRKFDNLTKAERGGLSELDKAGFIKRQLVETRQITKHVAQILDSRMNTKYDENDKLIREVKVITLKSKLVSDFRKDFQFYKVREINNYHHAHDAYLNAVVGTALIKKYPKLESEFVYGDYKVYDVRKMIAKSEQEIGKATAKYFFYSNIMNFFKTEITLANGEIRKRPLIETNGETGEIVWDKGRDFATVRKVLSMPQVNIVKKTEVQTGGFSKESILPKRNSDKLIARKKDWDPKKYGGFDSPTVAYSVLVVAKVEKGKSKKLKSVKELLGITIMERSSFEKNPIDFLEAKGYKEVKKDLIIKLPKYSLFELENGRKRMLASAGELQKGNELALPSKYVNFLYLASHYEKLKGSPEDNEQKQLFVEQHKHYLDEIIEQISEFSKRVILADANLDKVLSAYNKHRDKPIREQAENIIHLFTLTNLGAPAAFKYFDTTIDRKRYTSTKEVLDATLIHQSITGLYETRIDLSQLGGDGGGSSGGGGGSGGTLNIEDEYRLHETSKGPDVPLGSTWLSDFPQAWAETGGMGLAVRQAPLIIPLKATSTPVSIKQYPMSQEARLGIKPHIQRLLDQGILVPCQSPWNTPLLPVKKPGTNDYRPVQDLREVNKRVEDIHPTVPNPYNLLSGLPPSHQWYTVLDLKDAFFCLRLHPTSQSLFAFEWRDPEMGISGQLTWTRLPQGFKNSPTLFNEALHRDLADFRIQHPDLILLQYVDDLLLAATSELDCQQGTRALLQTLGDLGYRASAKKAQICQKQVKYLGYLLKEGQRWLTEARKETVMGQPTPKTPRQLREFLGKAGFCRLFIPGFAEMAAPLYPLTKPGTLFEWGPDQQKAYQEIKQALLTAPALGLPDLTKPFELFVDEKQGYAKGVLTQKLGPWRRPVAYLSKKLDPVAAGWPPCLRMVAAIAVLTKDAGKLTMGQPLVILAPHAVEALVKQPPDRWLSNARMTHYQALLLDTDRVQFGPIVALNPATLLPLPEEGLQHDCLDILAEAHGTRPDLTDQPLPDADHTWYTDGSSFLQEGQRKAGAAVTTETEVVWAKALPAGTSAQRAELIALTQALKMAEGKKLNVYTDSRYAFATAHIHGEIYRRRGWLTSEGKEIKNKDEILALLKALFLPKRLSIIHCPGHQKGNRAEARGNRMADQAAREVATRETPETSTLLAGKRTADGSEFEKRTADGSEFESPKKKAKVE

SEQ ID NO: 2566 - protein, 2115 aa, synthetic construct
MPAAKRVKLDGGDKKYSIGLDIGTNSVGWAVITDEYKVPSKKFKVLGNTDRHSIKKNLIGALLFDSGETAEATRLKRTARRRYTRRKNRICYLQEIFSNEMAKVDDSFFHRLEESFLVEEDKKHERHPIFGNIVDEVAYHEKYPTIYHLRKKLVDSTDKADLRLIYLALAHMIKFRGHFLIEGDLNPDNSDVDKLFIQLVQTYNQLFEENPINASGVDAKAILSARLSKSRRLENLIAQLPGEKKNGLFGNLIALSLGLTPNFKSNFDLAEDAKLQLSKDTYDDDLDNLLAQIGDQYADLFLAAKNLSDAILLSDILRVNTEITKAPLSASMIKRYDEHHQDLTLLKALVRQQLPEKYKEIFFDQSKNGYAGYIDGGASQEEFYKFIKPILEKMDGTEELLVKLNREDLLRKQRTFDNGSIPHQIHLGELHAILRRQEDFYPFLKDNREKIEKILTFRIPYYVGPLARGNSRFAWMTRKSEETITPWNFEEVVDKGASAQSFIERMTNFDKNLPNEKVLPKHSLLYEYFTVYNELTKVKYVTEGMRKPAFLSGEQKKAIVDLLFKTNRKVTVKQLKEDYFKKIECFDSVEISGVEDRFNASLGTYHDLLKIIKDKDFLDNEENEDILEDIVLTLTLFEDREMIEERLKTYAHLFDDKVMKQLKRRRYTGWGRLSRKLINGIRDKQSGKTILDFLKSDGFANRNFMQLIHDDSLTFKEDIQKAQVSGQGDSLHEHIANLAGSPAIKKGILQTVKVVDELVKVMGRHKPENIVIEMARENQTTQKGQKNSRERMKRIEEGIKELGSQILKEHPVENTQLQNEKLYLYYLQNGRDMYVDQELDINRLSDYDVDHIVPQSFLKDDSIDNKVLTRSDKARGKSDNVPSEEVVKKMKNYWRQLLNAKLITQRKFDNLTKAERGGLSELDKAGFIKRQLVETRQITKHVAQILDSRMNTKYDENDKLIREVKVITLKSKLVSDFRKDFQFYKVREINNYHHAHDAYLNAVVGTALIKKYPKLESEFVYGDYKVYDVRKMIAKSEQEIGKATAKYFFYSNIMNFFKTEITLANGEIRKRPLIETNGETGEIVWDKGRDFATVRKVLSMPQVNIVKKTEVQTGGFSKESILPKRNSDKLIARKKDWDPKKYGGFDSPTVAYSVLVVAKVEKGKSKKLKSVKELLGITIMERSSFEKNPIDFLEAKGYKEVKKDLIIKLPKYSLFELENGRKRMLASAGELQKGNELALPSKYVNFLYLASHYEKLKGSPEDNEQKQLFVEQHKHYLDEIIEQISEFSKRVILADANLDKVLSAYNKHRDKPIREQAENIIHLFTLTNLGAPAAFKYFDTTIDRKRYTSTKEVLDATLIHQSITGLYETRIDLSQLGGDGGGGGGSGGGGSGGGGSGGGGSGGGGSGGGGSGGTLNIEDEYRLHETSKGPDVPLGSTWLSDFPQAWAETGGMGLAVRQAPLIIPLKATSTPVSIKQYPMSQEARLGIKPHIQRLLDQGILVPCQSPWNTPLLPVKKPGTNDYRPVQDLREVNKRVEDIHPTVPNPYNLLSGLPPSHQWYTVLDLKDAFFCLRLHPTSQSLFAFEWRDPEMGISGQLTWTRLPQGFKNSPTLFNEALHRDLADFRIQHPDLILLQYVDDLLLAATSELDCQQGTRALLQTLGDLGYRASAKKAQICQKQVKYLGYLLKEGQRWLTEARKETVMGQPTPKTPRQLREFLGKAGFCRLFIPGFAEMAAPLYPLTKPGTLFEWGPDQQKAYQEIKQALLTAPALGLPDLTKPFELFVDEKQGYAKGVLTQKLGPWRRPVAYLSKKLDPVAAGWPPCLRMVAAIAVLTKDAGKLTMGQPLVILAPHAVEALVKQPPDRWLSNARMTHYQALLLDTDRVQFGPIVALNPATLLPLPEEGLQHDCLDILAEAHGTRPDLTDQPLPDADHTWYTDGSSFLQEGQRKAGAAVTTETEVVWAKALPAGTSAQRAELIALTQALKMAEGKKLNVYTDSRYAFATAHIHGEIYRRRGWLTSEGKEIKNKDEILALLKALFLPKRLSIIHCPGHQKGNRAEARGNRMADQAAREVATRETPETSTLLAGKRTADGSEFEKRTADGSEFESPKKKAKVE

SEQ ID NO: 2567 - protein, 2094 aa, synthetic construct
MPAAKRVKLDGGDKKYSIGLDIGTNSVGWAVITDEYKVPSKKFKVLGNTDRHSIKKNLIGALLFDSGETAEATRLKRTARRRYTRRKNRICYLQEIFSNEMAKVDDSFFHRLEESFLVEEDKKHERHPIFGNIVDEVAYHEKYPTIYHLRKKLVDSTDKADLRLIYLALAHMIKFRGHFLIEGDLNPDNSDVDKLFIQLVQTYNQLFEENPINASGVDAKAILSARLSKSRRLENLIAQLPGEKKNGLFGNLIALSLGLTPNFKSNFDLAEDAKLQLSKDTYDDDLDNLLAQIGDQYADLFLAAKNLSDAILLSDILRVNTEITKAPLSASMIKRYDEHHQDLTLLKALVRQQLPEKYKEIFFDQSKNGYAGYIDGGASQEEFYKFIKPILEKMDGTEELLVKLNREDLLRKQRTFDNGSIPHQIHLGELHAILRRQEDFYPFLKDNREKIEKILTFRIPYYVGPLARGNSRFAWMTRKSEETITPWNFEEVVDKGASAQSFIERMTNFDKNLPNEKVLPKHSLLYEYFTVYNELTKVKYVTEGMRKPAFLSGEQKKAIVDLLFKTNRKVTVKQLKEDYFKKIECFDSVEISGVEDRFNASLGTYHDLLKIIKDKDFLDNEENEDILEDIVLTLTLFEDREMIEERLKTYAHLFDDKVMKQLKRRRYTGWGRLSRKLINGIRDKQSGKTILDFLKSDGFANRNFMQLIHDDSLTFKEDIQKAQVSGQGDSLHEHIANLAGSPAIKKGILQTVKVVDELVKVMGRHKPENIVIEMARENQTTQKGQKNSRERMKRIEEGIKELGSQILKEHPVENTQLQNEKLYLYYLQNGRDMYVDQELDINRLSDYDVDHIVPQSFLKDDSIDNKVLTRSDKARGKSDNVPSEEVVKKMKNYWRQLLNAKLITQRKFDNLTKAERGGLSELDKAGFIKRQLVETRQITKHVAQILDSRMNTKYDENDKLIREVKVITLKSKLVSDFRKDFQFYKVREINNYHHAHDAYLNAVVGTALIKKYPKLESEFVYGDYKVYDVRKMIAKSEQEIGKATAKYFFYSNIMNFFKTEITLANGEIRKRPLIETNGETGEIVWDKGRDFATVRKVLSMPQVNIVKKTEVQTGGFSKESILPKRNSDKLIARKKDWDPKKYGGFDSPTVAYSVLVVAKVEKGKSKKLKSVKELLGITIMERSSFEKNPIDFLEAKGYKEVKKDLIIKLPKYSLFELENGRKRMLASAGELQKGNELALPSKYVNFLYLASHYEKLKGSPEDNEQKQLFVEQHKHYLDEIIEQISEFSKRVILADANLDKVLSAYNKHRDKPIREQAENIIHLFTLTNLGAPAAFKYFDTTIDRKRYTSTKEVLDATLIHQSITGLYETRIDLSQLGGDGGGSSGGSGGGGGTLNIEDEYRLHETSKGPDVPLGSTWLSDFPQAWAETGGMGLAVRQAPLIIPLKATSTPVSIKQYPMSQEARLGIKPHIQRLLDQGILVPCQSPWNTPLLPVKKPGTNDYRPVQDLREVNKRVEDIHPTVPNPYNLLSGLPPSHQWYTVLDLKDAFFCLRLHPTSQSLFAFEWRDPEMGISGQLTWTRLPQGFKNSPTLFNEALHRDLADFRIQHPDLILLQYVDDLLLAATSELDCQQGTRALLQTLGDLGYRASAKKAQICQKQVKYLGYLLKEGQRWLTEARKETVMGQPTPKTPRQLREFLGKAGFCRLFIPGFAEMAAPLYPLTKPGTLFEWGPDQQKAYQEIKQALLTAPALGLPDLTKPFELFVDEKQGYAKGVLTQKLGPWRRPVAYLSKKLDPVAAGWPPCLRMVAAIAVLTKDAGKLTMGQPLVILAPHAVEALVKQPPDRWLSNARMTHYQALLLDTDRVQFGPIVALNPATLLPLPEEGLQHDCLDILAEAHGTRPDLTDQPLPDADHTWYTDGSSFLQEGQRKAGAAVTTETEVVWAKALPAGTSAQRAELIALTQALKMAEGKKLNVYTDSRYAFATAHIHGEIYRRRGWLTSEGKEIKNKDEILALLKALFLPKRLSIIHCPGHQKGNRAEARGNRMADQAAREVATRETPETSTLLAGKRTADGSEFEKRTADGSEFESPKKKAKVE

SEQ ID NO: 2568 - protein, 2090 aa, synthetic construct
MPAAKRVKLDGGDKKYSIGLDIGTNSVGWAVITDEYKVPSKKFKVLGNTDRHSIKKNLIGALLFDSGETAEATRLKRTARRRYTRRKNRICYLQEIFSNEMAKVDDSFFHRLEESFLVEEDKKHERHPIFGNIVDEVAYHEKYPTIYHLRKKLVDSTDKADLRLIYLALAHMIKFRGHFLIEGDLNPDNSDVDKLFIQLVQTYNQLFEENPINASGVDAKAILSARLSKSRRLENLIAQLPGEKKNGLFGNLIALSLGLTPNFKSNFDLAEDAKLQLSKDTYDDDLDNLLAQIGDQYADLFLAAKNLSDAILLSDILRVNTEITKAPLSASMIKRYDEHHQDLTLLKALVRQQLPEKYKEIFFDQSKNGYAGYIDGGASQEEFYKFIKPILEKMDGTEELLVKLNREDLLRKQRTFDNGSIPHQIHLGELHAILRRQEDFYPFLKDNREKIEKILTFRIPYYVGPLARGNSRFAWMTRKSEETITPWNFEEVVDKGASAQSFIERMTNFDKNLPNEKVLPKHSLLYEYFTVYNELTKVKYVTEGMRKPAFLSGEQKKAIVDLLFKTNRKVTVKQLKEDYFKKIECFDSVEISGVEDRFNASLGTYHDLLKIIKDKDFLDNEENEDILEDIVLTLTLFEDREMIEERLKTYAHLFDDKVMKQLKRRRYTGWGRLSRKLINGIRDKQSGKTILDFLKSDGFANRNFMQLIHDDSLTFKEDIQKAQVSGQGDSLHEHIANLAGSPAIKKGILQTVKVVDELVKVMGRHKPENIVIEMARENQTTQKGQKNSRERMKRIEEGIKELGSQILKEHPVENTQLQNEKLYLYYLQNGRDMYVDQELDINRLSDYDVDHIVPQSFLKDDSIDNKVLTRSDKARGKSDNVPSEEVVKKMKNYWRQLLNAKLITQRKFDNLTKAERGGLSELDKAGFIKRQLVETRQITKHVAQILDSRMNTKYDENDKLIREVKVITLKSKLVSDFRKDFQFYKVREINNYHHAHDAYLNAVVGTALIKKYPKLESEFVYGDYKVYDVRKMIAKSEQEIGKATAKYFFYSNIMNFFKTEITLANGEIRKRPLIETNGETGEIVWDKGRDFATVRKVLSMPQVNIVKKTEVQTGGFSKESILPKRNSDKLIARKKDWDPKKYGGFDSPTVAYSVLVVAKVEKGKSKKLKSVKELLGITIMERSSFEKNPIDFLEAKGYKEVKKDLIIKLPKYSLFELENGRKRMLASAGELQKGNELALPSKYVNFLYLASHYEKLKGSPEDNEQKQLFVEQHKHYLDEIIEQISEFSKRVILADANLDKVLSAYNKHRDKPIREQAENIIHLFTLTNLGAPAAFKYFDTTIDRKRYTSTKEVLDATLIHQSITGLYETRIDLSQLGGDGGPAPAPGGTLNIEDEYRLHETSKGPDVPLGSTWLSDFPQAWAETGGMGLAVRQAPLIIPLKATSTPVSIKQYPMSQEARLGIKPHIQRLLDQGILVPCQSPWNTPLLPVKKPGTNDYRPVQDLREVNKRVEDIHPTVPNPYNLLSGLPPSHQWYTVLDLKDAFFCLRLHPTSQSLFAFEWRDPEMGISGQLTWTRLPQGFKNSPTLFNEALHRDLADFRIQHPDLILLQYVDDLLLAATSELDCQQGTRALLQTLGDLGYRASAKKAQICQKQVKYLGYLLKEGQRWLTEARKETVMGQPTPKTPRQLREFLGKAGFCRLFIPGFAEMAAPLYPLTKPGTLFEWGPDQQKAYQEIKQALLTAPALGLPDLTKPFELFVDEKQGYAKGVLTQKLGPWRRPVAYLSKKLDPVAAGWPPCLRMVAAIAVLTKDAGKLTMGQPLVILAPHAVEALVKQPPDRWLSNARMTHYQALLLDTDRVQFGPIVALNPATLLPLPEEGLQHDCLDILAEAHGTRPDLTDQPLPDADHTWYTDGSSFLQEGQRKAGAAVTTETEVVWAKALPAGTSAQRAELIALTQALKMAEGKKLNVYTDSRYAFATAHIHGEIYRRRGWLTSEGKEIKNKDEILALLKALFLPKRLSIIHCPGHQKGNRAEARGNRMADQAAREVATRETPETSTLLAGKRTADGSEFEKRTADGSEFESPKKKAKVE

SEQ ID NO: 2569 - protein, 2095 aa, synthetic construct
MPAAKRVKLDGGDKKYSIGLDIGTNSVGWAVITDEYKVPSKKFKVLGNTDRHSIKKNLIGALLFDSGETAEATRLKRTARRRYTRRKNRICYLQEIFSNEMAKVDDSFFHRLEESFLVEEDKKHERHPIFGNIVDEVAYHEKYPTIYHLRKKLVDSTDKADLRLIYLALAHMIKFRGHFLIEGDLNPDNSDVDKLFIQLVQTYNQLFEENPINASGVDAKAILSARLSKSRRLENLIAQLPGEKKNGLFGNLIALSLGLTPNFKSNFDLAEDAKLQLSKDTYDDDLDNLLAQIGDQYADLFLAAKNLSDAILLSDILRVNTEITKAPLSASMIKRYDEHHQDLTLLKALVRQQLPEKYKEIFFDQSKNGYAGYIDGGASQEEFYKFIKPILEKMDGTEELLVKLNREDLLRKQRTFDNGSIPHQIHLGELHAILRRQEDFYPFLKDNREKIEKILTFRIPYYVGPLARGNSRFAWMTRKSEETITPWNFEEVVDKGASAQSFIERMTNFDKNLPNEKVLPKHSLLYEYFTVYNELTKVKYVTEGMRKPAFLSGEQKKAIVDLLFKTNRKVTVKQLKEDYFKKIECFDSVEISGVEDRFNASLGTYHDLLKIIKDKDFLDNEENEDILEDIVLTLTLFEDREMIEERLKTYAHLFDDKVMKQLKRRRYTGWGRLSRKLINGIRDKQSGKTILDFLKSDGFANRNFMQLIHDDSLTFKEDIQKAQVSGQGDSLHEHIANLAGSPAIKKGILQTVKVVDELVKVMGRHKPENIVIEMARENQTTQKGQKNSRERMKRIEEGIKELGSQILKEHPVENTQLQNEKLYLYYLQNGRDMYVDQELDINRLSDYDVDHIVPQSFLKDDSIDNKVLTRSDKARGKSDNVPSEEVVKKMKNYWRQLLNAKLITQRKFDNLTKAERGGLSELDKAGFIKRQLVETRQITKHVAQILDSRMNTKYDENDKLIREVKVITLKSKLVSDFRKDFQFYKVREINNYHHAHDAYLNAVVGTALIKKYPKLESEFVYGDYKVYDVRKMIAKSEQEIGKATAKYFFYSNIMNFFKTEITLANGEIRKRPLIETNGETGEIVWDKGRDFATVRKVLSMPQVNIVKKTEVQTGGFSKESILPKRNSDKLIARKKDWDPKKYGGFDSPTVAYSVLVVAKVEKGKSKKLKSVKELLGITIMERSSFEKNPIDFLEAKGYKEVKKDLIIKLPKYSLFELENGRKRMLASAGELQKGNELALPSKYVNFLYLASHYEKLKGSPEDNEQKQLFVEQHKHYLDEIIEQISEFSKRVILADANLDKVLSAYNKHRDKPIREQAENIIHLFTLTNLGAPAAFKYFDTTIDRKRYTSTKEVLDATLIHQSITGLYETRIDLSQLGGDGGEAAAKEAAAKGGTLNIEDEYRLHETSKGPDVPLGSTWLSDFPQAWAETGGMGLAVRQAPLIIPLKATSTPVSIKQYPMSQEARLGIKPHIQRLLDQGILVPCQSPWNTPLLPVKKPGTNDYRPVQDLREVNKRVEDIHPTVPNPYNLLSGLPPSHQWYTVLDLKDAFFCLRLHPTSQSLFAFEWRDPEMGISGQLTWTRLPQGFKNSPTLFNEALHRDLADFRIQHPDLILLQYVDDLLLAATSELDCQQGTRALLQTLGDLGYRASAKKAQICQKQVKYLGYLLKEGQRWLTEARKETVMGQPTPKTPRQLREFLGKAGFCRLFIPGFAEMAAPLYPLTKPGTLFEWGPDQQKAYQEIKQALLTAPALGLPDLTKPFELFVDEKQGYAKGVLTQKLGPWRRPVAYLSKKLDPVAAGWPPCLRMVAAIAVLTKDAGKLTMGQPLVILAPHAVEALVKQPPDRWLSNARMTHYQALLLDTDRVQFGPIVALNPATLLPLPEEGLQHDCLDILAEAHGTRPDLTDQPLPDADHTWYTDGSSFLQEGQRKAGAAVTTETEVVWAKALPAGTSAQRAELIALTQALKMAEGKKLNVYTDSRYAFATAHIHGEIYRRRGWLTSEGKEIKNKDEILALLKALFLPKRLSIIHCPGHQKGNRAEARGNRMADQAAREVATRETPETSTLLAGKRTADGSEFEKRTADGSEFESPKKKAKVE

SEQ ID NO: 2570 - protein, 2096 aa, synthetic construct
MPAAKRVKLDGGDKKYSIGLDIGTNSVGWAVITDEYKVPSKKFKVLGNTDRHSIKKNLIGALLFDSGETAEATRLKRTARRRYTRRKNRICYLQEIFSNEMAKVDDSFFHRLEESFLVEEDKKHERHPIFGNIVDEVAYHEKYPTIYHLRKKLVDSTDKADLRLIYLALAHMIKFRGHFLIEGDLNPDNSDVDKLFIQLVQTYNQLFEENPINASGVDAKAILSARLSKSRRLENLIAQLPGEKKNGLFGNLIALSLGLTPNFKSNFDLAEDAKLQLSKDTYDDDLDNLLAQIGDQYADLFLAAKNLSDAILLSDILRVNTEITKAPLSASMIKRYDEHHQDLTLLKALVRQQLPEKYKEIFFDQSKNGYAGYIDGGASQEEFYKFIKPILEKMDGTEELLVKLNREDLLRKQRTFDNGSIPHQIHLGELHAILRRQEDFYPFLKDNREKIEKILTFRIPYYVGPLARGNSRFAWMTRKSEETITPWNFEEVVDKGASAQSFIERMTNFDKNLPNEKVLPKHSLLYEYFTVYNELTKVKYVTEGMRKPAFLSGEQKKAIVDLLFKTNRKVTVKQLKEDYFKKIECFDSVEISGVEDRFNASLGTYHDLLKIIKDKDFLDNEENEDILEDIVLTLTLFEDREMIEERLKTYAHLFDDKVMKQLKRRRYTGWGRLSRKLINGIRDKQSGKTILDFLKSDGFANRNFMQLIHDDSLTFKEDIQKAQVSGQGDSLHEHIANLAGSPAIKKGILQTVKVVDELVKVMGRHKPENIVIEMARENQTTQKGQKNSRERMKRIEEGIKELGSQILKEHPVENTQLQNEKLYLYYLQNGRDMYVDQELDINRLSDYDVDHIVPQSFLKDDSIDNKVLTRSDKARGKSDNVPSEEVVKKMKNYWRQLLNAKLITQRKFDNLTKAERGGLSELDKAGFIKRQLVETRQITKHVAQILDSRMNTKYDENDKLIREVKVITLKSKLVSDFRKDFQFYKVREINNYHHAHDAYLNAVVGTALIKKYPKLESEFVYGDYKVYDVRKMIAKSEQEIGKATAKYFFYSNIMNFFKTEITLANGEIRKRPLIETNGETGEIVWDKGRDFATVRKVLSMPQVNIVKKTEVQTGGFSKESILPKRNSDKLIARKKDWDPKKYGGFDSPTVAYSVLVVAKVEKGKSKKLKSVKELLGITIMERSSFEKNPIDFLEAKGYKEVKKDLIIKLPKYSLFELENGRKRMLASAGELQKGNELALPSKYVNFLYLASHYEKLKGSPEDNEQKQLFVEQHKHYLDEIIEQISEFSKRVILADANLDKVLSAYNKHRDKPIREQAENIIHLFTLTNLGAPAAFKYFDTTIDRKRYTSTKEVLDATLIHQSITGLYETRIDLSQLGGDGGGSSGGSEAAAKGGTLNIEDEYRLHETSKGPDVPLGSTWLSDFPQAWAETGGMGLAVRQAPLIIPLKATSTPVSIKQYPMSQEARLGIKPHIQRLLDQGILVPCQSPWNTPLLPVKKPGTNDYRPVQDLREVNKRVEDIHPTVPNPYNLLSGLPPSHQWYTVLDLKDAFFCLRLHPTSQSLFAFEWRDPEMGISGQLTWTRLPQGFKNSPTLFNEALHRDLADFRIQHPDLILLQYVDDLLLAATSELDCQQGTRALLQTLGDLGYRASAKKAQICQKQVKYLGYLLKEGQRWLTEARKETVMGQPTPKTPRQLREFLGKAGFCRLFIPGFAEMAAPLYPLTKPGTLFEWGPDQQKAYQEIKQALLTAPALGLPDLTKPFELFVDEKQGYAKGVLTQKLGPWRRPVAYLSKKLDPVAAGWPPCLRMVAAIAVLTKDAGKLTMGQPLVILAPHAVEALVKQPPDRWLSNARMTHYQALLLDTDRVQFGPIVALNPATLLPLPEEGLQHDCLDILAEAHGTRPDLTDQPLPDADHTWYTDGSSFLQEGQRKAGAAVTTETEVVWAKALPAGTSAQRAELIALTQALKMAEGKKLNVYTDSRYAFATAHIHGEIYRRRGWLTSEGKEIKNKDEILALLKALFLPKRLSIIHCPGHQKGNRAEARGNRMADQAAREVATRETPETSTLLAGKRTADGSEFEKRTADGSEFESPKKKAKVE

SEQ ID NO: 2571 - protein, 2094 aa, synthetic construct
MPAAKRVKLDGGDKKYSIGLDIGTNSVGWAVITDEYKVPSKKFKVLGNTDRHSIKKNLIGALLFDSGETAEATRLKRTARRRYTRRKNRICYLQEIFSNEMAKVDDSFFHRLEESFLVEEDKKHERHPIFGNIVDEVAYHEKYPTIYHLRKKLVDSTDKADLRLIYLALAHMIKFRGHFLIEGDLNPDNSDVDKLFIQLVQTYNQLFEENPINASGVDAKAILSARLSKSRRLENLIAQLPGEKKNGLFGNLIALSLGLTPNFKSNFDLAEDAKLQLSKDTYDDDLDNLLAQIGDQYADLFLAAKNLSDAILLSDILRVNTEITKAPLSASMIKRYDEHHQDLTLLKALVRQQLPEKYKEIFFDQSKNGYAGYIDGGASQEEFYKFIKPILEKMDGTEELLVKLNREDLLRKQRTFDNGSIPHQIHLGELHAILRRQEDFYPFLKDNREKIEKILTFRIPYYVGPLARGNSRFAWMTRKSEETITPWNFEEVVDKGASAQSFIERMTNFDKNLPNEKVLPKHSLLYEYFTVYNELTKVKYVTEGMRKPAFLSGEQKKAIVDLLFKTNRKVTVKQLKEDYFKKIECFDSVEISGVEDRFNASLGTYHDLLKIIKDKDFLDNEENEDILEDIVLTLTLFEDREMIEERLKTYAHLFDDKVMKQLKRRRYTGWGRLSRKLINGIRDKQSGKTILDFLKSDGFANRNFMQLIHDDSLTFKEDIQKAQVSGQGDSLHEHIANLAGSPAIKKGILQTVKVVDELVKVMGRHKPENIVIEMARENQTTQKGQKNSRERMKRIEEGIKELGSQILKEHPVENTQLQNEKLYLYYLQNGRDMYVDQELDINRLSDYDVDHIVPQSFLKDDSIDNKVLTRSDKARGKSDNVPSEEVVKKMKNYWRQLLNAKLITQRKFDNLTKAERGGLSELDKAGFIKRQLVETRQITKHVAQILDSRMNTKYDENDKLIREVKVITLKSKLVSDFRKDFQFYKVREINNYHHAHDAYLNAVVGTALIKKYPKLESEFVYGDYKVYDVRKMIAKSEQEIGKATAKYFFYSNIMNFFKTEITLANGEIRKRPLIETNGETGEIVWDKGRDFATVRKVLSMPQVNIVKKTEVQTGGFSKESILPKRNSDKLIARKKDWDPKKYGGFDSPTVAYSVLVVAKVEKGKSKKLKSVKELLGITIMERSSFEKNPIDFLEAKGYKEVKKDLIIKLPKYSLFELENGRKRMLASAGELQKGNELALPSKYVNFLYLASHYEKLKGSPEDNEQKQLFVEQHKHYLDEIIEQISEFSKRVILADANLDKVLSAYNKHRDKPIREQAENIIHLFTLTNLGAPAAFKYFDTTIDRKRYTSTKEVLDATLIHQSITGLYETRIDLSQLGGDGGGGGGSSGGSGGTLNIEDEYRLHETSKGPDVPLGSTWLSDFPQAWAETGGMGLAVRQAPLIIPLKATSTPVSIKQYPMSQEARLGIKPHIQRLLDQGILVPCQSPWNTPLLPVKKPGTNDYRPVQDLREVNKRVEDIHPTVPNPYNLLSGLPPSHQWYTVLDLKDAFFCLRLHPTSQSLFAFEWRDPEMGISGQLTWTRLPQGFKNSPTLFNEALHRDLADFRIQHPDLILLQYVDDLLLAATSELDCQQGTRALLQTLGDLGYRASAKKAQICQKQVKYLGYLLKEGQRWLTEARKETVMGQPTPKTPRQLREFLGKAGFCRLFIPGFAEMAAPLYPLTKPGTLFEWGPDQQKAYQEIKQALLTAPALGLPDLTKPFELFVDEKQGYAKGVLTQKLGPWRRPVAYLSKKLDPVAAGWPPCLRMVAAIAVLTKDAGKLTMGQPLVILAPHAVEALVKQPPDRWLSNARMTHYQALLLDTDRVQFGPIVALNPATLLPLPEEGLQHDCLDILAEAHGTRPDLTDQPLPDADHTWYTDGSSFLQEGQRKAGAAVTTETEVVWAKALPAGTSAQRAELIALTQALKMAEGKKLNVYTDSRYAFATAHIHGEIYRRRGWLTSEGKEIKNKDEILALLKALFLPKRLSIIHCPGHQKGNRAEARGNRMADQAAREVATRETPETSTLLAGKRTADGSEFEKRTADGSEFESPKKKAKVE

SEQ ID NO: 2572 - protein, 2091 aa, synthetic construct
MPAAKRVKLDGGDKKYSIGLDIGTNSVGWAVITDEYKVPSKKFKVLGNTDRHSIKKNLIGALLFDSGETAEATRLKRTARRRYTRRKNRICYLQEIFSNEMAKVDDSFFHRLEESFLVEEDKKHERHPIFGNIVDEVAYHEKYPTIYHLRKKLVDSTDKADLRLIYLALAHMIKFRGHFLIEGDLNPDNSDVDKLFIQLVQTYNQLFEENPINASGVDAKAILSARLSKSRRLENLIAQLPGEKKNGLFGNLIALSLGLTPNFKSNFDLAEDAKLQLSKDTYDDDLDNLLAQIGDQYADLFLAAKNLSDAILLSDILRVNTEITKAPLSASMIKRYDEHHQDLTLLKALVRQQLPEKYKEIFFDQSKNGYAGYIDGGASQEEFYKFIKPILEKMDGTEELLVKLNREDLLRKQRTFDNGSIPHQIHLGELHAILRRQEDFYPFLKDNREKIEKILTFRIPYYVGPLARGNSRFAWMTRKSEETITPWNFEEVVDKGASAQSFIERMTNFDKNLPNEKVLPKHSLLYEYFTVYNELTKVKYVTEGMRKPAFLSGEQKKAIVDLLFKTNRKVTVKQLKEDYFKKIECFDSVEISGVEDRFNASLGTYHDLLKIIKDKDFLDNEENEDILEDIVLTLTLFEDREMIEERLKTYAHLFDDKVMKQLKRRRYTGWGRLSRKLINGIRDKQSGKTILDFLKSDGFANRNFMQLIHDDSLTFKEDIQKAQVSGQGDSLHEHIANLAGSPAIKKGILQTVKVVDELVKVMGRHKPENIVIEMARENQTTQKGQKNSRERMKRIEEGIKELGSQILKEHPVENTQLQNEKLYLYYLQNGRDMYVDQELDINRLSDYDVDHIVPQSFLKDDSIDNKVLTRSDKARGKSDNVPSEEVVKKMKNYWRQLLNAKLITQRKFDNLTKAERGGLSELDKAGFIKRQLVETRQITKHVAQILDSRMNTKYDENDKLIREVKVITLKSKLVSDFRKDFQFYKVREINNYHHAHDAYLNAVVGTALIKKYPKLESEFVYGDYKVYDVRKMIAKSEQEIGKATAKYFFYSNIMNFFKTEITLANGEIRKRPLIETNGETGEIVWDKGRDFATVRKVLSMPQVNIVKKTEVQTGGFSKESILPKRNSDKLIARKKDWDPKKYGGFDSPTVAYSVLVVAKVEKGKSKKLKSVKELLGITIMERSSFEKNPIDFLEAKGYKEVKKDLIIKLPKYSLFELENGRKRMLASAGELQKGNELALPSKYVNFLYLASHYEKLKGSPEDNEQKQLFVEQHKHYLDEIIEQISEFSKRVILADANLDKVLSAYNKHRDKPIREQAENIIHLFTLTNLGAPAAFKYFDTTIDRKRYTSTKEVLDATLIHQSITGLYETRIDLSQLGGDGGGSSPAPGGTLNIEDEYRLHETSKGPDVPLGSTWLSDFPQAWAETGGMGLAVRQAPLIIPLKATSTPVSIKQYPMSQEARLGIKPHIQRLLDQGILVPCQSPWNTPLLPVKKPGTNDYRPVQDLREVNKRVEDIHPTVPNPYNLLSGLPPSHQWYTVLDLKDAFFCLRLHPTSQSLFAFEWRDPEMGISGQLTWTRLPQGFKNSPTLFNEALHRDLADFRIQHPDLILLQYVDDLLLAATSELDCQQGTRALLQTLGDLGYRASAKKAQICQKQVKYLGYLLKEGQRWLTEARKETVMGQPTPKTPRQLREFLGKAGFCRLFIPGFAEMAAPLYPLTKPGTLFEWGPDQQKAYQEIKQALLTAPALGLPDLTKPFELFVDEKQGYAKGVLTQKLGPWRRPVAYLSKKLDPVAAGWPPCLRMVAAIAVLTKDAGKLTMGQPLVILAPHAVEALVKQPPDRWLSNARMTHYQALLLDTDRVQFGPIVALNPATLLPLPEEGLQHDCLDILAEAHGTRPDLTDQPLPDADHTWYTDGSSFLQEGQRKAGAAVTTETEVVWAKALPAGTSAQRAELIALTQALKMAEGKKLNVYTDSRYAFATAHIHGEIYRRRGWLTSEGKEIKNKDEILALLKALFLPKRLSIIHCPGHQKGNRAEARGNRMADQAAREVATRETPETSTLLAGKRTADGSEFEKRTADGSEFESPKKKAKVE

SEQ ID NO: 2573 - protein, 2094 aa, synthetic construct
MPAAKRVKLDGGDKKYSIGLDIGTNSVGWAVITDEYKVPSKKFKVLGNTDRHSIKKNLIGALLFDSGETAEATRLKRTARRRYTRRKNRICYLQEIFSNEMAKVDDSFFHRLEESFLVEEDKKHERHPIFGNIVDEVAYHEKYPTIYHLRKKLVDSTDKADLRLIYLALAHMIKFRGHFLIEGDLNPDNSDVDKLFIQLVQTYNQLFEENPINASGVDAKAILSARLSKSRRLENLIAQLPGEKKNGLFGNLIALSLGLTPNFKSNFDLAEDAKLQLSKDTYDDDLDNLLAQIGDQYADLFLAAKNLSDAILLSDILRVNTEITKAPLSASMIKRYDEHHQDLTLLKALVRQQLPEKYKEIFFDQSKNGYAGYIDGGASQEEFYKFIKPILEKMDGTEELLVKLNREDLLRKQRTFDNGSIPHQIHLGELHAILRRQEDFYPFLKDNREKIEKILTFRIPYYVGPLARGNSRFAWMTRKSEETITPWNFEEVVDKGASAQSFIERMTNFDKNLPNEKVLPKHSLLYEYFTVYNELTKVKYVTEGMRKPAFLSGEQKKAIVDLLFKTNRKVTVKQLKEDYFKKIECFDSVEISGVEDRFNASLGTYHDLLKIIKDKDFLDNEENEDILEDIVLTLTLFEDREMIEERLKTYAHLFDDKVMKQLKRRRYTGWGRLSRKLINGIRDKQSGKTILDFLKSDGFANRNFMQLIHDDSLTFKEDIQKAQVSGQGDSLHEHIANLAGSPAIKKGILQTVKVVDELVKVMGRHKPENIVIEMARENQTTQKGQKNSRERMKRIEEGIKELGSQILKEHPVENTQLQNEKLYLYYLQNGRDMYVDQELDINRLSDYDVDHIVPQSFLKDDSIDNKVLTRSDKARGKSDNVPSEEVVKKMKNYWRQLLNAKLITQRKFDNLTKAERGGLSELDKAGFIKRQLVETRQITKHVAQILDSRMNTKYDENDKLIREVKVITLKSKLVSDFRKDFQFYKVREINNYHHAHDAYLNAVVGTALIKKYPKLESEFVYGDYKVYDVRKMIAKSEQEIGKATAKYFFYSNIMNFFKTEITLANGEIRKRPLIETNGETGEIVWDKGRDFATVRKVLSMPQVNIVKKTEVQTGGFSKESILPKRNSDKLIARKKDWDPKKYGGFDSPTVAYSVLVVAKVEKGKSKKLKSVKELLGITIMERSSFEKNPIDFLEAKGYKEVKKDLIIKLPKYSLFELENGRKRMLASAGELQKGNELALPSKYVNFLYLASHYEKLKGSPEDNEQKQLFVEQHKHYLDEIIEQISEFSKRVILADANLDKVLSAYNKHRDKPIREQAENIIHLFTLTNLGAPAAFKYFDTTIDRKRYTSTKEVLDATLIHQSITGLYETRIDLSQLGGDGGGGSPAPGGGGGTLNIEDEYRLHETSKGPDVPLGSTWLSDFPQAWAETGGMGLAVRQAPLIIPLKATSTPVSIKQYPMSQEARLGIKPHIQRLLDQGILVPCQSPWNTPLLPVKKPGTNDYRPVQDLREVNKRVEDIHPTVPNPYNLLSGLPPSHQWYTVLDLKDAFFCLRLHPTSQSLFAFEWRDPEMGISGQLTWTRLPQGFKNSPTLFNEALHRDLADFRIQHPDLILLQYVDDLLLAATSELDCQQGTRALLQTLGDLGYRASAKKAQICQKQVKYLGYLLKEGQRWLTEARKETVMGQPTPKTPRQLREFLGKAGFCRLFIPGFAEMAAPLYPLTKPGTLFEWGPDQQKAYQEIKQALLTAPALGLPDLTKPFELFVDEKQGYAKGVLTQKLGPWRRPVAYLSKKLDPVAAGWPPCLRMVAAIAVLTKDAGKLTMGQPLVILAPHAVEALVKQPPDRWLSNARMTHYQALLLDTDRVQFGPIVALNPATLLPLPEEGLQHDCLDILAEAHGTRPDLTDQPLPDADHTWYTDGSSFLQEGQRKAGAAVTTETEVVWAKALPAGTSAQRAELIALTQALKMAEGKKLNVYTDSRYAFATAHIHGEIYRRRGWLTSEGKEIKNKDEILALLKALFLPKRLSIIHCPGHQKGNRAEARGNRMADQAAREVATRETPETSTLLAGKRTADGSEFEKRTADGSEFESPKKKAKVE

SEQ ID NO: 2574 - protein, 2094 aa, synthetic construct
MPAAKRVKLDGGDKKYSIGLDIGTNSVGWAVITDEYKVPSKKFKVLGNTDRHSIKKNLIGALLFDSGETAEATRLKRTARRRYTRRKNRICYLQEIFSNEMAKVDDSFFHRLEESFLVEEDKKHERHPIFGNIVDEVAYHEKYPTIYHLRKKLVDSTDKADLRLIYLALAHMIKFRGHFLIEGDLNPDNSDVDKLFIQLVQTYNQLFEENPINASGVDAKAILSARLSKSRRLENLIAQLPGEKKNGLFGNLIALSLGLTPNFKSNFDLAEDAKLQLSKDTYDDDLDNLLAQIGDQYADLFLAAKNLSDAILLSDILRVNTEITKAPLSASMIKRYDEHHQDLTLLKALVRQQLPEKYKEIFFDQSKNGYAGYIDGGASQEEFYKFIKPILEKMDGTEELLVKLNREDLLRKQRTFDNGSIPHQIHLGELHAILRRQEDFYPFLKDNREKIEKILTFRIPYYVGPLARGNSRFAWMTRKSEETITPWNFEEVVDKGASAQSFIERMTNFDKNLPNEKVLPKHSLLYEYFTVYNELTKVKYVTEGMRKPAFLSGEQKKAIVDLLFKTNRKVTVKQLKEDYFKKIECFDSVEISGVEDRFNASLGTYHDLLKIIKDKDFLDNEENEDILEDIVLTLTLFEDREMIEERLKTYAHLFDDKVMKQLKRRRYTGWGRLSRKLINGIRDKQSGKTILDFLKSDGFANRNFMQLIHDDSLTFKEDIQKAQVSGQGDSLHEHIANLAGSPAIKKGILQTVKVVDELVKVMGRHKPENIVIEMARENQTTQKGQKNSRERMKRIEEGIKELGSQILKEHPVENTQLQNEKLYLYYLQNGRDMYVDQELDINRLSDYDVDHIVPQSFLKDDSIDNKVLTRSDKARGKSDNVPSEEVVKKMKNYWRQLLNAKLITQRKFDNLTKAERGGLSELDKAGFIKRQLVETRQITKHVAQILDSRMNTKYDENDKLIREVKVITLKSKLVSDFRKDFQFYKVREINNYHHAHDAYLNAVVGTALIKKYPKLESEFVYGDYKVYDVRKMIAKSEQEIGKATAKYFFYSNIMNFFKTEITLANGEIRKRPLIETNGETGEIVWDKGRDFATVRKVLSMPQVNIVKKTEVQTGGFSKESILPKRNSDKLIARKKDWDPKKYGGFDSPTVAYSVLVVAKVEKGKSKKLKSVKELLGITIMERSSFEKNPIDFLEAKGYKEVKKDLIIKLPKYSLFELENGRKRMLASAGELQKGNELALPSKYVNFLYLASHYEKLKGSPEDNEQKQLFVEQHKHYLDEIIEQISEFSKRVILADANLDKVLSAYNKHRDKPIREQAENIIHLFTLTNLGAPAAFKYFDTTIDRKRYTSTKEVLDATLIHQSITGLYETRIDLSQLGGDGGPAPGGSGGGGGTLNIEDEYRLHETSKGPDVPLGSTWLSDFPQAWAETGGMGLAVRQAPLIIPLKATSTPVSIKQYPMSQEARLGIKPHIQRLLDQGILVPCQSPWNTPLLPVKKPGTNDYRPVQDLREVNKRVEDIHPTVPNPYNLLSGLPPSHQWYTVLDLKDAFFCLRLHPTSQSLFAFEWRDPEMGISGQLTWTRLPQGFKNSPTLFNEALHRDLADFRIQHPDLILLQYVDDLLLAATSELDCQQGTRALLQTLGDLGYRASAKKAQICQKQVKYLGYLLKEGQRWLTEARKETVMGQPTPKTPRQLREFLGKAGFCRLFIPGFAEMAAPLYPLTKPGTLFEWGPDQQKAYQEIKQALLTAPALGLPDLTKPFELFVDEKQGYAKGVLTQKLGPWRRPVAYLSKKLDPVAAGWPPCLRMVAAIAVLTKDAGKLTMGQPLVILAPHAVEALVKQPPDRWLSNARMTHYQALLLDTDRVQFGPIVALNPATLLPLPEEGLQHDCLDILAEAHGTRPDLTDQPLPDADHTWYTDGSSFLQEGQRKAGAAVTTETEVVWAKALPAGTSAQRAELIALTQALKMAEGKKLNVYTDSRYAFATAHIHGEIYRRRGWLTSEGKEIKNKDEILALLKALFLPKRLSIIHCPGHQKGNRAEARGNRMADQAAREVATRETPETSTLLAGKRTADGSEFEKRTADGSEFESPKKKAKVE

SEQ ID NO: 2575 - protein, 2096 aa, synthetic construct
MPAAKRVKLDGGDKKYSIGLDIGTNSVGWAVITDEYKVPSKKFKVLGNTDRHSIKKNLIGALLFDSGETAEATRLKRTARRRYTRRKNRICYLQEIFSNEMAKVDDSFFHRLEESFLVEEDKKHERHPIFGNIVDEVAYHEKYPTIYHLRKKLVDSTDKADLRLIYLALAHMIKFRGHFLIEGDLNPDNSDVDKLFIQLVQTYNQLFEENPINASGVDAKAILSARLSKSRRLENLIAQLPGEKKNGLFGNLIALSLGLTPNFKSNFDLAEDAKLQLSKDTYDDDLDNLLAQIGDQYADLFLAAKNLSDAILLSDILRVNTEITKAPLSASMIKRYDEHHQDLTLLKALVRQQLPEKYKEIFFDQSKNGYAGYIDGGASQEEFYKFIKPILEKMDGTEELLVKLNREDLLRKQRTFDNGSIPHQIHLGELHAILRRQEDFYPFLKDNREKIEKILTFRIPYYVGPLARGNSRFAWMTRKSEETITPWNFEEVVDKGASAQSFIERMTNFDKNLPNEKVLPKHSLLYEYFTVYNELTKVKYVTEGMRKPAFLSGEQKKAIVDLLFKTNRKVTVKQLKEDYFKKIECFDSVEISGVEDRFNASLGTYHDLLKIIKDKDFLDNEENEDILEDIVLTLTLFEDREMIEERLKTYAHLFDDKVMKQLKRRRYTGWGRLSRKLINGIRDKQSGKTILDFLKSDGFANRNFMQLIHDDSLTFKEDIQKAQVSGQGDSLHEHIANLAGSPAIKKGILQTVKVVDELVKVMGRHKPENIVIEMARENQTTQKGQKNSRERMKRIEEGIKELGSQILKEHPVENTQLQNEKLYLYYLQNGRDMYVDQELDINRLSDYDVDHIVPQSFLKDDSIDNKVLTRSDKARGKSDNVPSEEVVKKMKNYWRQLLNAKLITQRKFDNLTKAERGGLSELDKAGFIKRQLVETRQITKHVAQILDSRMNTKYDENDKLIREVKVITLKSKLVSDFRKDFQFYKVREINNYHHAHDAYLNAVVGTALIKKYPKLESEFVYGDYKVYDVRKMIAKSEQEIGKATAKYFFYSNIMNFFKTEITLANGEIRKRPLIETNGETGEIVWDKGRDFATVRKVLSMPQVNIVKKTEVQTGGFSKESILPKRNSDKLIARKKDWDPKKYGGFDSPTVAYSVLVVAKVEKGKSKKLKSVKELLGITIMERSSFEKNPIDFLEAKGYKEVKKDLIIKLPKYSLFELENGRKRMLASAGELQKGNELALPSKYVNFLYLASHYEKLKGSPEDNEQKQLFVEQHKHYLDEIIEQISEFSKRVILADANLDKVLSAYNKHRDKPIREQAENIIHLFTLTNLGAPAAFKYFDTTIDRKRYTSTKEVLDATLIHQSITGLYETRIDLSQLGGDGGGGGGSSEAAAKGGTLNIEDEYRLHETSKGPDVPLGSTWLSDFPQAWAETGGMGLAVRQAPLIIPLKATSTPVSIKQYPMSQEARLGIKPHIQRLLDQGILVPCQSPWNTPLLPVKKPGTNDYRPVQDLREVNKRVEDIHPTVPNPYNLLSGLPPSHQWYTVLDLKDAFFCLRLHPTSQSLFAFEWRDPEMGISGQLTWTRLPQGFKNSPTLFNEALHRDLADFRIQHPDLILLQYVDDLLLAATSELDCQQGTRALLQTLGDLGYRASAKKAQICQKQVKYLGYLLKEGQRWLTEARKETVMGQPTPKTPRQLREFLGKAGFCRLFIPGFAEMAAPLYPLTKPGTLFEWGPDQQKAYQEIKQALLTAPALGLPDLTKPFELFVDEKQGYAKGVLTQKLGPWRRPVAYLSKKLDPVAAGWPPCLRMVAAIAVLTKDAGKLTMGQPLVILAPHAVEALVKQPPDRWLSNARMTHYQALLLDTDRVQFGPIVALNPATLLPLPEEGLQHDCLDILAEAHGTRPDLTDQPLPDADHTWYTDGSSFLQEGQRKAGAAVTTETEVVWAKALPAGTSAQRAELIALTQALKMAEGKKLNVYTDSRYAFATAHIHGEIYRRRGWLTSEGKEIKNKDEILALLKALFLPKRLSIIHCPGHQKGNRAEARGNRMADQAAREVATRETPETSTLLAGKRTADGSEFEKRTADGSEFESPKKKAKVE

SEQ ID NO: 2576 - protein, 2096 aa, synthetic construct
MPAAKRVKLDGGDKKYSIGLDIGTNSVGWAVITDEYKVPSKKFKVLGNTDRHSIKKNLIGALLFDSGETAEATRLKRTARRRYTRRKNRICYLQEIFSNEMAKVDDSFFHRLEESFLVEEDKKHERHPIFGNIVDEVAYHEKYPTIYHLRKKLVDSTDKADLRLIYLALAHMIKFRGHFLIEGDLNPDNSDVDKLFIQLVQTYNQLFEENPINASGVDAKAILSARLSKSRRLENLIAQLPGEKKNGLFGNLIALSLGLTPNFKSNFDLAEDAKLQLSKDTYDDDLDNLLAQIGDQYADLFLAAKNLSDAILLSDILRVNTEITKAPLSASMIKRYDEHHQDLTLLKALVRQQLPEKYKEIFFDQSKNGYAGYIDGGASQEEFYKFIKPILEKMDGTEELLVKLNREDLLRKQRTFDNGSIPHQIHLGELHAILRRQEDFYPFLKDNREKIEKILTFRIPYYVGPLARGNSRFAWMTRKSEETITPWNFEEVVDKGASAQSFIERMTNFDKNLPNEKVLPKHSLLYEYFTVYNELTKVKYVTEGMRKPAFLSGEQKKAIVDLLFKTNRKVTVKQLKEDYFKKIECFDSVEISGVEDRFNASLGTYHDLLKIIKDKDFLDNEENEDILEDIVLTLTLFEDREMIEERLKTYAHLFDDKVMKQLKRRRYTGWGRLSRKLINGIRDKQSGKTILDFLKSDGFANRNFMQLIHDDSLTFKEDIQKAQVSGQGDSLHEHIANLAGSPAIKKGILQTVKVVDELVKVMGRHKPENIVIEMARENQTTQKGQKNSRERMKRIEEGIKELGSQILKEHPVENTQLQNEKLYLYYLQNGRDMYVDQELDINRLSDYDVDHIVPQSFLKDDSIDNKVLTRSDKARGKSDNVPSEEVVKKMKNYWRQLLNAKLITQRKFDNLTKAERGGLSELDKAGFIKRQLVETRQITKHVAQILDSRMNTKYDENDKLIREVKVITLKSKLVSDFRKDFQFYKVREINNYHHAHDAYLNAVVGTALIKKYPKLESEFVYGDYKVYDVRKMIAKSEQEIGKATAKYFFYSNIMNFFKTEITLANGEIRKRPLIETNGETGEIVWDKGRDFATVRKVLSMPQVNIVKKTEVQTGGFSKESILPKRNSDKLIARKKDWDPKKYGGFDSPTVAYSVLVVAKVEKGKSKKLKSVKELLGITIMERSSFEKNPIDFLEAKGYKEVKKDLIIKLPKYSLFELENGRKRMLASAGELQKGNELALPSKYVNFLYLASHYEKLKGSPEDNEQKQLFVEQHKHYLDEIIEQISEFSKRVILADANLDKVLSAYNKHRDKPIREQAENIIHLFTLTNLGAPAAFKYFDTTIDRKRYTSTKEVLDATLIHQSITGLYETRIDLSQLGGDGGGGGEAAAKGSSGGTLNIEDEYRLHETSKGPDVPLGSTWLSDFPQAWAETGGMGLAVRQAPLIIPLKATSTPVSIKQYPMSQEARLGIKPHIQRLLDQGILVPCQSPWNTPLLPVKKPGTNDYRPVQDLREVNKRVEDIHPTVPNPYNLLSGLPPSHQWYTVLDLKDAFFCLRLHPTSQSLFAFEWRDPEMGISGQLTWTRLPQGFKNSPTLFNEALHRDLADFRIQHPDLILLQYVDDLLLAATSELDCQQGTRALLQTLGDLGYRASAKKAQICQKQVKYLGYLLKEGQRWLTEARKETVMGQPTPKTPRQLREFLGKAGFCRLFIPGFAEMAAPLYPLTKPGTLFEWGPDQQKAYQEIKQALLTAPALGLPDLTKPFELFVDEKQGYAKGVLTQKLGPWRRPVAYLSKKLDPVAAGWPPCLRMVAAIAVLTKDAGKLTMGQPLVILAPHAVEALVKQPPDRWLSNARMTHYQALLLDTDRVQFGPIVALNPATLLPLPEEGLQHDCLDILAEAHGTRPDLTDQPLPDADHTWYTDGSSFLQEGQRKAGAAVTTETEVVWAKALPAGTSAQRAELIALTQALKMAEGKKLNVYTDSRYAFATAHIHGEIYRRRGWLTSEGKEIKNKDEILALLKALFLPKRLSIIHCPGHQKGNRAEARGNRMADQAAREVATRETPETSTLLAGKRTADGSEFEKRTADGSEFESPKKKAKVE

SEQ ID NO: 2577 - protein, 2096 aa, synthetic construct
MPAAKRVKLDGGDKKYSIGLDIGTNSVGWAVITDEYKVPSKKFKVLGNTDRHSIKKNLIGALLFDSGETAEATRLKRTARRRYTRRKNRICYLQEIFSNEMAKVDDSFFHRLEESFLVEEDKKHERHPIFGNIVDEVAYHEKYPTIYHLRKKLVDSTDKADLRLIYLALAHMIKFRGHFLIEGDLNPDNSDVDKLFIQLVQTYNQLFEENPINASGVDAKAILSARLSKSRRLENLIAQLPGEKKNGLFGNLIALSLGLTPNFKSNFDLAEDAKLQLSKDTYDDDLDNLLAQIGDQYADLFLAAKNLSDAILLSDILRVNTEITKAPLSASMIKRYDEHHQDLTLLKALVRQQLPEKYKEIFFDQSKNGYAGYIDGGASQEEFYKFIKPILEKMDGTEELLVKLNREDLLRKQRTFDNGSIPHQIHLGELHAILRRQEDFYPFLKDNREKIEKILTFRIPYYVGPLARGNSRFAWMTRKSEETITPWNFEEVVDKGASAQSFIERMTNFDKNLPNEKVLPKHSLLYEYFTVYNELTKVKYVTEGMRKPAFLSGEQKKAIVDLLFKTNRKVTVKQLKEDYFKKIECFDSVEISGVEDRFNASLGTYHDLLKIIKDKDFLDNEENEDILEDIVLTLTLFEDREMIEERLKTYAHLFDDKVMKQLKRRRYTGWGRLSRKLINGIRDKQSGKTILDFLKSDGFANRNFMQLIHDDSLTFKEDIQKAQVSGQGDSLHEHIANLAGSPAIKKGILQTVKVVDELVKVMGRHKPENIVIEMARENQTTQKGQKNSRERMKRIEEGIKELGSQILKEHPVENTQLQNEKLYLYYLQNGRDMYVDQELDINRLSDYDVDHIVPQSFLKDDSIDNKVLTRSDKARGKSDNVPSEEVVKKMKNYWRQLLNAKLITQRKFDNLTKAERGGLSELDKAGFIKRQLVETRQITKHVAQILDSRMNTKYDENDKLIREVKVITLKSKLVSDFRKDFQFYKVREINNYHHAHDAYLNAVVGTALIKKYPKLESEFVYGDYKVYDVRKMIAKSEQEIGKATAKYFFYSNIMNFFKTEITLANGEIRKRPLIETNGETGEIVWDKGRDFATVRKVLSMPQVNIVKKTEVQTGGFSKESILPKRNSDKLIARKKDWDPKKYGGFDSPTVAYSVLVVAKVEKGKSKKLKSVKELLGITIMERSSFEKNPIDFLEAKGYKEVKKDLIIKLPKYSLFELENGRKRMLASAGELQKGNELALPSKYVNFLYLASHYEKLKGSPEDNEQKQLFVEQHKHYLDEIIEQISEFSKRVILADANLDKVLSAYNKHRDKPIREQAENIIHLFTLTNLGAPAAFKYFDTTIDRKRYTSTKEVLDATLIHQSITGLYETRIDLSQLGGDGGPAPEAAAKGGSGGTLNIEDEYRLHETSKGPDVPLGSTWLSDFPQAWAETGGMGLAVRQAPLIIPLKATSTPVSIKQYPMSQEARLGIKPHIQRLLDQGILVPCQSPWNTPLLPVKKPGTNDYRPVQDLREVNKRVEDIHPTVPNPYNLLSGLPPSHQWYTVLDLKDAFFCLRLHPTSQSLFAFEWRDPEMGISGQLTWTRLPQGFKNSPTLFNEALHRDLADFRIQHPDLILLQYVDDLLLAATSELDCQQGTRALLQTLGDLGYRASAKKAQICQKQVKYLGYLLKEGQRWLTEARKETVMGQPTPKTPRQLREFLGKAGFCRLFIPGFAEMAAPLYPLTKPGTLFEWGPDQQKAYQEIKQALLTAPALGLPDLTKPFELFVDEKQGYAKGVLTQKLGPWRRPVAYLSKKLDPVAAGWPPCLRMVAAIAVLTKDAGKLTMGQPLVILAPHAVEALVKQPPDRWLSNARMTHYQALLLDTDRVQFGPIVALNPATLLPLPEEGLQHDCLDILAEAHGTRPDLTDQPLPDADHTWYTDGSSFLQEGQRKAGAAVTTETEVVWAKALPAGTSAQRAELIALTQALKMAEGKKLNVYTDSRYAFATAHIHGEIYRRRGWLTSEGKEIKNKDEILALLKALFLPKRLSIIHCPGHQKGNRAEARGNRMADQAAREVATRETPETSTLLAGKRTADGSEFEKRTADGSEFESPKKKAKVE

SEQ ID NO: 2578 - protein, 2096 aa, synthetic construct
MPAAKRVKLDGGDKKYSIGLDIGTNSVGWAVITDEYKVPSKKFKVLGNTDRHSIKKNLIGALLFDSGETAEATRLKRTARRRYTRRKNRICYLQEIFSNEMAKVDDSFFHRLEESFLVEEDKKHERHPIFGNIVDEVAYHEKYPTIYHLRKKLVDSTDKADLRLIYLALAHMIKFRGHFLIEGDLNPDNSDVDKLFIQLVQTYNQLFEENPINASGVDAKAILSARLSKSRRLENLIAQLPGEKKNGLFGNLIALSLGLTPNFKSNFDLAEDAKLQLSKDTYDDDLDNLLAQIGDQYADLFLAAKNLSDAILLSDILRVNTEITKAPLSASMIKRYDEHHQDLTLLKALVRQQLPEKYKEIFFDQSKNGYAGYIDGGASQEEFYKFIKPILEKMDGTEELLVKLNREDLLRKQRTFDNGSIPHQIHLGELHAILRRQEDFYPFLKDNREKIEKILTFRIPYYVGPLARGNSRFAWMTRKSEETITPWNFEEVVDKGASAQSFIERMTNFDKNLPNEKVLPKHSLLYEYFTVYNELTKVKYVTEGMRKPAFLSGEQKKAIVDLLFKTNRKVTVKQLKEDYFKKIECFDSVEISGVEDRFNASLGTYHDLLKIIKDKDFLDNEENEDILEDIVLTLTLFEDREMIEERLKTYAHLFDDKVMKQLKRRRYTGWGRLSRKLINGIRDKQSGKTILDFLKSDGFANRNFMQLIHDDSLTFKEDIQKAQVSGQGDSLHEHIANLAGSPAIKKGILQTVKVVDELVKVMGRHKPENIVIEMARENQTTQKGQKNSRERMKRIEEGIKELGSQILKEHPVENTQLQNEKLYLYYLQNGRDMYVDQELDINRLSDYDVDHIVPQSFLKDDSIDNKVLTRSDKARGKSDNVPSEEVVKKMKNYWRQLLNAKLITQRKFDNLTKAERGGLSELDKAGFIKRQLVETRQITKHVAQILDSRMNTKYDENDKLIREVKVITLKSKLVSDFRKDFQFYKVREINNYHHAHDAYLNAVVGTALIKKYPKLESEFVYGDYKVYDVRKMIAKSEQEIGKATAKYFFYSNIMNFFKTEITLANGEIRKRPLIETNGETGEIVWDKGRDFATVRKVLSMPQVNIVKKTEVQTGGFSKESILPKRNSDKLIARKKDWDPKKYGGFDSPTVAYSVLVVAKVEKGKSKKLKSVKELLGITIMERSSFEKNPIDFLEAKGYKEVKKDLIIKLPKYSLFELENGRKRMLASAGELQKGNELALPSKYVNFLYLASHYEKLKGSPEDNEQKQLFVEQHKHYLDEIIEQISEFSKRVILADANLDKVLSAYNKHRDKPIREQAENIIHLFTLTNLGAPAAFKYFDTTIDRKRYTSTKEVLDATLIHQSITGLYETRIDLSQLGGDGGGGSEAAAKGGGGGTLNIEDEYRLHETSKGPDVPLGSTWLSDFPQAWAETGGMGLAVRQAPLIIPLKATSTPVSIKQYPMSQEARLGIKPHIQRLLDQGILVPCQSPWNTPLLPVKKPGTNDYRPVQDLREVNKRVEDIHPTVPNPYNLLSGLPPSHQWYTVLDLKDAFFCLRLHPTSQSLFAFEWRDPEMGISGQLTWTRLPQGFKNSPTLFNEALHRDLADFRIQHPDLILLQYVDDLLLAATSELDCQQGTRALLQTLGDLGYRASAKKAQICQKQVKYLGYLLKEGQRWLTEARKETVMGQPTPKTPRQLREFLGKAGFCRLFIPGFAEMAAPLYPLTKPGTLFEWGPDQQKAYQEIKQALLTAPALGLPDLTKPFELFVDEKQGYAKGVLTQKLGPWRRPVAYLSKKLDPVAAGWPPCLRMVAAIAVLTKDAGKLTMGQPLVILAPHAVEALVKQPPDRWLSNARMTHYQALLLDTDRVQFGPIVALNPATLLPLPEEGLQHDCLDILAEAHGTRPDLTDQPLPDADHTWYTDGSSFLQEGQRKAGAAVTTETEVVWAKALPAGTSAQRAELIALTQALKMAEGKKLNVYTDSRYAFATAHIHGEIYRRRGWLTSEGKEIKNKDEILALLKALFLPKRLSIIHCPGHQKGNRAEARGNRMADQAAREVATRETPETSTLLAGKRTADGSEFEKRTADGSEFESPKKKAKVE

SEQ ID NO: 2579 - protein, 2090 aa, synthetic construct
MPAAKRVKLDGGDKKYSIGLDIGTNSVGWAVITDEYKVPSKKFKVLGNTDRHSIKKNLIGALLFDSGETAEATRLKRTARRRYTRRKNRICYLQEIFSNEMAKVDDSFFHRLEESFLVEEDKKHERHPIFGNIVDEVAYHEKYPTIYHLRKKLVDSTDKADLRLIYLALAHMIKFRGHFLIEGDLNPDNSDVDKLFIQLVQTYNQLFEENPINASGVDAKAILSARLSKSRRLENLIAQLPGEKKNGLFGNLIALSLGLTPNFKSNFDLAEDAKLQLSKDTYDDDLDNLLAQIGDQYADLFLAAKNLSDAILLSDILRVNTEITKAPLSASMIKRYDEHHQDLTLLKALVRQQLPEKYKEIFFDQSKNGYAGYIDGGASQEEFYKFIKPILEKMDGTEELLVKLNREDLLRKQRTFDNGSIPHQIHLGELHAILRRQEDFYPFLKDNREKIEKILTFRIPYYVGPLARGNSRFAWMTRKSEETITPWNFEEVVDKGASAQSFIERMTNFDKNLPNEKVLPKHSLLYEYFTVYNELTKVKYVTEGMRKPAFLSGEQKKAIVDLLFKTNRKVTVKQLKEDYFKKIECFDSVEISGVEDRFNASLGTYHDLLKIIKDKDFLDNEENEDILEDIVLTLTLFEDREMIEERLKTYAHLFDDKVMKQLKRRRYTGWGRLSRKLINGIRDKQSGKTILDFLKSDGFANRNFMQLIHDDSLTFKEDIQKAQVSGQGDSLHEHIANLAGSPAIKKGILQTVKVVDELVKVMGRHKPENIVIEMARENQTTQKGQKNSRERMKRIEEGIKELGSQILKEHPVENTQLQNEKLYLYYLQNGRDMYVDQELDINRLSDYDVDHIVPQSFLKDDSIDNKVLTRSDKARGKSDNVPSEEVVKKMKNYWRQLLNAKLITQRKFDNLTKAERGGLSELDKAGFIKRQLVETRQITKHVAQILDSRMNTKYDENDKLIREVKVITLKSKLVSDFRKDFQFYKVREINNYHHAHDAYLNAVVGTALIKKYPKLESEFVYGDYKVYDVRKMIAKSEQEIGKATAKYFFYSNIMNFFKTEITLANGEIRKRPLIETNGETGEIVWDKGRDFATVRKVLSMPQVNIVKKTEVQTGGFSKESILPKRNSDKLIARKKDWDPKKYGGFDSPTVAYSVLVVAKVEKGKSKKLKSVKELLGITIMERSSFEKNPIDFLEAKGYKEVKKDLIIKLPKYSLFELENGRKRMLASAGELQKGNELALPSKYVNFLYLASHYEKLKGSPEDNEQKQLFVEQHKHYLDEIIEQISEFSKRVILADANLDKVLSAYNKHRDKPIREQAENIIHLFTLTNLGAPAAFKYFDTTIDRKRYTSTKEVLDATLIHQSITGLYETRIDLSQLGGDGGGGGGGGGTLNIEDEYRLHETSKGPDVPLGSTWLSDFPQAWAETGGMGLAVRQAPLIIPLKATSTPVSIKQYPMSQEARLGIKPHIQRLLDQGILVPCQSPWNTPLLPVKKPGTNDYRPVQDLREVNKRVEDIHPTVPNPYNLLSGLPPSHQWYTVLDLKDAFFCLRLHPTSQSLFAFEWRDPEMGISGQLTWTRLPQGFKNSPTLFNEALHRDLADFRIQHPDLILLQYVDDLLLAATSELDCQQGTRALLQTLGDLGYRASAKKAQICQKQVKYLGYLLKEGQRWLTEARKETVMGQPTPKTPRQLREFLGKAGFCRLFIPGFAEMAAPLYPLTKPGTLFEWGPDQQKAYQEIKQALLTAPALGLPDLTKPFELFVDEKQGYAKGVLTQKLGPWRRPVAYLSKKLDPVAAGWPPCLRMVAAIAVLTKDAGKLTMGQPLVILAPHAVEALVKQPPDRWLSNARMTHYQALLLDTDRVQFGPIVALNPATLLPLPEEGLQHDCLDILAEAHGTRPDLTDQPLPDADHTWYTDGSSFLQEGQRKAGAAVTTETEVVWAKALPAGTSAQRAELIALTQALKMAEGKKLNVYTDSRYAFATAHIHGEIYRRRGWLTSEGKEIKNKDEILALLKALFLPKRLSIIHCPGHQKGNRAEARGNRMADQAAREVATRETPETSTLLAGKRTADGSEFEKRTADGSEFESPKKKAKVE

SEQ ID NO: 2580 - protein, 2094 aa, synthetic construct
MPAAKRVKLDGGDKKYSIGLDIGTNSVGWAVITDEYKVPSKKFKVLGNTDRHSIKKNLIGALLFDSGETAEATRLKRTARRRYTRRKNRICYLQEIFSNEMAKVDDSFFHRLEESFLVEEDKKHERHPIFGNIVDEVAYHEKYPTIYHLRKKLVDSTDKADLRLIYLALAHMIKFRGHFLIEGDLNPDNSDVDKLFIQLVQTYNQLFEENPINASGVDAKAILSARLSKSRRLENLIAQLPGEKKNGLFGNLIALSLGLTPNFKSNFDLAEDAKLQLSKDTYDDDLDNLLAQIGDQYADLFLAAKNLSDAILLSDILRVNTEITKAPLSASMIKRYDEHHQDLTLLKALVRQQLPEKYKEIFFDQSKNGYAGYIDGGASQEEFYKFIKPILEKMDGTEELLVKLNREDLLRKQRTFDNGSIPHQIHLGELHAILRRQEDFYPFLKDNREKIEKILTFRIPYYVGPLARGNSRFAWMTRKSEETITPWNFEEVVDKGASAQSFIERMTNFDKNLPNEKVLPKHSLLYEYFTVYNELTKVKYVTEGMRKPAFLSGEQKKAIVDLLFKTNRKVTVKQLKEDYFKKIECFDSVEISGVEDRFNASLGTYHDLLKIIKDKDFLDNEENEDILEDIVLTLTLFEDREMIEERLKTYAHLFDDKVMKQLKRRRYTGWGRLSRKLINGIRDKQSGKTILDFLKSDGFANRNFMQLIHDDSLTFKEDIQKAQVSGQGDSLHEHIANLAGSPAIKKGILQTVKVVDELVKVMGRHKPENIVIEMARENQTTQKGQKNSRERMKRIEEGIKELGSQILKEHPVENTQLQNEKLYLYYLQNGRDMYVDQELDINRLSDYDVDHIVPQSFLKDDSIDNKVLTRSDKARGKSDNVPSEEVVKKMKNYWRQLLNAKLITQRKFDNLTKAERGGLSELDKAGFIKRQLVETRQITKHVAQILDSRMNTKYDENDKLIREVKVITLKSKLVSDFRKDFQFYKVREINNYHHAHDAYLNAVVGTALIKKYPKLESEFVYGDYKVYDVRKMIAKSEQEIGKATAKYFFYSNIMNFFKTEITLANGEIRKRPLIETNGETGEIVWDKGRDFATVRKVLSMPQVNIVKKTEVQTGGFSKESILPKRNSDKLIARKKDWDPKKYGGFDSPTVAYSVLVVAKVEKGKSKKLKSVKELLGITIMERSSFEKNPIDFLEAKGYKEVKKDLIIKLPKYSLFELENGRKRMLASAGELQKGNELALPSKYVNFLYLASHYEKLKGSPEDNEQKQLFVEQHKHYLDEIIEQISEFSKRVILADANLDKVLSAYNKHRDKPIREQAENIIHLFTLTNLGAPAAFKYFDTTIDRKRYTSTKEVLDATLIHQSITGLYETRIDLSQLGGDGGGSSPAPGGGGGTLNIEDEYRLHETSKGPDVPLGSTWLSDFPQAWAETGGMGLAVRQAPLIIPLKATSTPVSIKQYPMSQEARLGIKPHIQRLLDQGILVPCQSPWNTPLLPVKKPGTNDYRPVQDLREVNKRVEDIHPTVPNPYNLLSGLPPSHQWYTVLDLKDAFFCLRLHPTSQSLFAFEWRDPEMGISGQLTWTRLPQGFKNSPTLFNEALHRDLADFRIQHPDLILLQYVDDLLLAATSELDCQQGTRALLQTLGDLGYRASAKKAQICQKQVKYLGYLLKEGQRWLTEARKETVMGQPTPKTPRQLREFLGKAGFCRLFIPGFAEMAAPLYPLTKPGTLFEWGPDQQKAYQEIKQALLTAPALGLPDLTKPFELFVDEKQGYAKGVLTQKLGPWRRPVAYLSKKLDPVAAGWPPCLRMVAAIAVLTKDAGKLTMGQPLVILAPHAVEALVKQPPDRWLSNARMTHYQALLLDTDRVQFGPIVALNPATLLPLPEEGLQHDCLDILAEAHGTRPDLTDQPLPDADHTWYTDGSSFLQEGQRKAGAAVTTETEVVWAKALPAGTSAQRAELIALTQALKMAEGKKLNVYTDSRYAFATAHIHGEIYRRRGWLTSEGKEIKNKDEILALLKALFLPKRLSIIHCPGHQKGNRAEARGNRMADQAAREVATRETPETSTLLAGKRTADGSEFEKRTADGSEFESPKKKAKVE

SEQ ID NO: 2581 - protein, 2094 aa, synthetic construct
MPAAKRVKLDGGDKKYSIGLDIGTNSVGWAVITDEYKVPSKKFKVLGNTDRHSIKKNLIGALLFDSGETAEATRLKRTARRRYTRRKNRICYLQEIFSNEMAKVDDSFFHRLEESFLVEEDKKHERHPIFGNIVDEVAYHEKYPTIYHLRKKLVDSTDKADLRLIYLALAHMIKFRGHFLIEGDLNPDNSDVDKLFIQLVQTYNQLFEENPINASGVDAKAILSARLSKSRRLENLIAQLPGEKKNGLFGNLIALSLGLTPNFKSNFDLAEDAKLQLSKDTYDDDLDNLLAQIGDQYADLFLAAKNLSDAILLSDILRVNTEITKAPLSASMIKRYDEHHQDLTLLKALVRQQLPEKYKEIFFDQSKNGYAGYIDGGASQEEFYKFIKPILEKMDGTEELLVKLNREDLLRKQRTFDNGSIPHQIHLGELHAILRRQEDFYPFLKDNREKIEKILTFRIPYYVGPLARGNSRFAWMTRKSEETITPWNFEEVVDKGASAQSFIERMTNFDKNLPNEKVLPKHSLLYEYFTVYNELTKVKYVTEGMRKPAFLSGEQKKAIVDLLFKTNRKVTVKQLKEDYFKKIECFDSVEISGVEDRFNASLGTYHDLLKIIKDKDFLDNEENEDILEDIVLTLTLFEDREMIEERLKTYAHLFDDKVMKQLKRRRYTGWGRLSRKLINGIRDKQSGKTILDFLKSDGFANRNFMQLIHDDSLTFKEDIQKAQVSGQGDSLHEHIANLAGSPAIKKGILQTVKVVDELVKVMGRHKPENIVIEMARENQTTQKGQKNSRERMKRIEEGIKELGSQILKEHPVENTQLQNEKLYLYYLQNGRDMYVDQELDINRLSDYDVDHIVPQSFLKDDSIDNKVLTRSDKARGKSDNVPSEEVVKKMKNYWRQLLNAKLITQRKFDNLTKAERGGLSELDKAGFIKRQLVETRQITKHVAQILDSRMNTKYDENDKLIREVKVITLKSKLVSDFRKDFQFYKVREINNYHHAHDAYLNAVVGTALIKKYPKLESEFVYGDYKVYDVRKMIAKSEQEIGKATAKYFFYSNIMNFFKTEITLANGEIRKRPLIETNGETGEIVWDKGRDFATVRKVLSMPQVNIVKKTEVQTGGFSKESILPKRNSDKLIARKKDWDPKKYGGFDSPTVAYSVLVVAKVEKGKSKKLKSVKELLGITIMERSSFEKNPIDFLEAKGYKEVKKDLIIKLPKYSLFELENGRKRMLASAGELQKGNELALPSKYVNFLYLASHYEKLKGSPEDNEQKQLFVEQHKHYLDEIIEQISEFSKRVILADANLDKVLSAYNKHRDKPIREQAENIIHLFTLTNLGAPAAFKYFDTTIDRKRYTSTKEVLDATLIHQSITGLYETRIDLSQLGGDGGPAPGSSGGSGGTLNIEDEYRLHETSKGPDVPLGSTWLSDFPQAWAETGGMGLAVRQAPLIIPLKATSTPVSIKQYPMSQEARLGIKPHIQRLLDQGILVPCQSPWNTPLLPVKKPGTNDYRPVQDLREVNKRVEDIHPTVPNPYNLLSGLPPSHQWYTVLDLKDAFFCLRLHPTSQSLFAFEWRDPEMGISGQLTWTRLPQGFKNSPTLFNEALHRDLADFRIQHPDLILLQYVDDLLLAATSELDCQQGTRALLQTLGDLGYRASAKKAQICQKQVKYLGYLLKEGQRWLTEARKETVMGQPTPKTPRQLREFLGKAGFCRLFIPGFAEMAAPLYPLTKPGTLFEWGPDQQKAYQEIKQALLTAPALGLPDLTKPFELFVDEKQGYAKGVLTQKLGPWRRPVAYLSKKLDPVAAGWPPCLRMVAAIAVLTKDAGKLTMGQPLVILAPHAVEALVKQPPDRWLSNARMTHYQALLLDTDRVQFGPIVALNPATLLPLPEEGLQHDCLDILAEAHGTRPDLTDQPLPDADHTWYTDGSSFLQEGQRKAGAAVTTETEVVWAKALPAGTSAQRAELIALTQALKMAEGKKLNVYTDSRYAFATAHIHGEIYRRRGWLTSEGKEIKNKDEILALLKALFLPKRLSIIHCPGHQKGNRAEARGNRMADQAAREVATRETPETSTLLAGKRTADGSEFEKRTADGSEFESPKKKAKVE

SEQ ID NO: 2582 - protein, 2096 aa, synthetic construct
MPAAKRVKLDGGDKKYSIGLDIGTNSVGWAVITDEYKVPSKKFKVLGNTDRHSIKKNLIGALLFDSGETAEATRLKRTARRRYTRRKNRICYLQEIFSNEMAKVDDSFFHRLEESFLVEEDKKHERHPIFGNIVDEVAYHEKYPTIYHLRKKLVDSTDKADLRLIYLALAHMIKFRGHFLIEGDLNPDNSDVDKLFIQLVQTYNQLFEENPINASGVDAKAILSARLSKSRRLENLIAQLPGEKKNGLFGNLIALSLGLTPNFKSNFDLAEDAKLQLSKDTYDDDLDNLLAQIGDQYADLFLAAKNLSDAILLSDILRVNTEITKAPLSASMIKRYDEHHQDLTLLKALVRQQLPEKYKEIFFDQSKNGYAGYIDGGASQEEFYKFIKPILEKMDGTEELLVKLNREDLLRKQRTFDNGSIPHQIHLGELHAILRRQEDFYPFLKDNREKIEKILTFRIPYYVGPLARGNSRFAWMTRKSEETITPWNFEEVVDKGASAQSFIERMTNFDKNLPNEKVLPKHSLLYEYFTVYNELTKVKYVTEGMRKPAFLSGEQKKAIVDLLFKTNRKVTVKQLKEDYFKKIECFDSVEISGVEDRFNASLGTYHDLLKIIKDKDFLDNEENEDILEDIVLTLTLFEDREMIEERLKTYAHLFDDKVMKQLKRRRYTGWGRLSRKLINGIRDKQSGKTILDFLKSDGFANRNFMQLIHDDSLTFKEDIQKAQVSGQGDSLHEHIANLAGSPAIKKGILQTVKVVDELVKVMGRHKPENIVIEMARENQTTQKGQKNSRERMKRIEEGIKELGSQILKEHPVENTQLQNEKLYLYYLQNGRDMYVDQELDINRLSDYDVDHIVPQSFLKDDSIDNKVLTRSDKARGKSDNVPSEEVVKKMKNYWRQLLNAKLITQRKFDNLTKAERGGLSELDKAGFIKRQLVETRQITKHVAQILDSRMNTKYDENDKLIREVKVITLKSKLVSDFRKDFQFYKVREINNYHHAHDAYLNAVVGTALIKKYPKLESEFVYGDYKVYDVRKMIAKSEQEIGKATAKYFFYSNIMNFFKTEITLANGEIRKRPLIETNGETGEIVWDKGRDFATVRKVLSMPQVNIVKKTEVQTGGFSKESILPKRNSDKLIARKKDWDPKKYGGFDSPTVAYSVLVVAKVEKGKSKKLKSVKELLGITIMERSSFEKNPIDFLEAKGYKEVKKDLIIKLPKYSLFELENGRKRMLASAGELQKGNELALPSKYVNFLYLASHYEKLKGSPEDNEQKQLFVEQHKHYLDEIIEQISEFSKRVILADANLDKVLSAYNKHRDKPIREQAENIIHLFTLTNLGAPAAFKYFDTTIDRKRYTSTKEVLDATLIHQSITGLYETRIDLSQLGGDGGEAAAKGGGGGSGGTLNIEDEYRLHETSKGPDVPLGSTWLSDFPQAWAETGGMGLAVRQAPLIIPLKATSTPVSIKQYPMSQEARLGIKPHIQRLLDQGILVPCQSPWNTPLLPVKKPGTNDYRPVQDLREVNKRVEDIHPTVPNPYNLLSGLPPSHQWYTVLDLKDAFFCLRLHPTSQSLFAFEWRDPEMGISGQLTWTRLPQGFKNSPTLFNEALHRDLADFRIQHPDLILLQYVDDLLLAATSELDCQQGTRALLQTLGDLGYRASAKKAQICQKQVKYLGYLLKEGQRWLTEARKETVMGQPTPKTPRQLREFLGKAGFCRLFIPGFAEMAAPLYPLTKPGTLFEWGPDQQKAYQEIKQALLTAPALGLPDLTKPFELFVDEKQGYAKGVLTQKLGPWRRPVAYLSKKLDPVAAGWPPCLRMVAAIAVLTKDAGKLTMGQPLVILAPHAVEALVKQPPDRWLSNARMTHYQALLLDTDRVQFGPIVALNPATLLPLPEEGLQHDCLDILAEAHGTRPDLTDQPLPDADHTWYTDGSSFLQEGQRKAGAAVTTETEVVWAKALPAGTSAQRAELIALTQALKMAEGKKLNVYTDSRYAFATAHIHGEIYRRRGWLTSEGKEIKNKDEILALLKALFLPKRLSIIHCPGHQKGNRAEARGNRMADQAAREVATRETPETSTLLAGKRTADGSEFEKRTADGSEFESPKKKAKVE

SEQ ID NO: 2583 - protein, 2097 aa, synthetic construct
MPAAKRVKLDGGDKKYSIGLDIGTNSVGWAVITDEYKVPSKKFKVLGNTDRHSIKKNLIGALLFDSGETAEATRLKRTARRRYTRRKNRICYLQEIFSNEMAKVDDSFFHRLEESFLVEEDKKHERHPIFGNIVDEVAYHEKYPTIYHLRKKLVDSTDKADLRLIYLALAHMIKFRGHFLIEGDLNPDNSDVDKLFIQLVQTYNQLFEENPINASGVDAKAILSARLSKSRRLENLIAQLPGEKKNGLFGNLIALSLGLTPNFKSNFDLAEDAKLQLSKDTYDDDLDNLLAQIGDQYADLFLAAKNLSDAILLSDILRVNTEITKAPLSASMIKRYDEHHQDLTLLKALVRQQLPEKYKEIFFDQSKNGYAGYIDGGASQEEFYKFIKPILEKMDGTEELLVKLNREDLLRKQRTFDNGSIPHQIHLGELHAILRRQEDFYPFLKDNREKIEKILTFRIPYYVGPLARGNSRFAWMTRKSEETITPWNFEEVVDKGASAQSFIERMTNFDKNLPNEKVLPKHSLLYEYFTVYNELTKVKYVTEGMRKPAFLSGEQKKAIVDLLFKTNRKVTVKQLKEDYFKKIECFDSVEISGVEDRFNASLGTYHDLLKIIKDKDFLDNEENEDILEDIVLTLTLFEDREMIEERLKTYAHLFDDKVMKQLKRRRYTGWGRLSRKLINGIRDKQSGKTILDFLKSDGFANRNFMQLIHDDSLTFKEDIQKAQVSGQGDSLHEHIANLAGSPAIKKGILQTVKVVDELVKVMGRHKPENIVIEMARENQTTQKGQKNSRERMKRIEEGIKELGSQILKEHPVENTQLQNEKLYLYYLQNGRDMYVDQELDINRLSDYDVDHIVPQSFLKDDSIDNKVLTRSDKARGKSDNVPSEEVVKKMKNYWRQLLNAKLITQRKFDNLTKAERGGLSELDKAGFIKRQLVETRQITKHVAQILDSRMNTKYDENDKLIREVKVITLKSKLVSDFRKDFQFYKVREINNYHHAHDAYLNAVVGTALIKKYPKLESEFVYGDYKVYDVRKMIAKSEQEIGKATAKYFFYSNIMNFFKTEITLANGEIRKRPLIETNGETGEIVWDKGRDFATVRKVLSMPQVNIVKKTEVQTGGFSKESILPKRNSDKLIARKKDWDPKKYGGFDSPTVAYSVLVVAKVEKGKSKKLKSVKELLGITIMERSSFEKNPIDFLEAKGYKEVKKDLIIKLPKYSLFELENGRKRMLASAGELQKGNELALPSKYVNFLYLASHYEKLKGSPEDNEQKQLFVEQHKHYLDEIIEQISEFSKRVILADANLDKVLSAYNKHRDKPIREQAENIIHLFTLTNLGAPAAFKYFDTTIDRKRYTSTKEVLDATLIHQSITGLYETRIDLSQLGGDGGGSAGSAAGSGEFGGTLNIEDEYRLHETSKGPDVPLGSTWLSDFPQAWAETGGMGLAVRQAPLIIPLKATSTPVSIKQYPMSQEARLGIKPHIQRLLDQGILVPCQSPWNTPLLPVKKPGTNDYRPVQDLREVNKRVEDIHPTVPNPYNLLSGLPPSHQWYTVLDLKDAFFCLRLHPTSQSLFAFEWRDPEMGISGQLTWTRLPQGFKNSPTLFNEALHRDLADFRIQHPDLILLQYVDDLLLAATSELDCQQGTRALLQTLGDLGYRASAKKAQICQKQVKYLGYLLKEGQRWLTEARKETVMGQPTPKTPRQLREFLGKAGFCRLFIPGFAEMAAPLYPLTKPGTLFEWGPDQQKAYQEIKQALLTAPALGLPDLTKPFELFVDEKQGYAKGVLTQKLGPWRRPVAYLSKKLDPVAAGWPPCLRMVAAIAVLTKDAGKLTMGQPLVILAPHAVEALVKQPPDRWLSNARMTHYQALLLDTDRVQFGPIVALNPATLLPLPEEGLQHDCLDILAEAHGTRPDLTDQPLPDADHTWYTDGSSFLQEGQRKAGAAVTTETEVVWAKALPAGTSAQRAELIALTQALKMAEGKKLNVYTDSRYAFATAHIHGEIYRRRGWLTSEGKEIKNKDEILALLKALFLPKRLSIIHCPGHQKGNRAEARGNRMADQAAREVATRETPETSTLLAGKRTADGSEFEKRTADGSEFESPKKKAKVE

SEQ ID NO: 2584 - protein, 2093 aa, synthetic construct
MPAAKRVKLDGGDKKYSIGLDIGTNSVGWAVITDEYKVPSKKFKVLGNTDRHSIKKNLIGALLFDSGETAEATRLKRTARRRYTRRKNRICYLQEIFSNEMAKVDDSFFHRLEESFLVEEDKKHERHPIFGNIVDEVAYHEKYPTIYHLRKKLVDSTDKADLRLIYLALAHMIKFRGHFLIEGDLNPDNSDVDKLFIQLVQTYNQLFEENPINASGVDAKAILSARLSKSRRLENLIAQLPGEKKNGLFGNLIALSLGLTPNFKSNFDLAEDAKLQLSKDTYDDDLDNLLAQIGDQYADLFLAAKNLSDAILLSDILRVNTEITKAPLSASMIKRYDEHHQDLTLLKALVRQQLPEKYKEIFFDQSKNGYAGYIDGGASQEEFYKFIKPILEKMDGTEELLVKLNREDLLRKQRTFDNGSIPHQIHLGELHAILRRQEDFYPFLKDNREKIEKILTFRIPYYVGPLARGNSRFAWMTRKSEETITPWNFEEVVDKGASAQSFIERMTNFDKNLPNEKVLPKHSLLYEYFTVYNELTKVKYVTEGMRKPAFLSGEQKKAIVDLLFKTNRKVTVKQLKEDYFKKIECFDSVEISGVEDRFNASLGTYHDLLKIIKDKDFLDNEENEDILEDIVLTLTLFEDREMIEERLKTYAHLFDDKVMKQLKRRRYTGWGRLSRKLINGIRDKQSGKTILDFLKSDGFANRNFMQLIHDDSLTFKEDIQKAQVSGQGDSLHEHIANLAGSPAIKKGILQTVKVVDELVKVMGRHKPENIVIEMARENQTTQKGQKNSRERMKRIEEGIKELGSQILKEHPVENTQLQNEKLYLYYLQNGRDMYVDQELDINRLSDYDVDHIVPQSFLKDDSIDNKVLTRSDKARGKSDNVPSEEVVKKMKNYWRQLLNAKLITQRKFDNLTKAERGGLSELDKAGFIKRQLVETRQITKHVAQILDSRMNTKYDENDKLIREVKVITLKSKLVSDFRKDFQFYKVREINNYHHAHDAYLNAVVGTALIKKYPKLESEFVYGDYKVYDVRKMIAKSEQEIGKATAKYFFYSNIMNFFKTEITLANGEIRKRPLIETNGETGEIVWDKGRDFATVRKVLSMPQVNIVKKTEVQTGGFSKESILPKRNSDKLIARKKDWDPKKYGGFDSPTVAYSVLVVAKVEKGKSKKLKSVKELLGITIMERSSFEKNPIDFLEAKGYKEVKKDLIIKLPKYSLFELENGRKRMLASAGELQKGNELALPSKYVNFLYLASHYEKLKGSPEDNEQKQLFVEQHKHYLDEIIEQISEFSKRVILADANLDKVLSAYNKHRDKPIREQAENIIHLFTLTNLGAPAAFKYFDTTIDRKRYTSTKEVLDATLIHQSITGLYETRIDLSQLGGDGGEAAAKGGSGGTLNIEDEYRLHETSKGPDVPLGSTWLSDFPQAWAETGGMGLAVRQAPLIIPLKATSTPVSIKQYPMSQEARLGIKPHIQRLLDQGILVPCQSPWNTPLLPVKKPGTNDYRPVQDLREVNKRVEDIHPTVPNPYNLLSGLPPSHQWYTVLDLKDAFFCLRLHPTSQSLFAFEWRDPEMGISGQLTWTRLPQGFKNSPTLFNEALHRDLADFRIQHPDLILLQYVDDLLLAATSELDCQQGTRALLQTLGDLGYRASAKKAQICQKQVKYLGYLLKEGQRWLTEARKETVMGQPTPKTPRQLREFLGKAGFCRLFIPGFAEMAAPLYPLTKPGTLFEWGPDQQKAYQEIKQALLTAPALGLPDLTKPFELFVDEKQGYAKGVLTQKLGPWRRPVAYLSKKLDPVAAGWPPCLRMVAAIAVLTKDAGKLTMGQPLVILAPHAVEALVKQPPDRWLSNARMTHYQALLLDTDRVQFGPIVALNPATLLPLPEEGLQHDCLDILAEAHGTRPDLTDQPLPDADHTWYTDGSSFLQEGQRKAGAAVTTETEVVWAKALPAGTSAQRAELIALTQALKMAEGKKLNVYTDSRYAFATAHIHGEIYRRRGWLTSEGKEIKNKDEILALLKALFLPKRLSIIHCPGHQKGNRAEARGNRMADQAAREVATRETPETSTLLAGKRTADGSEFEKRTADGSEFESPKKKAKVE

SEQ ID NO: 2585 - protein, 2093 aa, synthetic construct
MPAAKRVKLDGGDKKYSIGLDIGTNSVGWAVITDEYKVPSKKFKVLGNTDRHSIKKNLIGALLFDSGETAEATRLKRTARRRYTRRKNRICYLQEIFSNEMAKVDDSFFHRLEESFLVEEDKKHERHPIFGNIVDEVAYHEKYPTIYHLRKKLVDSTDKADLRLIYLALAHMIKFRGHFLIEGDLNPDNSDVDKLFIQLVQTYNQLFEENPINASGVDAKAILSARLSKSRRLENLIAQLPGEKKNGLFGNLIALSLGLTPNFKSNFDLAEDAKLQLSKDTYDDDLDNLLAQIGDQYADLFLAAKNLSDAILLSDILRVNTEITKAPLSASMIKRYDEHHQDLTLLKALVRQQLPEKYKEIFFDQSKNGYAGYIDGGASQEEFYKFIKPILEKMDGTEELLVKLNREDLLRKQRTFDNGSIPHQIHLGELHAILRRQEDFYPFLKDNREKIEKILTFRIPYYVGPLARGNSRFAWMTRKSEETITPWNFEEVVDKGASAQSFIERMTNFDKNLPNEKVLPKHSLLYEYFTVYNELTKVKYVTEGMRKPAFLSGEQKKAIVDLLFKTNRKVTVKQLKEDYFKKIECFDSVEISGVEDRFNASLGTYHDLLKIIKDKDFLDNEENEDILEDIVLTLTLFEDREMIEERLKTYAHLFDDKVMKQLKRRRYTGWGRLSRKLINGIRDKQSGKTILDFLKSDGFANRNFMQLIHDDSLTFKEDIQKAQVSGQGDSLHEHIANLAGSPAIKKGILQTVKVVDELVKVMGRHKPENIVIEMARENQTTQKGQKNSRERMKRIEEGIKELGSQILKEHPVENTQLQNEKLYLYYLQNGRDMYVDQELDINRLSDYDVDHIVPQSFLKDDSIDNKVLTRSDKARGKSDNVPSEEVVKKMKNYWRQLLNAKLITQRKFDNLTKAERGGLSELDKAGFIKRQLVETRQITKHVAQILDSRMNTKYDENDKLIREVKVITLKSKLVSDFRKDFQFYKVREINNYHHAHDAYLNAVVGTALIKKYPKLESEFVYGDYKVYDVRKMIAKSEQEIGKATAKYFFYSNIMNFFKTEITLANGEIRKRPLIETNGETGEIVWDKGRDFATVRKVLSMPQVNIVKKTEVQTGGFSKESILPKRNSDKLIARKKDWDPKKYGGFDSPTVAYSVLVVAKVEKGKSKKLKSVKELLGITIMERSSFEKNPIDFLEAKGYKEVKKDLIIKLPKYSLFELENGRKRMLASAGELQKGNELALPSKYVNFLYLASHYEKLKGSPEDNEQKQLFVEQHKHYLDEIIEQISEFSKRVILADANLDKVLSAYNKHRDKPIREQAENIIHLFTLTNLGAPAAFKYFDTTIDRKRYTSTKEVLDATLIHQSITGLYETRIDLSQLGGDGGEAAAKGSSGGTLNIEDEYRLHETSKGPDVPLGSTWLSDFPQAWAETGGMGLAVRQAPLIIPLKATSTPVSIKQYPMSQEARLGIKPHIQRLLDQGILVPCQSPWNTPLLPVKKPGTNDYRPVQDLREVNKRVEDIHPTVPNPYNLLSGLPPSHQWYTVLDLKDAFFCLRLHPTSQSLFAFEWRDPEMGISGQLTWTRLPQGFKNSPTLFNEALHRDLADFRIQHPDLILLQYVDDLLLAATSELDCQQGTRALLQTLGDLGYRASAKKAQICQKQVKYLGYLLKEGQRWLTEARKETVMGQPTPKTPRQLREFLGKAGFCRLFIPGFAEMAAPLYPLTKPGTLFEWGPDQQKAYQEIKQALLTAPALGLPDLTKPFELFVDEKQGYAKGVLTQKLGPWRRPVAYLSKKLDPVAAGWPPCLRMVAAIAVLTKDAGKLTMGQPLVILAPHAVEALVKQPPDRWLSNARMTHYQALLLDTDRVQFGPIVALNPATLLPLPEEGLQHDCLDILAEAHGTRPDLTDQPLPDADHTWYTDGSSFLQEGQRKAGAAVTTETEVVWAKALPAGTSAQRAELIALTQALKMAEGKKLNVYTDSRYAFATAHIHGEIYRRRGWLTSEGKEIKNKDEILALLKALFLPKRLSIIHCPGHQKGNRAEARGNRMADQAAREVATRETPETSTLLAGKRTADGSEFEKRTADGSEFESPKKKAKVE

SEQ ID NO: 2586 - protein, 2091 aa, synthetic construct
MPAAKRVKLDGGDKKYSIGLDIGTNSVGWAVITDEYKVPSKKFKVLGNTDRHSIKKNLIGALLFDSGETAEATRLKRTARRRYTRRKNRICYLQEIFSNEMAKVDDSFFHRLEESFLVEEDKKHERHPIFGNIVDEVAYHEKYPTIYHLRKKLVDSTDKADLRLIYLALAHMIKFRGHFLIEGDLNPDNSDVDKLFIQLVQTYNQLFEENPINASGVDAKAILSARLSKSRRLENLIAQLPGEKKNGLFGNLIALSLGLTPNFKSNFDLAEDAKLQLSKDTYDDDLDNLLAQIGDQYADLFLAAKNLSDAILLSDILRVNTEITKAPLSASMIKRYDEHHQDLTLLKALVRQQLPEKYKEIFFDQSKNGYAGYIDGGASQEEFYKFIKPILEKMDGTEELLVKLNREDLLRKQRTFDNGSIPHQIHLGELHAILRRQEDFYPFLKDNREKIEKILTFRIPYYVGPLARGNSRFAWMTRKSEETITPWNFEEVVDKGASAQSFIERMTNFDKNLPNEKVLPKHSLLYEYFTVYNELTKVKYVTEGMRKPAFLSGEQKKAIVDLLFKTNRKVTVKQLKEDYFKKIECFDSVEISGVEDRFNASLGTYHDLLKIIKDKDFLDNEENEDILEDIVLTLTLFEDREMIEERLKTYAHLFDDKVMKQLKRRRYTGWGRLSRKLINGIRDKQSGKTILDFLKSDGFANRNFMQLIHDDSLTFKEDIQKAQVSGQGDSLHEHIANLAGSPAIKKGILQTVKVVDELVKVMGRHKPENIVIEMARENQTTQKGQKNSRERMKRIEEGIKELGSQILKEHPVENTQLQNEKLYLYYLQNGRDMYVDQELDINRLSDYDVDHIVPQSFLKDDSIDNKVLTRSDKARGKSDNVPSEEVVKKMKNYWRQLLNAKLITQRKFDNLTKAERGGLSELDKAGFIKRQLVETRQITKHVAQILDSRMNTKYDENDKLIREVKVITLKSKLVSDFRKDFQFYKVREINNYHHAHDAYLNAVVGTALIKKYPKLESEFVYGDYKVYDVRKMIAKSEQEIGKATAKYFFYSNIMNFFKTEITLANGEIRKRPLIETNGETGEIVWDKGRDFATVRKVLSMPQVNIVKKTEVQTGGFSKESILPKRNSDKLIARKKDWDPKKYGGFDSPTVAYSVLVVAKVEKGKSKKLKSVKELLGITIMERSSFEKNPIDFLEAKGYKEVKKDLIIKLPKYSLFELENGRKRMLASAGELQKGNELALPSKYVNFLYLASHYEKLKGSPEDNEQKQLFVEQHKHYLDEIIEQISEFSKRVILADANLDKVLSAYNKHRDKPIREQAENIIHLFTLTNLGAPAAFKYFDTTIDRKRYTSTKEVLDATLIHQSITGLYETRIDLSQLGGDGGGGGGSSGGTLNIEDEYRLHETSKGPDVPLGSTWLSDFPQAWAETGGMGLAVRQAPLIIPLKATSTPVSIKQYPMSQEARLGIKPHIQRLLDQGILVPCQSPWNTPLLPVKKPGTNDYRPVQDLREVNKRVEDIHPTVPNPYNLLSGLPPSHQWYTVLDLKDAFFCLRLHPTSQSLFAFEWRDPEMGISGQLTWTRLPQGFKNSPTLFNEALHRDLADFRIQHPDLILLQYVDDLLLAATSELDCQQGTRALLQTLGDLGYRASAKKAQICQKQVKYLGYLLKEGQRWLTEARKETVMGQPTPKTPRQLREFLGKAGFCRLFIPGFAEMAAPLYPLTKPGTLFEWGPDQQKAYQEIKQALLTAPALGLPDLTKPFELFVDEKQGYAKGVLTQKLGPWRRPVAYLSKKLDPVAAGWPPCLRMVAAIAVLTKDAGKLTMGQPLVILAPHAVEALVKQPPDRWLSNARMTHYQALLLDTDRVQFGPIVALNPATLLPLPEEGLQHDCLDILAEAHGTRPDLTDQPLPDADHTWYTDGSSFLQEGQRKAGAAVTTETEVVWAKALPAGTSAQRAELIALTQALKMAEGKKLNVYTDSRYAFATAHIHGEIYRRRGWLTSEGKEIKNKDEILALLKALFLPKRLSIIHCPGHQKGNRAEARGNRMADQAAREVATRETPETSTLLAGKRTADGSEFEKRTADGSEFESPKKKAKVE

SEQ ID NO: 2587 - protein, 2093 aa, synthetic construct
MPAAKRVKLDGGDKKYSIGLDIGTNSVGWAVITDEYKVPSKKFKVLGNTDRHSIKKNLIGALLFDSGETAEATRLKRTARRRYTRRKNRICYLQEIFSNEMAKVDDSFFHRLEESFLVEEDKKHERHPIFGNIVDEVAYHEKYPTIYHLRKKLVDSTDKADLRLIYLALAHMIKFRGHFLIEGDLNPDNSDVDKLFIQLVQTYNQLFEENPINASGVDAKAILSARLSKSRRLENLIAQLPGEKKNGLFGNLIALSLGLTPNFKSNFDLAEDAKLQLSKDTYDDDLDNLLAQIGDQYADLFLAAKNLSDAILLSDILRVNTEITKAPLSASMIKRYDEHHQDLTLLKALVRQQLPEKYKEIFFDQSKNGYAGYIDGGASQEEFYKFIKPILEKMDGTEELLVKLNREDLLRKQRTFDNGSIPHQIHLGELHAILRRQEDFYPFLKDNREKIEKILTFRIPYYVGPLARGNSRFAWMTRKSEETITPWNFEEVVDKGASAQSFIERMTNFDKNLPNEKVLPKHSLLYEYFTVYNELTKVKYVTEGMRKPAFLSGEQKKAIVDLLFKTNRKVTVKQLKEDYFKKIECFDSVEISGVEDRFNASLGTYHDLLKIIKDKDFLDNEENEDILEDIVLTLTLFEDREMIEERLKTYAHLFDDKVMKQLKRRRYTGWGRLSRKLINGIRDKQSGKTILDFLKSDGFANRNFMQLIHDDSLTFKEDIQKAQVSGQGDSLHEHIANLAGSPAIKKGILQTVKVVDELVKVMGRHKPENIVIEMARENQTTQKGQKNSRERMKRIEEGIKELGSQILKEHPVENTQLQNEKLYLYYLQNGRDMYVDQELDINRLSDYDVDHIVPQSFLKDDSIDNKVLTRSDKARGKSDNVPSEEVVKKMKNYWRQLLNAKLITQRKFDNLTKAERGGLSELDKAGFIKRQLVETRQITKHVAQILDSRMNTKYDENDKLIREVKVITLKSKLVSDFRKDFQFYKVREINNYHHAHDAYLNAVVGTALIKKYPKLESEFVYGDYKVYDVRKMIAKSEQEIGKATAKYFFYSNIMNFFKTEITLANGEIRKRPLIETNGETGEIVWDKGRDFATVRKVLSMPQVNIVKKTEVQTGGFSKESILPKRNSDKLIARKKDWDPKKYGGFDSPTVAYSVLVVAKVEKGKSKKLKSVKELLGITIMERSSFEKNPIDFLEAKGYKEVKKDLIIKLPKYSLFELENGRKRMLASAGELQKGNELALPSKYVNFLYLASHYEKLKGSPEDNEQKQLFVEQHKHYLDEIIEQISEFSKRVILADANLDKVLSAYNKHRDKPIREQAENIIHLFTLTNLGAPAAFKYFDTTIDRKRYTSTKEVLDATLIHQSITGLYETRIDLSQLGGDGGEAAAKPAPGGTLNIEDEYRLHETSKGPDVPLGSTWLSDFPQAWAETGGMGLAVRQAPLIIPLKATSTPVSIKQYPMSQEARLGIKPHIQRLLDQGILVPCQSPWNTPLLPVKKPGTNDYRPVQDLREVNKRVEDIHPTVPNPYNLLSGLPPSHQWYTVLDLKDAFFCLRLHPTSQSLFAFEWRDPEMGISGQLTWTRLPQGFKNSPTLFNEALHRDLADFRIQHPDLILLQYVDDLLLAATSELDCQQGTRALLQTLGDLGYRASAKKAQICQKQVKYLGYLLKEGQRWLTEARKETVMGQPTPKTPRQLREFLGKAGFCRLFIPGFAEMAAPLYPLTKPGTLFEWGPDQQKAYQEIKQALLTAPALGLPDLTKPFELFVDEKQGYAKGVLTQKLGPWRRPVAYLSKKLDPVAAGWPPCLRMVAAIAVLTKDAGKLTMGQPLVILAPHAVEALVKQPPDRWLSNARMTHYQALLLDTDRVQFGPIVALNPATLLPLPEEGLQHDCLDILAEAHGTRPDLTDQPLPDADHTWYTDGSSFLQEGQRKAGAAVTTETEVVWAKALPAGTSAQRAELIALTQALKMAEGKKLNVYTDSRYAFATAHIHGEIYRRRGWLTSEGKEIKNKDEILALLKALFLPKRLSIIHCPGHQKGNRAEARGNRMADQAAREVATRETPETSTLLAGKRTADGSEFEKRTADGSEFESPKKKAKVE

SEQ ID NO: 2588 - protein, 2094 aa, synthetic construct
MPAAKRVKLDGGDKKYSIGLDIGTNSVGWAVITDEYKVPSKKFKVLGNTDRHSIKKNLIGALLFDSGETAEATRLKRTARRRYTRRKNRICYLQEIFSNEMAKVDDSFFHRLEESFLVEEDKKHERHPIFGNIVDEVAYHEKYPTIYHLRKKLVDSTDKADLRLIYLALAHMIKFRGHFLIEGDLNPDNSDVDKLFIQLVQTYNQLFEENPINASGVDAKAILSARLSKSRRLENLIAQLPGEKKNGLFGNLIALSLGLTPNFKSNFDLAEDAKLQLSKDTYDDDLDNLLAQIGDQYADLFLAAKNLSDAILLSDILRVNTEITKAPLSASMIKRYDEHHQDLTLLKALVRQQLPEKYKEIFFDQSKNGYAGYIDGGASQEEFYKFIKPILEKMDGTEELLVKLNREDLLRKQRTFDNGSIPHQIHLGELHAILRRQEDFYPFLKDNREKIEKILTFRIPYYVGPLARGNSRFAWMTRKSEETITPWNFEEVVDKGASAQSFIERMTNFDKNLPNEKVLPKHSLLYEYFTVYNELTKVKYVTEGMRKPAFLSGEQKKAIVDLLFKTNRKVTVKQLKEDYFKKIECFDSVEISGVEDRFNASLGTYHDLLKIIKDKDFLDNEENEDILEDIVLTLTLFEDREMIEERLKTYAHLFDDKVMKQLKRRRYTGWGRLSRKLINGIRDKQSGKTILDFLKSDGFANRNFMQLIHDDSLTFKEDIQKAQVSGQGDSLHEHIANLAGSPAIKKGILQTVKVVDELVKVMGRHKPENIVIEMARENQTTQKGQKNSRERMKRIEEGIKELGSQILKEHPVENTQLQNEKLYLYYLQNGRDMYVDQELDINRLSDYDVDHIVPQSFLKDDSIDNKVLTRSDKARGKSDNVPSEEVVKKMKNYWRQLLNAKLITQRKFDNLTKAERGGLSELDKAGFIKRQLVETRQITKHVAQILDSRMNTKYDENDKLIREVKVITLKSKLVSDFRKDFQFYKVREINNYHHAHDAYLNAVVGTALIKKYPKLESEFVYGDYKVYDVRKMIAKSEQEIGKATAKYFFYSNIMNFFKTEITLANGEIRKRPLIETNGETGEIVWDKGRDFATVRKVLSMPQVNIVKKTEVQTGGFSKESILPKRNSDKLIARKKDWDPKKYGGFDSPTVAYSVLVVAKVEKGKSKKLKSVKELLGITIMERSSFEKNPIDFLEAKGYKEVKKDLIIKLPKYSLFELENGRKRMLASAGELQKGNELALPSKYVNFLYLASHYEKLKGSPEDNEQKQLFVEQHKHYLDEIIEQISEFSKRVILADANLDKVLSAYNKHRDKPIREQAENIIHLFTLTNLGAPAAFKYFDTTIDRKRYTSTKEVLDATLIHQSITGLYETRIDLSQLGGDGGGGGGGSPAPGGTLNIEDEYRLHETSKGPDVPLGSTWLSDFPQAWAETGGMGLAVRQAPLIIPLKATSTPVSIKQYPMSQEARLGIKPHIQRLLDQGILVPCQSPWNTPLLPVKKPGTNDYRPVQDLREVNKRVEDIHPTVPNPYNLLSGLPPSHQWYTVLDLKDAFFCLRLHPTSQSLFAFEWRDPEMGISGQLTWTRLPQGFKNSPTLFNEALHRDLADFRIQHPDLILLQYVDDLLLAATSELDCQQGTRALLQTLGDLGYRASAKKAQICQKQVKYLGYLLKEGQRWLTEARKETVMGQPTPKTPRQLREFLGKAGFCRLFIPGFAEMAAPLYPLTKPGTLFEWGPDQQKAYQEIKQALLTAPALGLPDLTKPFELFVDEKQGYAKGVLTQKLGPWRRPVAYLSKKLDPVAAGWPPCLRMVAAIAVLTKDAGKLTMGQPLVILAPHAVEALVKQPPDRWLSNARMTHYQALLLDTDRVQFGPIVALNPATLLPLPEEGLQHDCLDILAEAHGTRPDLTDQPLPDADHTWYTDGSSFLQEGQRKAGAAVTTETEVVWAKALPAGTSAQRAELIALTQALKMAEGKKLNVYTDSRYAFATAHIHGEIYRRRGWLTSEGKEIKNKDEILALLKALFLPKRLSIIHCPGHQKGNRAEARGNRMADQAAREVATRETPETSTLLAGKRTADGSEFEKRTADGSEFESPKKKAKVE

SEQ ID NO: 2589 - protein, 2094 aa, synthetic construct
MPAAKRVKLDGGDKKYSIGLDIGTNSVGWAVITDEYKVPSKKFKVLGNTDRHSIKKNLIGALLFDSGETAEATRLKRTARRRYTRRKNRICYLQEIFSNEMAKVDDSFFHRLEESFLVEEDKKHERHPIFGNIVDEVAYHEKYPTIYHLRKKLVDSTDKADLRLIYLALAHMIKFRGHFLIEGDLNPDNSDVDKLFIQLVQTYNQLFEENPINASGVDAKAILSARLSKSRRLENLIAQLPGEKKNGLFGNLIALSLGLTPNFKSNFDLAEDAKLQLSKDTYDDDLDNLLAQIGDQYADLFLAAKNLSDAILLSDILRVNTEITKAPLSASMIKRYDEHHQDLTLLKALVRQQLPEKYKEIFFDQSKNGYAGYIDGGASQEEFYKFIKPILEKMDGTEELLVKLNREDLLRKQRTFDNGSIPHQIHLGELHAILRRQEDFYPFLKDNREKIEKILTFRIPYYVGPLARGNSRFAWMTRKSEETITPWNFEEVVDKGASAQSFIERMTNFDKNLPNEKVLPKHSLLYEYFTVYNELTKVKYVTEGMRKPAFLSGEQKKAIVDLLFKTNRKVTVKQLKEDYFKKIECFDSVEISGVEDRFNASLGTYHDLLKIIKDKDFLDNEENEDILEDIVLTLTLFEDREMIEERLKTYAHLFDDKVMKQLKRRRYTGWGRLSRKLINGIRDKQSGKTILDFLKSDGFANRNFMQLIHDDSLTFKEDIQKAQVSGQGDSLHEHIANLAGSPAIKKGILQTVKVVDELVKVMGRHKPENIVIEMARENQTTQKGQKNSRERMKRIEEGIKELGSQILKEHPVENTQLQNEKLYLYYLQNGRDMYVDQELDINRLSDYDVDHIVPQSFLKDDSIDNKVLTRSDKARGKSDNVPSEEVVKKMKNYWRQLLNAKLITQRKFDNLTKAERGGLSELDKAGFIKRQLVETRQITKHVAQILDSRMNTKYDENDKLIREVKVITLKSKLVSDFRKDFQFYKVREINNYHHAHDAYLNAVVGTALIKKYPKLESEFVYGDYKVYDVRKMIAKSEQEIGKATAKYFFYSNIMNFFKTEITLANGEIRKRPLIETNGETGEIVWDKGRDFATVRKVLSMPQVNIVKKTEVQTGGFSKESILPKRNSDKLIARKKDWDPKKYGGFDSPTVAYSVLVVAKVEKGKSKKLKSVKELLGITIMERSSFEKNPIDFLEAKGYKEVKKDLIIKLPKYSLFELENGRKRMLASAGELQKGNELALPSKYVNFLYLASHYEKLKGSPEDNEQKQLFVEQHKHYLDEIIEQISEFSKRVILADANLDKVLSAYNKHRDKPIREQAENIIHLFTLTNLGAPAAFKYFDTTIDRKRYTSTKEVLDATLIHQSITGLYETRIDLSQLGGDGGGGGGSSPAPGGTLNIEDEYRLHETSKGPDVPLGSTWLSDFPQAWAETGGMGLAVRQAPLIIPLKATSTPVSIKQYPMSQEARLGIKPHIQRLLDQGILVPCQSPWNTPLLPVKKPGTNDYRPVQDLREVNKRVEDIHPTVPNPYNLLSGLPPSHQWYTVLDLKDAFFCLRLHPTSQSLFAFEWRDPEMGISGQLTWTRLPQGFKNSPTLFNEALHRDLADFRIQHPDLILLQYVDDLLLAATSELDCQQGTRALLQTLGDLGYRASAKKAQICQKQVKYLGYLLKEGQRWLTEARKETVMGQPTPKTPRQLREFLGKAGFCRLFIPGFAEMAAPLYPLTKPGTLFEWGPDQQKAYQEIKQALLTAPALGLPDLTKPFELFVDEKQGYAKGVLTQKLGPWRRPVAYLSKKLDPVAAGWPPCLRMVAAIAVLTKDAGKLTMGQPLVILAPHAVEALVKQPPDRWLSNARMTHYQALLLDTDRVQFGPIVALNPATLLPLPEEGLQHDCLDILAEAHGTRPDLTDQPLPDADHTWYTDGSSFLQEGQRKAGAAVTTETEVVWAKALPAGTSAQRAELIALTQALKMAEGKKLNVYTDSRYAFATAHIHGEIYRRRGWLTSEGKEIKNKDEILALLKALFLPKRLSIIHCPGHQKGNRAEARGNRMADQAAREVATRETPETSTLLAGKRTADGSEFEKRTADGSEFESPKKKAKVE

SEQ ID NO: 2590 - protein, 2091 aa, synthetic construct
MPAAKRVKLDGGDKKYSIGLDIGTNSVGWAVITDEYKVPSKKFKVLGNTDRHSIKKNLIGALLFDSGETAEATRLKRTARRRYTRRKNRICYLQEIFSNEMAKVDDSFFHRLEESFLVEEDKKHERHPIFGNIVDEVAYHEKYPTIYHLRKKLVDSTDKADLRLIYLALAHMIKFRGHFLIEGDLNPDNSDVDKLFIQLVQTYNQLFEENPINASGVDAKAILSARLSKSRRLENLIAQLPGEKKNGLFGNLIALSLGLTPNFKSNFDLAEDAKLQLSKDTYDDDLDNLLAQIGDQYADLFLAAKNLSDAILLSDILRVNTEITKAPLSASMIKRYDEHHQDLTLLKALVRQQLPEKYKEIFFDQSKNGYAGYIDGGASQEEFYKFIKPILEKMDGTEELLVKLNREDLLRKQRTFDNGSIPHQIHLGELHAILRRQEDFYPFLKDNREKIEKILTFRIPYYVGPLARGNSRFAWMTRKSEETITPWNFEEVVDKGASAQSFIERMTNFDKNLPNEKVLPKHSLLYEYFTVYNELTKVKYVTEGMRKPAFLSGEQKKAIVDLLFKTNRKVTVKQLKEDYFKKIECFDSVEISGVEDRFNASLGTYHDLLKIIKDKDFLDNEENEDILEDIVLTLTLFEDREMIEERLKTYAHLFDDKVMKQLKRRRYTGWGRLSRKLINGIRDKQSGKTILDFLKSDGFANRNFMQLIHDDSLTFKEDIQKAQVSGQGDSLHEHIANLAGSPAIKKGILQTVKVVDELVKVMGRHKPENIVIEMARENQTTQKGQKNSRERMKRIEEGIKELGSQILKEHPVENTQLQNEKLYLYYLQNGRDMYVDQELDINRLSDYDVDHIVPQSFLKDDSIDNKVLTRSDKARGKSDNVPSEEVVKKMKNYWRQLLNAKLITQRKFDNLTKAERGGLSELDKAGFIKRQLVETRQITKHVAQILDSRMNTKYDENDKLIREVKVITLKSKLVSDFRKDFQFYKVREINNYHHAHDAYLNAVVGTALIKKYPKLESEFVYGDYKVYDVRKMIAKSEQEIGKATAKYFFYSNIMNFFKTEITLANGEIRKRPLIETNGETGEIVWDKGRDFATVRKVLSMPQVNIVKKTEVQTGGFSKESILPKRNSDKLIARKKDWDPKKYGGFDSPTVAYSVLVVAKVEKGKSKKLKSVKELLGITIMERSSFEKNPIDFLEAKGYKEVKKDLIIKLPKYSLFELENGRKRMLASAGELQKGNELALPSKYVNFLYLASHYEKLKGSPEDNEQKQLFVEQHKHYLDEIIEQISEFSKRVILADANLDKVLSAYNKHRDKPIREQAENIIHLFTLTNLGAPAAFKYFDTTIDRKRYTSTKEVLDATLIHQSITGLYETRIDLSQLGGDGGGSSGGSGGTLNIEDEYRLHETSKGPDVPLGSTWLSDFPQAWAETGGMGLAVRQAPLIIPLKATSTPVSIKQYPMSQEARLGIKPHIQRLLDQGILVPCQSPWNTPLLPVKKPGTNDYRPVQDLREVNKRVEDIHPTVPNPYNLLSGLPPSHQWYTVLDLKDAFFCLRLHPTSQSLFAFEWRDPEMGISGQLTWTRLPQGFKNSPTLFNEALHRDLADFRIQHPDLILLQYVDDLLLAATSELDCQQGTRALLQTLGDLGYRASAKKAQICQKQVKYLGYLLKEGQRWLTEARKETVMGQPTPKTPRQLREFLGKAGFCRLFIPGFAEMAAPLYPLTKPGTLFEWGPDQQKAYQEIKQALLTAPALGLPDLTKPFELFVDEKQGYAKGVLTQKLGPWRRPVAYLSKKLDPVAAGWPPCLRMVAAIAVLTKDAGKLTMGQPLVILAPHAVEALVKQPPDRWLSNARMTHYQALLLDTDRVQFGPIVALNPATLLPLPEEGLQHDCLDILAEAHGTRPDLTDQPLPDADHTWYTDGSSFLQEGQRKAGAAVTTETEVVWAKALPAGTSAQRAELIALTQALKMAEGKKLNVYTDSRYAFATAHIHGEIYRRRGWLTSEGKEIKNKDEILALLKALFLPKRLSIIHCPGHQKGNRAEARGNRMADQAAREVATRETPETSTLLAGKRTADGSEFEKRTADGSEFESPKKKAKVE

SEQ ID NO: 2591 - protein, 2094 aa, synthetic construct
MPAAKRVKLDGGDKKYSIGLDIGTNSVGWAVITDEYKVPSKKFKVLGNTDRHSIKKNLIGALLFDSGETAEATRLKRTARRRYTRRKNRICYLQEIFSNEMAKVDDSFFHRLEESFLVEEDKKHERHPIFGNIVDEVAYHEKYPTIYHLRKKLVDSTDKADLRLIYLALAHMIKFRGHFLIEGDLNPDNSDVDKLFIQLVQTYNQLFEENPINASGVDAKAILSARLSKSRRLENLIAQLPGEKKNGLFGNLIALSLGLTPNFKSNFDLAEDAKLQLSKDTYDDDLDNLLAQIGDQYADLFLAAKNLSDAILLSDILRVNTEITKAPLSASMIKRYDEHHQDLTLLKALVRQQLPEKYKEIFFDQSKNGYAGYIDGGASQEEFYKFIKPILEKMDGTEELLVKLNREDLLRKQRTFDNGSIPHQIHLGELHAILRRQEDFYPFLKDNREKIEKILTFRIPYYVGPLARGNSRFAWMTRKSEETITPWNFEEVVDKGASAQSFIERMTNFDKNLPNEKVLPKHSLLYEYFTVYNELTKVKYVTEGMRKPAFLSGEQKKAIVDLLFKTNRKVTVKQLKEDYFKKIECFDSVEISGVEDRFNASLGTYHDLLKIIKDKDFLDNEENEDILEDIVLTLTLFEDREMIEERLKTYAHLFDDKVMKQLKRRRYTGWGRLSRKLINGIRDKQSGKTILDFLKSDGFANRNFMQLIHDDSLTFKEDIQKAQVSGQGDSLHEHIANLAGSPAIKKGILQTVKVVDELVKVMGRHKPENIVIEMARENQTTQKGQKNSRERMKRIEEGIKELGSQILKEHPVENTQLQNEKLYLYYLQNGRDMYVDQELDINRLSDYDVDHIVPQSFLKDDSIDNKVLTRSDKARGKSDNVPSEEVVKKMKNYWRQLLNAKLITQRKFDNLTKAERGGLSELDKAGFIKRQLVETRQITKHVAQILDSRMNTKYDENDKLIREVKVITLKSKLVSDFRKDFQFYKVREINNYHHAHDAYLNAVVGTALIKKYPKLESEFVYGDYKVYDVRKMIAKSEQEIGKATAKYFFYSNIMNFFKTEITLANGEIRKRPLIETNGETGEIVWDKGRDFATVRKVLSMPQVNIVKKTEVQTGGFSKESILPKRNSDKLIARKKDWDPKKYGGFDSPTVAYSVLVVAKVEKGKSKKLKSVKELLGITIMERSSFEKNPIDFLEAKGYKEVKKDLIIKLPKYSLFELENGRKRMLASAGELQKGNELALPSKYVNFLYLASHYEKLKGSPEDNEQKQLFVEQHKHYLDEIIEQISEFSKRVILADANLDKVLSAYNKHRDKPIREQAENIIHLFTLTNLGAPAAFKYFDTTIDRKRYTSTKEVLDATLIHQSITGLYETRIDLSQLGGDGGGSSGGSPAPGGTLNIEDEYRLHETSKGPDVPLGSTWLSDFPQAWAETGGMGLAVRQAPLIIPLKATSTPVSIKQYPMSQEARLGIKPHIQRLLDQGILVPCQSPWNTPLLPVKKPGTNDYRPVQDLREVNKRVEDIHPTVPNPYNLLSGLPPSHQWYTVLDLKDAFFCLRLHPTSQSLFAFEWRDPEMGISGQLTWTRLPQGFKNSPTLFNEALHRDLADFRIQHPDLILLQYVDDLLLAATSELDCQQGTRALLQTLGDLGYRASAKKAQICQKQVKYLGYLLKEGQRWLTEARKETVMGQPTPKTPRQLREFLGKAGFCRLFIPGFAEMAAPLYPLTKPGTLFEWGPDQQKAYQEIKQALLTAPALGLPDLTKPFELFVDEKQGYAKGVLTQKLGPWRRPVAYLSKKLDPVAAGWPPCLRMVAAIAVLTKDAGKLTMGQPLVILAPHAVEALVKQPPDRWLSNARMTHYQALLLDTDRVQFGPIVALNPATLLPLPEEGLQHDCLDILAEAHGTRPDLTDQPLPDADHTWYTDGSSFLQEGQRKAGAAVTTETEVVWAKALPAGTSAQRAELIALTQALKMAEGKKLNVYTDSRYAFATAHIHGEIYRRRGWLTSEGKEIKNKDEILALLKALFLPKRLSIIHCPGHQKGNRAEARGNRMADQAAREVATRETPETSTLLAGKRTADGSEFEKRTADGSEFESPKKKAKVE

SEQ ID NO: 2592 - protein, 2096 aa, synthetic construct
MPAAKRVKLDGGDKKYSIGLDIGTNSVGWAVITDEYKVPSKKFKVLGNTDRHSIKKNLIGALLFDSGETAEATRLKRTARRRYTRRKNRICYLQEIFSNEMAKVDDSFFHRLEESFLVEEDKKHERHPIFGNIVDEVAYHEKYPTIYHLRKKLVDSTDKADLRLIYLALAHMIKFRGHFLIEGDLNPDNSDVDKLFIQLVQTYNQLFEENPINASGVDAKAILSARLSKSRRLENLIAQLPGEKKNGLFGNLIALSLGLTPNFKSNFDLAEDAKLQLSKDTYDDDLDNLLAQIGDQYADLFLAAKNLSDAILLSDILRVNTEITKAPLSASMIKRYDEHHQDLTLLKALVRQQLPEKYKEIFFDQSKNGYAGYIDGGASQEEFYKFIKPILEKMDGTEELLVKLNREDLLRKQRTFDNGSIPHQIHLGELHAILRRQEDFYPFLKDNREKIEKILTFRIPYYVGPLARGNSRFAWMTRKSEETITPWNFEEVVDKGASAQSFIERMTNFDKNLPNEKVLPKHSLLYEYFTVYNELTKVKYVTEGMRKPAFLSGEQKKAIVDLLFKTNRKVTVKQLKEDYFKKIECFDSVEISGVEDRFNASLGTYHDLLKIIKDKDFLDNEENEDILEDIVLTLTLFEDREMIEERLKTYAHLFDDKVMKQLKRRRYTGWGRLSRKLINGIRDKQSGKTILDFLKSDGFANRNFMQLIHDDSLTFKEDIQKAQVSGQGDSLHEHIANLAGSPAIKKGILQTVKVVDELVKVMGRHKPENIVIEMARENQTTQKGQKNSRERMKRIEEGIKELGSQILKEHPVENTQLQNEKLYLYYLQNGRDMYVDQELDINRLSDYDVDHIVPQSFLKDDSIDNKVLTRSDKARGKSDNVPSEEVVKKMKNYWRQLLNAKLITQRKFDNLTKAERGGLSELDKAGFIKRQLVETRQITKHVAQILDSRMNTKYDENDKLIREVKVITLKSKLVSDFRKDFQFYKVREINNYHHAHDAYLNAVVGTALIKKYPKLESEFVYGDYKVYDVRKMIAKSEQEIGKATAKYFFYSNIMNFFKTEITLANGEIRKRPLIETNGETGEIVWDKGRDFATVRKVLSMPQVNIVKKTEVQTGGFSKESILPKRNSDKLIARKKDWDPKKYGGFDSPTVAYSVLVVAKVEKGKSKKLKSVKELLGITIMERSSFEKNPIDFLEAKGYKEVKKDLIIKLPKYSLFELENGRKRMLASAGELQKGNELALPSKYVNFLYLASHYEKLKGSPEDNEQKQLFVEQHKHYLDEIIEQISEFSKRVILADANLDKVLSAYNKHRDKPIREQAENIIHLFTLTNLGAPAAFKYFDTTIDRKRYTSTKEVLDATLIHQSITGLYETRIDLSQLGGDGGGGGPAPEAAAKGGTLNIEDEYRLHETSKGPDVPLGSTWLSDFPQAWAETGGMGLAVRQAPLIIPLKATSTPVSIKQYPMSQEARLGIKPHIQRLLDQGILVPCQSPWNTPLLPVKKPGTNDYRPVQDLREVNKRVEDIHPTVPNPYNLLSGLPPSHQWYTVLDLKDAFFCLRLHPTSQSLFAFEWRDPEMGISGQLTWTRLPQGFKNSPTLFNEALHRDLADFRIQHPDLILLQYVDDLLLAATSELDCQQGTRALLQTLGDLGYRASAKKAQICQKQVKYLGYLLKEGQRWLTEARKETVMGQPTPKTPRQLREFLGKAGFCRLFIPGFAEMAAPLYPLTKPGTLFEWGPDQQKAYQEIKQALLTAPALGLPDLTKPFELFVDEKQGYAKGVLTQKLGPWRRPVAYLSKKLDPVAAGWPPCLRMVAAIAVLTKDAGKLTMGQPLVILAPHAVEALVKQPPDRWLSNARMTHYQALLLDTDRVQFGPIVALNPATLLPLPEEGLQHDCLDILAEAHGTRPDLTDQPLPDADHTWYTDGSSFLQEGQRKAGAAVTTETEVVWAKALPAGTSAQRAELIALTQALKMAEGKKLNVYTDSRYAFATAHIHGEIYRRRGWLTSEGKEIKNKDEILALLKALFLPKRLSIIHCPGHQKGNRAEARGNRMADQAAREVATRETPETSTLLAGKRTADGSEFEKRTADGSEFESPKKKAKVE

SEQ ID NO: 2593 - protein, 2094 aa, synthetic construct
MPAAKRVKLDGGDKKYSIGLDIGTNSVGWAVITDEYKVPSKKFKVLGNTDRHSIKKNLIGALLFDSGETAEATRLKRTARRRYTRRKNRICYLQEIFSNEMAKVDDSFFHRLEESFLVEEDKKHERHPIFGNIVDEVAYHEKYPTIYHLRKKLVDSTDKADLRLIYLALAHMIKFRGHFLIEGDLNPDNSDVDKLFIQLVQTYNQLFEENPINASGVDAKAILSARLSKSRRLENLIAQLPGEKKNGLFGNLIALSLGLTPNFKSNFDLAEDAKLQLSKDTYDDDLDNLLAQIGDQYADLFLAAKNLSDAILLSDILRVNTEITKAPLSASMIKRYDEHHQDLTLLKALVRQQLPEKYKEIFFDQSKNGYAGYIDGGASQEEFYKFIKPILEKMDGTEELLVKLNREDLLRKQRTFDNGSIPHQIHLGELHAILRRQEDFYPFLKDNREKIEKILTFRIPYYVGPLARGNSRFAWMTRKSEETITPWNFEEVVDKGASAQSFIERMTNFDKNLPNEKVLPKHSLLYEYFTVYNELTKVKYVTEGMRKPAFLSGEQKKAIVDLLFKTNRKVTVKQLKEDYFKKIECFDSVEISGVEDRFNASLGTYHDLLKIIKDKDFLDNEENEDILEDIVLTLTLFEDREMIEERLKTYAHLFDDKVMKQLKRRRYTGWGRLSRKLINGIRDKQSGKTILDFLKSDGFANRNFMQLIHDDSLTFKEDIQKAQVSGQGDSLHEHIANLAGSPAIKKGILQTVKVVDELVKVMGRHKPENIVIEMARENQTTQKGQKNSRERMKRIEEGIKELGSQILKEHPVENTQLQNEKLYLYYLQNGRDMYVDQELDINRLSDYDVDHIVPQSFLKDDSIDNKVLTRSDKARGKSDNVPSEEVVKKMKNYWRQLLNAKLITQRKFDNLTKAERGGLSELDKAGFIKRQLVETRQITKHVAQILDSRMNTKYDENDKLIREVKVITLKSKLVSDFRKDFQFYKVREINNYHHAHDAYLNAVVGTALIKKYPKLESEFVYGDYKVYDVRKMIAKSEQEIGKATAKYFFYSNIMNFFKTEITLANGEIRKRPLIETNGETGEIVWDKGRDFATVRKVLSMPQVNIVKKTEVQTGGFSKESILPKRNSDKLIARKKDWDPKKYGGFDSPTVAYSVLVVAKVEKGKSKKLKSVKELLGITIMERSSFEKNPIDFLEAKGYKEVKKDLIIKLPKYSLFELENGRKRMLASAGELQKGNELALPSKYVNFLYLASHYEKLKGSPEDNEQKQLFVEQHKHYLDEIIEQISEFSKRVILADANLDKVLSAYNKHRDKPIREQAENIIHLFTLTNLGAPAAFKYFDTTIDRKRYTSTKEVLDATLIHQSITGLYETRIDLSQLGGDGGGGGPAPGSSGGTLNIEDEYRLHETSKGPDVPLGSTWLSDFPQAWAETGGMGLAVRQAPLIIPLKATSTPVSIKQYPMSQEARLGIKPHIQRLLDQGILVPCQSPWNTPLLPVKKPGTNDYRPVQDLREVNKRVEDIHPTVPNPYNLLSGLPPSHQWYTVLDLKDAFFCLRLHPTSQSLFAFEWRDPEMGISGQLTWTRLPQGFKNSPTLFNEALHRDLADFRIQHPDLILLQYVDDLLLAATSELDCQQGTRALLQTLGDLGYRASAKKAQICQKQVKYLGYLLKEGQRWLTEARKETVMGQPTPKTPRQLREFLGKAGFCRLFIPGFAEMAAPLYPLTKPGTLFEWGPDQQKAYQEIKQALLTAPALGLPDLTKPFELFVDEKQGYAKGVLTQKLGPWRRPVAYLSKKLDPVAAGWPPCLRMVAAIAVLTKDAGKLTMGQPLVILAPHAVEALVKQPPDRWLSNARMTHYQALLLDTDRVQFGPIVALNPATLLPLPEEGLQHDCLDILAEAHGTRPDLTDQPLPDADHTWYTDGSSFLQEGQRKAGAAVTTETEVVWAKALPAGTSAQRAELIALTQALKMAEGKKLNVYTDSRYAFATAHIHGEIYRRRGWLTSEGKEIKNKDEILALLKALFLPKRLSIIHCPGHQKGNRAEARGNRMADQAAREVATRETPETSTLLAGKRTADGSEFEKRTADGSEFESPKKKAKVE

SEQ ID NO: 2594 - protein, 2091 aa, synthetic construct
MPAAKRVKLDGGDKKYSIGLDIGTNSVGWAVITDEYKVPSKKFKVLGNTDRHSIKKNLIGALLFDSGETAEATRLKRTARRRYTRRKNRICYLQEIFSNEMAKVDDSFFHRLEESFLVEEDKKHERHPIFGNIVDEVAYHEKYPTIYHLRKKLVDSTDKADLRLIYLALAHMIKFRGHFLIEGDLNPDNSDVDKLFIQLVQTYNQLFEENPINASGVDAKAILSARLSKSRRLENLIAQLPGEKKNGLFGNLIALSLGLTPNFKSNFDLAEDAKLQLSKDTYDDDLDNLLAQIGDQYADLFLAAKNLSDAILLSDILRVNTEITKAPLSASMIKRYDEHHQDLTLLKALVRQQLPEKYKEIFFDQSKNGYAGYIDGGASQEEFYKFIKPILEKMDGTEELLVKLNREDLLRKQRTFDNGSIPHQIHLGELHAILRRQEDFYPFLKDNREKIEKILTFRIPYYVGPLARGNSRFAWMTRKSEETITPWNFEEVVDKGASAQSFIERMTNFDKNLPNEKVLPKHSLLYEYFTVYNELTKVKYVTEGMRKPAFLSGEQKKAIVDLLFKTNRKVTVKQLKEDYFKKIECFDSVEISGVEDRFNASLGTYHDLLKIIKDKDFLDNEENEDILEDIVLTLTLFEDREMIEERLKTYAHLFDDKVMKQLKRRRYTGWGRLSRKLINGIRDKQSGKTILDFLKSDGFANRNFMQLIHDDSLTFKEDIQKAQVSGQGDSLHEHIANLAGSPAIKKGILQTVKVVDELVKVMGRHKPENIVIEMARENQTTQKGQKNSRERMKRIEEGIKELGSQILKEHPVENTQLQNEKLYLYYLQNGRDMYVDQELDINRLSDYDVDHIVPQSFLKDDSIDNKVLTRSDKARGKSDNVPSEEVVKKMKNYWRQLLNAKLITQRKFDNLTKAERGGLSELDKAGFIKRQLVETRQITKHVAQILDSRMNTKYDENDKLIREVKVITLKSKLVSDFRKDFQFYKVREINNYHHAHDAYLNAVVGTALIKKYPKLESEFVYGDYKVYDVRKMIAKSEQEIGKATAKYFFYSNIMNFFKTEITLANGEIRKRPLIETNGETGEIVWDKGRDFATVRKVLSMPQVNIVKKTEVQTGGFSKESILPKRNSDKLIARKKDWDPKKYGGFDSPTVAYSVLVVAKVEKGKSKKLKSVKELLGITIMERSSFEKNPIDFLEAKGYKEVKKDLIIKLPKYSLFELENGRKRMLASAGELQKGNELALPSKYVNFLYLASHYEKLKGSPEDNEQKQLFVEQHKHYLDEIIEQISEFSKRVILADANLDKVLSAYNKHRDKPIREQAENIIHLFTLTNLGAPAAFKYFDTTIDRKRYTSTKEVLDATLIHQSITGLYETRIDLSQLGGDGGGSSGGGGGTLNIEDEYRLHETSKGPDVPLGSTWLSDFPQAWAETGGMGLAVRQAPLIIPLKATSTPVSIKQYPMSQEARLGIKPHIQRLLDQGILVPCQSPWNTPLLPVKKPGTNDYRPVQDLREVNKRVEDIHPTVPNPYNLLSGLPPSHQWYTVLDLKDAFFCLRLHPTSQSLFAFEWRDPEMGISGQLTWTRLPQGFKNSPTLFNEALHRDLADFRIQHPDLILLQYVDDLLLAATSELDCQQGTRALLQTLGDLGYRASAKKAQICQKQVKYLGYLLKEGQRWLTEARKETVMGQPTPKTPRQLREFLGKAGFCRLFIPGFAEMAAPLYPLTKPGTLFEWGPDQQKAYQEIKQALLTAPALGLPDLTKPFELFVDEKQGYAKGVLTQKLGPWRRPVAYLSKKLDPVAAGWPPCLRMVAAIAVLTKDAGKLTMGQPLVILAPHAVEALVKQPPDRWLSNARMTHYQALLLDTDRVQFGPIVALNPATLLPLPEEGLQHDCLDILAEAHGTRPDLTDQPLPDADHTWYTDGSSFLQEGQRKAGAAVTTETEVVWAKALPAGTSAQRAELIALTQALKMAEGKKLNVYTDSRYAFATAHIHGEIYRRRGWLTSEGKEIKNKDEILALLKALFLPKRLSIIHCPGHQKGNRAEARGNRMADQAAREVATRETPETSTLLAGKRTADGSEFEKRTADGSEFESPKKKAKVE

SEQ ID NO: 2595 - protein, 2103 aa, synthetic construct
MPAAKRVKLDGGDKKYSIGLDIGTNSVGWAVITDEYKVPSKKFKVLGNTDRHSIKKNLIGALLFDSGETAEATRLKRTARRRYTRRKNRICYLQEIFSNEMAKVDDSFFHRLEESFLVEEDKKHERHPIFGNIVDEVAYHEKYPTIYHLRKKLVDSTDKADLRLIYLALAHMIKFRGHFLIEGDLNPDNSDVDKLFIQLVQTYNQLFEENPINASGVDAKAILSARLSKSRRLENLIAQLPGEKKNGLFGNLIALSLGLTPNFKSNFDLAEDAKLQLSKDTYDDDLDNLLAQIGDQYADLFLAAKNLSDAILLSDILRVNTEITKAPLSASMIKRYDEHHQDLTLLKALVRQQLPEKYKEIFFDQSKNGYAGYIDGGASQEEFYKFIKPILEKMDGTEELLVKLNREDLLRKQRTFDNGSIPHQIHLGELHAILRRQEDFYPFLKDNREKIEKILTFRIPYYVGPLARGNSRFAWMTRKSEETITPWNFEEVVDKGASAQSFIERMTNFDKNLPNEKVLPKHSLLYEYFTVYNELTKVKYVTEGMRKPAFLSGEQKKAIVDLLFKTNRKVTVKQLKEDYFKKIECFDSVEISGVEDRFNASLGTYHDLLKIIKDKDFLDNEENEDILEDIVLTLTLFEDREMIEERLKTYAHLFDDKVMKQLKRRRYTGWGRLSRKLINGIRDKQSGKTILDFLKSDGFANRNFMQLIHDDSLTFKEDIQKAQVSGQGDSLHEHIANLAGSPAIKKGILQTVKVVDELVKVMGRHKPENIVIEMARENQTTQKGQKNSRERMKRIEEGIKELGSQILKEHPVENTQLQNEKLYLYYLQNGRDMYVDQELDINRLSDYDVDHIVPQSFLKDDSIDNKVLTRSDKARGKSDNVPSEEVVKKMKNYWRQLLNAKLITQRKFDNLTKAERGGLSELDKAGFIKRQLVETRQITKHVAQILDSRMNTKYDENDKLIREVKVITLKSKLVSDFRKDFQFYKVREINNYHHAHDAYLNAVVGTALIKKYPKLESEFVYGDYKVYDVRKMIAKSEQEIGKATAKYFFYSNIMNFFKTEITLANGEIRKRPLIETNGETGEIVWDKGRDFATVRKVLSMPQVNIVKKTEVQTGGFSKESILPKRNSDKLIARKKDWDPKKYGGFDSPTVAYSVLVVAKVEKGKSKKLKSVKELLGITIMERSSFEKNPIDFLEAKGYKEVKKDLIIKLPKYSLFELENGRKRMLASAGELQKGNELALPSKYVNFLYLASHYEKLKGSPEDNEQKQLFVEQHKHYLDEIIEQISEFSKRVILADANLDKVLSAYNKHRDKPIREQAENIIHLFTLTNLGAPAAFKYFDTTIDRKRYTSTKEVLDATLIHQSITGLYETRIDLSQLGGDGGGSSGSSGSSGSSGSSGSSGGTLNIEDEYRLHETSKGPDVPLGSTWLSDFPQAWAETGGMGLAVRQAPLIIPLKATSTPVSIKQYPMSQEARLGIKPHIQRLLDQGILVPCQSPWNTPLLPVKKPGTNDYRPVQDLREVNKRVEDIHPTVPNPYNLLSGLPPSHQWYTVLDLKDAFFCLRLHPTSQSLFAFEWRDPEMGISGQLTWTRLPQGFKNSPTLFNEALHRDLADFRIQHPDLILLQYVDDLLLAATSELDCQQGTRALLQTLGDLGYRASAKKAQICQKQVKYLGYLLKEGQRWLTEARKETVMGQPTPKTPRQLREFLGKAGFCRLFIPGFAEMAAPLYPLTKPGTLFEWGPDQQKAYQEIKQALLTAPALGLPDLTKPFELFVDEKQGYAKGVLTQKLGPWRRPVAYLSKKLDPVAAGWPPCLRMVAAIAVLTKDAGKLTMGQPLVILAPHAVEALVKQPPDRWLSNARMTHYQALLLDTDRVQFGPIVALNPATLLPLPEEGLQHDCLDILAEAHGTRPDLTDQPLPDADHTWYTDGSSFLQEGQRKAGAAVTTETEVVWAKALPAGTSAQRAELIALTQALKMAEGKKLNVYTDSRYAFATAHIHGEIYRRRGWLTSEGKEIKNKDEILALLKALFLPKRLSIIHCPGHQKGNRAEARGNRMADQAAREVATRETPETSTLLAGKRTADGSEFEKRTADGSEFESPKKKAKVE

SEQ ID NO: 2596 - protein, 2088 aa, synthetic construct
MPAAKRVKLDGGDKKYSIGLDIGTNSVGWAVITDEYKVPSKKFKVLGNTDRHSIKKNLIGALLFDSGETAEATRLKRTARRRYTRRKNRICYLQEIFSNEMAKVDDSFFHRLEESFLVEEDKKHERHPIFGNIVDEVAYHEKYPTIYHLRKKLVDSTDKADLRLIYLALAHMIKFRGHFLIEGDLNPDNSDVDKLFIQLVQTYNQLFEENPINASGVDAKAILSARLSKSRRLENLIAQLPGEKKNGLFGNLIALSLGLTPNFKSNFDLAEDAKLQLSKDTYDDDLDNLLAQIGDQYADLFLAAKNLSDAILLSDILRVNTEITKAPLSASMIKRYDEHHQDLTLLKALVRQQLPEKYKEIFFDQSKNGYAGYIDGGASQEEFYKFIKPILEKMDGTEELLVKLNREDLLRKQRTFDNGSIPHQIHLGELHAILRRQEDFYPFLKDNREKIEKILTFRIPYYVGPLARGNSRFAWMTRKSEETITPWNFEEVVDKGASAQSFIERMTNFDKNLPNEKVLPKHSLLYEYFTVYNELTKVKYVTEGMRKPAFLSGEQKKAIVDLLFKTNRKVTVKQLKEDYFKKIECFDSVEISGVEDRFNASLGTYHDLLKIIKDKDFLDNEENEDILEDIVLTLTLFEDREMIEERLKTYAHLFDDKVMKQLKRRRYTGWGRLSRKLINGIRDKQSGKTILDFLKSDGFANRNFMQLIHDDSLTFKEDIQKAQVSGQGDSLHEHIANLAGSPAIKKGILQTVKVVDELVKVMGRHKPENIVIEMARENQTTQKGQKNSRERMKRIEEGIKELGSQILKEHPVENTQLQNEKLYLYYLQNGRDMYVDQELDINRLSDYDVDHIVPQSFLKDDSIDNKVLTRSDKARGKSDNVPSEEVVKKMKNYWRQLLNAKLITQRKFDNLTKAERGGLSELDKAGFIKRQLVETRQITKHVAQILDSRMNTKYDENDKLIREVKVITLKSKLVSDFRKDFQFYKVREINNYHHAHDAYLNAVVGTALIKKYPKLESEFVYGDYKVYDVRKMIAKSEQEIGKATAKYFFYSNIMNFFKTEITLANGEIRKRPLIETNGETGEIVWDKGRDFATVRKVLSMPQVNIVKKTEVQTGGFSKESILPKRNSDKLIARKKDWDPKKYGGFDSPTVAYSVLVVAKVEKGKSKKLKSVKELLGITIMERSSFEKNPIDFLEAKGYKEVKKDLIIKLPKYSLFELENGRKRMLASAGELQKGNELALPSKYVNFLYLASHYEKLKGSPEDNEQKQLFVEQHKHYLDEIIEQISEFSKRVILADANLDKVLSAYNKHRDKPIREQAENIIHLFTLTNLGAPAAFKYFDTTIDRKRYTSTKEVLDATLIHQSITGLYETRIDLSQLGGDGGGGGGGTLNIEDEYRLHETSKGPDVPLGSTWLSDFPQAWAETGGMGLAVRQAPLIIPLKATSTPVSIKQYPMSQEARLGIKPHIQRLLDQGILVPCQSPWNTPLLPVKKPGTNDYRPVQDLREVNKRVEDIHPTVPNPYNLLSGLPPSHQWYTVLDLKDAFFCLRLHPTSQSLFAFEWRDPEMGISGQLTWTRLPQGFKNSPTLFNEALHRDLADFRIQHPDLILLQYVDDLLLAATSELDCQQGTRALLQTLGDLGYRASAKKAQICQKQVKYLGYLLKEGQRWLTEARKETVMGQPTPKTPRQLREFLGKAGFCRLFIPGFAEMAAPLYPLTKPGTLFEWGPDQQKAYQEIKQALLTAPALGLPDLTKPFELFVDEKQGYAKGVLTQKLGPWRRPVAYLSKKLDPVAAGWPPCLRMVAAIAVLTKDAGKLTMGQPLVILAPHAVEALVKQPPDRWLSNARMTHYQALLLDTDRVQFGPIVALNPATLLPLPEEGLQHDCLDILAEAHGTRPDLTDQPLPDADHTWYTDGSSFLQEGQRKAGAAVTTETEVVWAKALPAGTSAQRAELIALTQALKMAEGKKLNVYTDSRYAFATAHIHGEIYRRRGWLTSEGKEIKNKDEILALLKALFLPKRLSIIHCPGHQKGNRAEARGNRMADQAAREVATRETPETSTLLAGKRTADGSEFEKRTADGSEFESPKKKAKVE

SEQ ID NO: 2597 - protein, 2096 aa, synthetic construct
MPAAKRVKLDGGDKKYSIGLDIGTNSVGWAVITDEYKVPSKKFKVLGNTDRHSIKKNLIGALLFDSGETAEATRLKRTARRRYTRRKNRICYLQEIFSNEMAKVDDSFFHRLEESFLVEEDKKHERHPIFGNIVDEVAYHEKYPTIYHLRKKLVDSTDKADLRLIYLALAHMIKFRGHFLIEGDLNPDNSDVDKLFIQLVQTYNQLFEENPINASGVDAKAILSARLSKSRRLENLIAQLPGEKKNGLFGNLIALSLGLTPNFKSNFDLAEDAKLQLSKDTYDDDLDNLLAQIGDQYADLFLAAKNLSDAILLSDILRVNTEITKAPLSASMIKRYDEHHQDLTLLKALVRQQLPEKYKEIFFDQSKNGYAGYIDGGASQEEFYKFIKPILEKMDGTEELLVKLNREDLLRKQRTFDNGSIPHQIHLGELHAILRRQEDFYPFLKDNREKIEKILTFRIPYYVGPLARGNSRFAWMTRKSEETITPWNFEEVVDKGASAQSFIERMTNFDKNLPNEKVLPKHSLLYEYFTVYNELTKVKYVTEGMRKPAFLSGEQKKAIVDLLFKTNRKVTVKQLKEDYFKKIECFDSVEISGVEDRFNASLGTYHDLLKIIKDKDFLDNEENEDILEDIVLTLTLFEDREMIEERLKTYAHLFDDKVMKQLKRRRYTGWGRLSRKLINGIRDKQSGKTILDFLKSDGFANRNFMQLIHDDSLTFKEDIQKAQVSGQGDSLHEHIANLAGSPAIKKGILQTVKVVDELVKVMGRHKPENIVIEMARENQTTQKGQKNSRERMKRIEEGIKELGSQILKEHPVENTQLQNEKLYLYYLQNGRDMYVDQELDINRLSDYDVDHIVPQSFLKDDSIDNKVLTRSDKARGKSDNVPSEEVVKKMKNYWRQLLNAKLITQRKFDNLTKAERGGLSELDKAGFIKRQLVETRQITKHVAQILDSRMNTKYDENDKLIREVKVITLKSKLVSDFRKDFQFYKVREINNYHHAHDAYLNAVVGTALIKKYPKLESEFVYGDYKVYDVRKMIAKSEQEIGKATAKYFFYSNIMNFFKTEITLANGEIRKRPLIETNGETGEIVWDKGRDFATVRKVLSMPQVNIVKKTEVQTGGFSKESILPKRNSDKLIARKKDWDPKKYGGFDSPTVAYSVLVVAKVEKGKSKKLKSVKELLGITIMERSSFEKNPIDFLEAKGYKEVKKDLIIKLPKYSLFELENGRKRMLASAGELQKGNELALPSKYVNFLYLASHYEKLKGSPEDNEQKQLFVEQHKHYLDEIIEQISEFSKRVILADANLDKVLSAYNKHRDKPIREQAENIIHLFTLTNLGAPAAFKYFDTTIDRKRYTSTKEVLDATLIHQSITGLYETRIDLSQLGGDGGGGGGGSEAAAKGGTLNIEDEYRLHETSKGPDVPLGSTWLSDFPQAWAETGGMGLAVRQAPLIIPLKATSTPVSIKQYPMSQEARLGIKPHIQRLLDQGILVPCQSPWNTPLLPVKKPGTNDYRPVQDLREVNKRVEDIHPTVPNPYNLLSGLPPSHQWYTVLDLKDAFFCLRLHPTSQSLFAFEWRDPEMGISGQLTWTRLPQGFKNSPTLFNEALHRDLADFRIQHPDLILLQYVDDLLLAATSELDCQQGTRALLQTLGDLGYRASAKKAQICQKQVKYLGYLLKEGQRWLTEARKETVMGQPTPKTPRQLREFLGKAGFCRLFIPGFAEMAAPLYPLTKPGTLFEWGPDQQKAYQEIKQALLTAPALGLPDLTKPFELFVDEKQGYAKGVLTQKLGPWRRPVAYLSKKLDPVAAGWPPCLRMVAAIAVLTKDAGKLTMGQPLVILAPHAVEALVKQPPDRWLSNARMTHYQALLLDTDRVQFGPIVALNPATLLPLPEEGLQHDCLDILAEAHGTRPDLTDQPLPDADHTWYTDGSSFLQEGQRKAGAAVTTETEVVWAKALPAGTSAQRAELIALTQALKMAEGKKLNVYTDSRYAFATAHIHGEIYRRRGWLTSEGKEIKNKDEILALLKALFLPKRLSIIHCPGHQKGNRAEARGNRMADQAAREVATRETPETSTLLAGKRTADGSEFEKRTADGSEFESPKKKAKVE

SEQ ID NO: 2598 - protein, 2110 aa, synthetic construct
MPAAKRVKLDGGDKKYSIGLDIGTNSVGWAVITDEYKVPSKKFKVLGNTDRHSIKKNLIGALLFDSGETAEATRLKRTARRRYTRRKNRICYLQEIFSNEMAKVDDSFFHRLEESFLVEEDKKHERHPIFGNIVDEVAYHEKYPTIYHLRKKLVDSTDKADLRLIYLALAHMIKFRGHFLIEGDLNPDNSDVDKLFIQLVQTYNQLFEENPINASGVDAKAILSARLSKSRRLENLIAQLPGEKKNGLFGNLIALSLGLTPNFKSNFDLAEDAKLQLSKDTYDDDLDNLLAQIGDQYADLFLAAKNLSDAILLSDILRVNTEITKAPLSASMIKRYDEHHQDLTLLKALVRQQLPEKYKEIFFDQSKNGYAGYIDGGASQEEFYKFIKPILEKMDGTEELLVKLNREDLLRKQRTFDNGSIPHQIHLGELHAILRRQEDFYPFLKDNREKIEKILTFRIPYYVGPLARGNSRFAWMTRKSEETITPWNFEEVVDKGASAQSFIERMTNFDKNLPNEKVLPKHSLLYEYFTVYNELTKVKYVTEGMRKPAFLSGEQKKAIVDLLFKTNRKVTVKQLKEDYFKKIECFDSVEISGVEDRFNASLGTYHDLLKIIKDKDFLDNEENEDILEDIVLTLTLFEDREMIEERLKTYAHLFDDKVMKQLKRRRYTGWGRLSRKLINGIRDKQSGKTILDFLKSDGFANRNFMQLIHDDSLTFKEDIQKAQVSGQGDSLHEHIANLAGSPAIKKGILQTVKVVDELVKVMGRHKPENIVIEMARENQTTQKGQKNSRERMKRIEEGIKELGSQILKEHPVENTQLQNEKLYLYYLQNGRDMYVDQELDINRLSDYDVDHIVPQSFLKDDSIDNKVLTRSDKARGKSDNVPSEEVVKKMKNYWRQLLNAKLITQRKFDNLTKAERGGLSELDKAGFIKRQLVETRQITKHVAQILDSRMNTKYDENDKLIREVKVITLKSKLVSDFRKDFQFYKVREINNYHHAHDAYLNAVVGTALIKKYPKLESEFVYGDYKVYDVRKMIAKSEQEIGKATAKYFFYSNIMNFFKTEITLANGEIRKRPLIETNGETGEIVWDKGRDFATVRKVLSMPQVNIVKKTEVQTGGFSKESILPKRNSDKLIARKKDWDPKKYGGFDSPTVAYSVLVVAKVEKGKSKKLKSVKELLGITIMERSSFEKNPIDFLEAKGYKEVKKDLIIKLPKYSLFELENGRKRMLASAGELQKGNELALPSKYVNFLYLASHYEKLKGSPEDNEQKQLFVEQHKHYLDEIIEQISEFSKRVILADANLDKVLSAYNKHRDKPIREQAENIIHLFTLTNLGAPAAFKYFDTTIDRKRYTSTKEVLDATLIHQSITGLYETRIDLSQLGGDGGGGGGSGGGGSGGGGSGGGGSGGGGSGGTLNIEDEYRLHETSKGPDVPLGSTWLSDFPQAWAETGGMGLAVRQAPLIIPLKATSTPVSIKQYPMSQEARLGIKPHIQRLLDQGILVPCQSPWNTPLLPVKKPGTNDYRPVQDLREVNKRVEDIHPTVPNPYNLLSGLPPSHQWYTVLDLKDAFFCLRLHPTSQSLFAFEWRDPEMGISGQLTWTRLPQGFKNSPTLFNEALHRDLADFRIQHPDLILLQYVDDLLLAATSELDCQQGTRALLQTLGDLGYRASAKKAQICQKQVKYLGYLLKEGQRWLTEARKETVMGQPTPKTPRQLREFLGKAGFCRLFIPGFAEMAAPLYPLTKPGTLFEWGPDQQKAYQEIKQALLTAPALGLPDLTKPFELFVDEKQGYAKGVLTQKLGPWRRPVAYLSKKLDPVAAGWPPCLRMVAAIAVLTKDAGKLTMGQPLVILAPHAVEALVKQPPDRWLSNARMTHYQALLLDTDRVQFGPIVALNPATLLPLPEEGLQHDCLDILAEAHGTRPDLTDQPLPDADHTWYTDGSSFLQEGQRKAGAAVTTETEVVWAKALPAGTSAQRAELIALTQALKMAEGKKLNVYTDSRYAFATAHIHGEIYRRRGWLTSEGKEIKNKDEILALLKALFLPKRLSIIHCPGHQKGNRAEARGNRMADQAAREVATRETPETSTLLAGKRTADGSEFEKRTADGSEFESPKKKAKVE

SEQ ID NO: 2599 - protein, 2096 aa, synthetic construct
MPAAKRVKLDGGDKKYSIGLDIGTNSVGWAVITDEYKVPSKKFKVLGNTDRHSIKKNLIGALLFDSGETAEATRLKRTARRRYTRRKNRICYLQEIFSNEMAKVDDSFFHRLEESFLVEEDKKHERHPIFGNIVDEVAYHEKYPTIYHLRKKLVDSTDKADLRLIYLALAHMIKFRGHFLIEGDLNPDNSDVDKLFIQLVQTYNQLFEENPINASGVDAKAILSARLSKSRRLENLIAQLPGEKKNGLFGNLIALSLGLTPNFKSNFDLAEDAKLQLSKDTYDDDLDNLLAQIGDQYADLFLAAKNLSDAILLSDILRVNTEITKAPLSASMIKRYDEHHQDLTLLKALVRQQLPEKYKEIFFDQSKNGYAGYIDGGASQEEFYKFIKPILEKMDGTEELLVKLNREDLLRKQRTFDNGSIPHQIHLGELHAILRRQEDFYPFLKDNREKIEKILTFRIPYYVGPLARGNSRFAWMTRKSEETITPWNFEEVVDKGASAQSFIERMTNFDKNLPNEKVLPKHSLLYEYFTVYNELTKVKYVTEGMRKPAFLSGEQKKAIVDLLFKTNRKVTVKQLKEDYFKKIECFDSVEISGVEDRFNASLGTYHDLLKIIKDKDFLDNEENEDILEDIVLTLTLFEDREMIEERLKTYAHLFDDKVMKQLKRRRYTGWGRLSRKLINGIRDKQSGKTILDFLKSDGFANRNFMQLIHDDSLTFKEDIQKAQVSGQGDSLHEHIANLAGSPAIKKGILQTVKVVDELVKVMGRHKPENIVIEMARENQTTQKGQKNSRERMKRIEEGIKELGSQILKEHPVENTQLQNEKLYLYYLQNGRDMYVDQELDINRLSDYDVDHIVPQSFLKDDSIDNKVLTRSDKARGKSDNVPSEEVVKKMKNYWRQLLNAKLITQRKFDNLTKAERGGLSELDKAGFIKRQLVETRQITKHVAQILDSRMNTKYDENDKLIREVKVITLKSKLVSDFRKDFQFYKVREINNYHHAHDAYLNAVVGTALIKKYPKLESEFVYGDYKVYDVRKMIAKSEQEIGKATAKYFFYSNIMNFFKTEITLANGEIRKRPLIETNGETGEIVWDKGRDFATVRKVLSMPQVNIVKKTEVQTGGFSKESILPKRNSDKLIARKKDWDPKKYGGFDSPTVAYSVLVVAKVEKGKSKKLKSVKELLGITIMERSSFEKNPIDFLEAKGYKEVKKDLIIKLPKYSLFELENGRKRMLASAGELQKGNELALPSKYVNFLYLASHYEKLKGSPEDNEQKQLFVEQHKHYLDEIIEQISEFSKRVILADANLDKVLSAYNKHRDKPIREQAENIIHLFTLTNLGAPAAFKYFDTTIDRKRYTSTKEVLDATLIHQSITGLYETRIDLSQLGGDGGGSSPAPEAAAKGGTLNIEDEYRLHETSKGPDVPLGSTWLSDFPQAWAETGGMGLAVRQAPLIIPLKATSTPVSIKQYPMSQEARLGIKPHIQRLLDQGILVPCQSPWNTPLLPVKKPGTNDYRPVQDLREVNKRVEDIHPTVPNPYNLLSGLPPSHQWYTVLDLKDAFFCLRLHPTSQSLFAFEWRDPEMGISGQLTWTRLPQGFKNSPTLFNEALHRDLADFRIQHPDLILLQYVDDLLLAATSELDCQQGTRALLQTLGDLGYRASAKKAQICQKQVKYLGYLLKEGQRWLTEARKETVMGQPTPKTPRQLREFLGKAGFCRLFIPGFAEMAAPLYPLTKPGTLFEWGPDQQKAYQEIKQALLTAPALGLPDLTKPFELFVDEKQGYAKGVLTQKLGPWRRPVAYLSKKLDPVAAGWPPCLRMVAAIAVLTKDAGKLTMGQPLVILAPHAVEALVKQPPDRWLSNARMTHYQALLLDTDRVQFGPIVALNPATLLPLPEEGLQHDCLDILAEAHGTRPDLTDQPLPDADHTWYTDGSSFLQEGQRKAGAAVTTETEVVWAKALPAGTSAQRAELIALTQALKMAEGKKLNVYTDSRYAFATAHIHGEIYRRRGWLTSEGKEIKNKDEILALLKALFLPKRLSIIHCPGHQKGNRAEARGNRMADQAAREVATRETPETSTLLAGKRTADGSEFEKRTADGSEFESPKKKAKVE

SEQ ID NO: 2600 - protein, 2093 aa, synthetic construct
MPAAKRVKLDGGDKKYSIGLDIGTNSVGWAVITDEYKVPSKKFKVLGNTDRHSIKKNLIGALLFDSGETAEATRLKRTARRRYTRRKNRICYLQEIFSNEMAKVDDSFFHRLEESFLVEEDKKHERHPIFGNIVDEVAYHEKYPTIYHLRKKLVDSTDKADLRLIYLALAHMIKFRGHFLIEGDLNPDNSDVDKLFIQLVQTYNQLFEENPINASGVDAKAILSARLSKSRRLENLIAQLPGEKKNGLFGNLIALSLGLTPNFKSNFDLAEDAKLQLSKDTYDDDLDNLLAQIGDQYADLFLAAKNLSDAILLSDILRVNTEITKAPLSASMIKRYDEHHQDLTLLKALVRQQLPEKYKEIFFDQSKNGYAGYIDGGASQEEFYKFIKPILEKMDGTEELLVKLNREDLLRKQRTFDNGSIPHQIHLGELHAILRRQEDFYPFLKDNREKIEKILTFRIPYYVGPLARGNSRFAWMTRKSEETITPWNFEEVVDKGASAQSFIERMTNFDKNLPNEKVLPKHSLLYEYFTVYNELTKVKYVTEGMRKPAFLSGEQKKAIVDLLFKTNRKVTVKQLKEDYFKKIECFDSVEISGVEDRFNASLGTYHDLLKIIKDKDFLDNEENEDILEDIVLTLTLFEDREMIEERLKTYAHLFDDKVMKQLKRRRYTGWGRLSRKLINGIRDKQSGKTILDFLKSDGFANRNFMQLIHDDSLTFKEDIQKAQVSGQGDSLHEHIANLAGSPAIKKGILQTVKVVDELVKVMGRHKPENIVIEMARENQTTQKGQKNSRERMKRIEEGIKELGSQILKEHPVENTQLQNEKLYLYYLQNGRDMYVDQELDINRLSDYDVDHIVPQSFLKDDSIDNKVLTRSDKARGKSDNVPSEEVVKKMKNYWRQLLNAKLITQRKFDNLTKAERGGLSELDKAGFIKRQLVETRQITKHVAQILDSRMNTKYDENDKLIREVKVITLKSKLVSDFRKDFQFYKVREINNYHHAHDAYLNAVVGTALIKKYPKLESEFVYGDYKVYDVRKMIAKSEQEIGKATAKYFFYSNIMNFFKTEITLANGEIRKRPLIETNGETGEIVWDKGRDFATVRKVLSMPQVNIVKKTEVQTGGFSKESILPKRNSDKLIARKKDWDPKKYGGFDSPTVAYSVLVVAKVEKGKSKKLKSVKELLGITIMERSSFEKNPIDFLEAKGYKEVKKDLIIKLPKYSLFELENGRKRMLASAGELQKGNELALPSKYVNFLYLASHYEKLKGSPEDNEQKQLFVEQHKHYLDEIIEQISEFSKRVILADANLDKVLSAYNKHRDKPIREQAENIIHLFTLTNLGAPAAFKYFDTTIDRKRYTSTKEVLDATLIHQSITGLYETRIDLSQLGGDGGGGSEAAAKGGTLNIEDEYRLHETSKGPDVPLGSTWLSDFPQAWAETGGMGLAVRQAPLIIPLKATSTPVSIKQYPMSQEARLGIKPHIQRLLDQGILVPCQSPWNTPLLPVKKPGTNDYRPVQDLREVNKRVEDIHPTVPNPYNLLSGLPPSHQWYTVLDLKDAFFCLRLHPTSQSLFAFEWRDPEMGISGQLTWTRLPQGFKNSPTLFNEALHRDLADFRIQHPDLILLQYVDDLLLAATSELDCQQGTRALLQTLGDLGYRASAKKAQICQKQVKYLGYLLKEGQRWLTEARKETVMGQPTPKTPRQLREFLGKAGFCRLFIPGFAEMAAPLYPLTKPGTLFEWGPDQQKAYQEIKQALLTAPALGLPDLTKPFELFVDEKQGYAKGVLTQKLGPWRRPVAYLSKKLDPVAAGWPPCLRMVAAIAVLTKDAGKLTMGQPLVILAPHAVEALVKQPPDRWLSNARMTHYQALLLDTDRVQFGPIVALNPATLLPLPEEGLQHDCLDILAEAHGTRPDLTDQPLPDADHTWYTDGSSFLQEGQRKAGAAVTTETEVVWAKALPAGTSAQRAELIALTQALKMAEGKKLNVYTDSRYAFATAHIHGEIYRRRGWLTSEGKEIKNKDEILALLKALFLPKRLSIIHCPGHQKGNRAEARGNRMADQAAREVATRETPETSTLLAGKRTADGSEFEKRTADGSEFESPKKKAKVE

SEQ ID NO: 2601 - protein, 2094 aa, synthetic construct
MPAAKRVKLDGGDKKYSIGLDIGTNSVGWAVITDEYKVPSKKFKVLGNTDRHSIKKNLIGALLFDSGETAEATRLKRTARRRYTRRKNRICYLQEIFSNEMAKVDDSFFHRLEESFLVEEDKKHERHPIFGNIVDEVAYHEKYPTIYHLRKKLVDSTDKADLRLIYLALAHMIKFRGHFLIEGDLNPDNSDVDKLFIQLVQTYNQLFEENPINASGVDAKAILSARLSKSRRLENLIAQLPGEKKNGLFGNLIALSLGLTPNFKSNFDLAEDAKLQLSKDTYDDDLDNLLAQIGDQYADLFLAAKNLSDAILLSDILRVNTEITKAPLSASMIKRYDEHHQDLTLLKALVRQQLPEKYKEIFFDQSKNGYAGYIDGGASQEEFYKFIKPILEKMDGTEELLVKLNREDLLRKQRTFDNGSIPHQIHLGELHAILRRQEDFYPFLKDNREKIEKILTFRIPYYVGPLARGNSRFAWMTRKSEETITPWNFEEVVDKGASAQSFIERMTNFDKNLPNEKVLPKHSLLYEYFTVYNELTKVKYVTEGMRKPAFLSGEQKKAIVDLLFKTNRKVTVKQLKEDYFKKIECFDSVEISGVEDRFNASLGTYHDLLKIIKDKDFLDNEENEDILEDIVLTLTLFEDREMIEERLKTYAHLFDDKVMKQLKRRRYTGWGRLSRKLINGIRDKQSGKTILDFLKSDGFANRNFMQLIHDDSLTFKEDIQKAQVSGQGDSLHEHIANLAGSPAIKKGILQTVKVVDELVKVMGRHKPENIVIEMARENQTTQKGQKNSRERMKRIEEGIKELGSQILKEHPVENTQLQNEKLYLYYLQNGRDMYVDQELDINRLSDYDVDHIVPQSFLKDDSIDNKVLTRSDKARGKSDNVPSEEVVKKMKNYWRQLLNAKLITQRKFDNLTKAERGGLSELDKAGFIKRQLVETRQITKHVAQILDSRMNTKYDENDKLIREVKVITLKSKLVSDFRKDFQFYKVREINNYHHAHDAYLNAVVGTALIKKYPKLESEFVYGDYKVYDVRKMIAKSEQEIGKATAKYFFYSNIMNFFKTEITLANGEIRKRPLIETNGETGEIVWDKGRDFATVRKVLSMPQVNIVKKTEVQTGGFSKESILPKRNSDKLIARKKDWDPKKYGGFDSPTVAYSVLVVAKVEKGKSKKLKSVKELLGITIMERSSFEKNPIDFLEAKGYKEVKKDLIIKLPKYSLFELENGRKRMLASAGELQKGNELALPSKYVNFLYLASHYEKLKGSPEDNEQKQLFVEQHKHYLDEIIEQISEFSKRVILADANLDKVLSAYNKHRDKPIREQAENIIHLFTLTNLGAPAAFKYFDTTIDRKRYTSTKEVLDATLIHQSITGLYETRIDLSQLGGDGGGGSGGGGSSGGTLNIEDEYRLHETSKGPDVPLGSTWLSDFPQAWAETGGMGLAVRQAPLIIPLKATSTPVSIKQYPMSQEARLGIKPHIQRLLDQGILVPCQSPWNTPLLPVKKPGTNDYRPVQDLREVNKRVEDIHPTVPNPYNLLSGLPPSHQWYTVLDLKDAFFCLRLHPTSQSLFAFEWRDPEMGISGQLTWTRLPQGFKNSPTLFNEALHRDLADFRIQHPDLILLQYVDDLLLAATSELDCQQGTRALLQTLGDLGYRASAKKAQICQKQVKYLGYLLKEGQRWLTEARKETVMGQPTPKTPRQLREFLGKAGFCRLFIPGFAEMAAPLYPLTKPGTLFEWGPDQQKAYQEIKQALLTAPALGLPDLTKPFELFVDEKQGYAKGVLTQKLGPWRRPVAYLSKKLDPVAAGWPPCLRMVAAIAVLTKDAGKLTMGQPLVILAPHAVEALVKQPPDRWLSNARMTHYQALLLDTDRVQFGPIVALNPATLLPLPEEGLQHDCLDILAEAHGTRPDLTDQPLPDADHTWYTDGSSFLQEGQRKAGAAVTTETEVVWAKALPAGTSAQRAELIALTQALKMAEGKKLNVYTDSRYAFATAHIHGEIYRRRGWLTSEGKEIKNKDEILALLKALFLPKRLSIIHCPGHQKGNRAEARGNRMADQAAREVATRETPETSTLLAGKRTADGSEFEKRTADGSEFESPKKKAKVE

SEQ ID NO: 2602 - protein, 2089 aa, synthetic construct
MPAAKRVKLDGGDKKYSIGLDIGTNSVGWAVITDEYKVPSKKFKVLGNTDRHSIKKNLIGALLFDSGETAEATRLKRTARRRYTRRKNRICYLQEIFSNEMAKVDDSFFHRLEESFLVEEDKKHERHPIFGNIVDEVAYHEKYPTIYHLRKKLVDSTDKADLRLIYLALAHMIKFRGHFLIEGDLNPDNSDVDKLFIQLVQTYNQLFEENPINASGVDAKAILSARLSKSRRLENLIAQLPGEKKNGLFGNLIALSLGLTPNFKSNFDLAEDAKLQLSKDTYDDDLDNLLAQIGDQYADLFLAAKNLSDAILLSDILRVNTEITKAPLSASMIKRYDEHHQDLTLLKALVRQQLPEKYKEIFFDQSKNGYAGYIDGGASQEEFYKFIKPILEKMDGTEELLVKLNREDLLRKQRTFDNGSIPHQIHLGELHAILRRQEDFYPFLKDNREKIEKILTFRIPYYVGPLARGNSRFAWMTRKSEETITPWNFEEVVDKGASAQSFIERMTNFDKNLPNEKVLPKHSLLYEYFTVYNELTKVKYVTEGMRKPAFLSGEQKKAIVDLLFKTNRKVTVKQLKEDYFKKIECFDSVEISGVEDRFNASLGTYHDLLKIIKDKDFLDNEENEDILEDIVLTLTLFEDREMIEERLKTYAHLFDDKVMKQLKRRRYTGWGRLSRKLINGIRDKQSGKTILDFLKSDGFANRNFMQLIHDDSLTFKEDIQKAQVSGQGDSLHEHIANLAGSPAIKKGILQTVKVVDELVKVMGRHKPENIVIEMARENQTTQKGQKNSRERMKRIEEGIKELGSQILKEHPVENTQLQNEKLYLYYLQNGRDMYVDQELDINRLSDYDVDHIVPQSFLKDDSIDNKVLTRSDKARGKSDNVPSEEVVKKMKNYWRQLLNAKLITQRKFDNLTKAERGGLSELDKAGFIKRQLVETRQITKHVAQILDSRMNTKYDENDKLIREVKVITLKSKLVSDFRKDFQFYKVREINNYHHAHDAYLNAVVGTALIKKYPKLESEFVYGDYKVYDVRKMIAKSEQEIGKATAKYFFYSNIMNFFKTEITLANGEIRKRPLIETNGETGEIVWDKGRDFATVRKVLSMPQVNIVKKTEVQTGGFSKESILPKRNSDKLIARKKDWDPKKYGGFDSPTVAYSVLVVAKVEKGKSKKLKSVKELLGITIMERSSFEKNPIDFLEAKGYKEVKKDLIIKLPKYSLFELENGRKRMLASAGELQKGNELALPSKYVNFLYLASHYEKLKGSPEDNEQKQLFVEQHKHYLDEIIEQISEFSKRVILADANLDKVLSAYNKHRDKPIREQAENIIHLFTLTNLGAPAAFKYFDTTIDRKRYTSTKEVLDATLIHQSITGLYETRIDLSQLGGDGGGGGGGGTLNIEDEYRLHETSKGPDVPLGSTWLSDFPQAWAETGGMGLAVRQAPLIIPLKATSTPVSIKQYPMSQEARLGIKPHIQRLLDQGILVPCQSPWNTPLLPVKKPGTNDYRPVQDLREVNKRVEDIHPTVPNPYNLLSGLPPSHQWYTVLDLKDAFFCLRLHPTSQSLFAFEWRDPEMGISGQLTWTRLPQGFKNSPTLFNEALHRDLADFRIQHPDLILLQYVDDLLLAATSELDCQQGTRALLQTLGDLGYRASAKKAQICQKQVKYLGYLLKEGQRWLTEARKETVMGQPTPKTPRQLREFLGKAGFCRLFIPGFAEMAAPLYPLTKPGTLFEWGPDQQKAYQEIKQALLTAPALGLPDLTKPFELFVDEKQGYAKGVLTQKLGPWRRPVAYLSKKLDPVAAGWPPCLRMVAAIAVLTKDAGKLTMGQPLVILAPHAVEALVKQPPDRWLSNARMTHYQALLLDTDRVQFGPIVALNPATLLPLPEEGLQHDCLDILAEAHGTRPDLTDQPLPDADHTWYTDGSSFLQEGQRKAGAAVTTETEVVWAKALPAGTSAQRAELIALTQALKMAEGKKLNVYTDSRYAFATAHIHGEIYRRRGWLTSEGKEIKNKDEILALLKALFLPKRLSIIHCPGHQKGNRAEARGNRMADQAAREVATRETPETSTLLAGKRTADGSEFEKRTADGSEFESPKKKAKVE

SEQ ID NO: 2603 - protein, 2096 aa, synthetic construct
MPAAKRVKLDGGDKKYSIGLDIGTNSVGWAVITDEYKVPSKKFKVLGNTDRHSIKKNLIGALLFDSGETAEATRLKRTARRRYTRRKNRICYLQEIFSNEMAKVDDSFFHRLEESFLVEEDKKHERHPIFGNIVDEVAYHEKYPTIYHLRKKLVDSTDKADLRLIYLALAHMIKFRGHFLIEGDLNPDNSDVDKLFIQLVQTYNQLFEENPINASGVDAKAILSARLSKSRRLENLIAQLPGEKKNGLFGNLIALSLGLTPNFKSNFDLAEDAKLQLSKDTYDDDLDNLLAQIGDQYADLFLAAKNLSDAILLSDILRVNTEITKAPLSASMIKRYDEHHQDLTLLKALVRQQLPEKYKEIFFDQSKNGYAGYIDGGASQEEFYKFIKPILEKMDGTEELLVKLNREDLLRKQRTFDNGSIPHQIHLGELHAILRRQEDFYPFLKDNREKIEKILTFRIPYYVGPLARGNSRFAWMTRKSEETITPWNFEEVVDKGASAQSFIERMTNFDKNLPNEKVLPKHSLLYEYFTVYNELTKVKYVTEGMRKPAFLSGEQKKAIVDLLFKTNRKVTVKQLKEDYFKKIECFDSVEISGVEDRFNASLGTYHDLLKIIKDKDFLDNEENEDILEDIVLTLTLFEDREMIEERLKTYAHLFDDKVMKQLKRRRYTGWGRLSRKLINGIRDKQSGKTILDFLKSDGFANRNFMQLIHDDSLTFKEDIQKAQVSGQGDSLHEHIANLAGSPAIKKGILQTVKVVDELVKVMGRHKPENIVIEMARENQTTQKGQKNSRERMKRIEEGIKELGSQILKEHPVENTQLQNEKLYLYYLQNGRDMYVDQELDINRLSDYDVDHIVPQSFLKDDSIDNKVLTRSDKARGKSDNVPSEEVVKKMKNYWRQLLNAKLITQRKFDNLTKAERGGLSELDKAGFIKRQLVETRQITKHVAQILDSRMNTKYDENDKLIREVKVITLKSKLVSDFRKDFQFYKVREINNYHHAHDAYLNAVVGTALIKKYPKLESEFVYGDYKVYDVRKMIAKSEQEIGKATAKYFFYSNIMNFFKTEITLANGEIRKRPLIETNGETGEIVWDKGRDFATVRKVLSMPQVNIVKKTEVQTGGFSKESILPKRNSDKLIARKKDWDPKKYGGFDSPTVAYSVLVVAKVEKGKSKKLKSVKELLGITIMERSSFEKNPIDFLEAKGYKEVKKDLIIKLPKYSLFELENGRKRMLASAGELQKGNELALPSKYVNFLYLASHYEKLKGSPEDNEQKQLFVEQHKHYLDEIIEQISEFSKRVILADANLDKVLSAYNKHRDKPIREQAENIIHLFTLTNLGAPAAFKYFDTTIDRKRYTSTKEVLDATLIHQSITGLYETRIDLSQLGGDGGGGSGGGEAAAKGGTLNIEDEYRLHETSKGPDVPLGSTWLSDFPQAWAETGGMGLAVRQAPLIIPLKATSTPVSIKQYPMSQEARLGIKPHIQRLLDQGILVPCQSPWNTPLLPVKKPGTNDYRPVQDLREVNKRVEDIHPTVPNPYNLLSGLPPSHQWYTVLDLKDAFFCLRLHPTSQSLFAFEWRDPEMGISGQLTWTRLPQGFKNSPTLFNEALHRDLADFRIQHPDLILLQYVDDLLLAATSELDCQQGTRALLQTLGDLGYRASAKKAQICQKQVKYLGYLLKEGQRWLTEARKETVMGQPTPKTPRQLREFLGKAGFCRLFIPGFAEMAAPLYPLTKPGTLFEWGPDQQKAYQEIKQALLTAPALGLPDLTKPFELFVDEKQGYAKGVLTQKLGPWRRPVAYLSKKLDPVAAGWPPCLRMVAAIAVLTKDAGKLTMGQPLVILAPHAVEALVKQPPDRWLSNARMTHYQALLLDTDRVQFGPIVALNPATLLPLPEEGLQHDCLDILAEAHGTRPDLTDQPLPDADHTWYTDGSSFLQEGQRKAGAAVTTETEVVWAKALPAGTSAQRAELIALTQALKMAEGKKLNVYTDSRYAFATAHIHGEIYRRRGWLTSEGKEIKNKDEILALLKALFLPKRLSIIHCPGHQKGNRAEARGNRMADQAAREVATRETPETSTLLAGKRTADGSEFEKRTADGSEFESPKKKAKVE

SEQ ID NO: 2604 - protein, 2091 aa, synthetic construct
MPAAKRVKLDGGDKKYSIGLDIGTNSVGWAVITDEYKVPSKKFKVLGNTDRHSIKKNLIGALLFDSGETAEATRLKRTARRRYTRRKNRICYLQEIFSNEMAKVDDSFFHRLEESFLVEEDKKHERHPIFGNIVDEVAYHEKYPTIYHLRKKLVDSTDKADLRLIYLALAHMIKFRGHFLIEGDLNPDNSDVDKLFIQLVQTYNQLFEENPINASGVDAKAILSARLSKSRRLENLIAQLPGEKKNGLFGNLIALSLGLTPNFKSNFDLAEDAKLQLSKDTYDDDLDNLLAQIGDQYADLFLAAKNLSDAILLSDILRVNTEITKAPLSASMIKRYDEHHQDLTLLKALVRQQLPEKYKEIFFDQSKNGYAGYIDGGASQEEFYKFIKPILEKMDGTEELLVKLNREDLLRKQRTFDNGSIPHQIHLGELHAILRRQEDFYPFLKDNREKIEKILTFRIPYYVGPLARGNSRFAWMTRKSEETITPWNFEEVVDKGASAQSFIERMTNFDKNLPNEKVLPKHSLLYEYFTVYNELTKVKYVTEGMRKPAFLSGEQKKAIVDLLFKTNRKVTVKQLKEDYFKKIECFDSVEISGVEDRFNASLGTYHDLLKIIKDKDFLDNEENEDILEDIVLTLTLFEDREMIEERLKTYAHLFDDKVMKQLKRRRYTGWGRLSRKLINGIRDKQSGKTILDFLKSDGFANRNFMQLIHDDSLTFKEDIQKAQVSGQGDSLHEHIANLAGSPAIKKGILQTVKVVDELVKVMGRHKPENIVIEMARENQTTQKGQKNSRERMKRIEEGIKELGSQILKEHPVENTQLQNEKLYLYYLQNGRDMYVDQELDINRLSDYDVDHIVPQSFLKDDSIDNKVLTRSDKARGKSDNVPSEEVVKKMKNYWRQLLNAKLITQRKFDNLTKAERGGLSELDKAGFIKRQLVETRQITKHVAQILDSRMNTKYDENDKLIREVKVITLKSKLVSDFRKDFQFYKVREINNYHHAHDAYLNAVVGTALIKKYPKLESEFVYGDYKVYDVRKMIAKSEQEIGKATAKYFFYSNIMNFFKTEITLANGEIRKRPLIETNGETGEIVWDKGRDFATVRKVLSMPQVNIVKKTEVQTGGFSKESILPKRNSDKLIARKKDWDPKKYGGFDSPTVAYSVLVVAKVEKGKSKKLKSVKELLGITIMERSSFEKNPIDFLEAKGYKEVKKDLIIKLPKYSLFELENGRKRMLASAGELQKGNELALPSKYVNFLYLASHYEKLKGSPEDNEQKQLFVEQHKHYLDEIIEQISEFSKRVILADANLDKVLSAYNKHRDKPIREQAENIIHLFTLTNLGAPAAFKYFDTTIDRKRYTSTKEVLDATLIHQSITGLYETRIDLSQLGGDGGGGSGGSGGTLNIEDEYRLHETSKGPDVPLGSTWLSDFPQAWAETGGMGLAVRQAPLIIPLKATSTPVSIKQYPMSQEARLGIKPHIQRLLDQGILVPCQSPWNTPLLPVKKPGTNDYRPVQDLREVNKRVEDIHPTVPNPYNLLSGLPPSHQWYTVLDLKDAFFCLRLHPTSQSLFAFEWRDPEMGISGQLTWTRLPQGFKNSPTLFNEALHRDLADFRIQHPDLILLQYVDDLLLAATSELDCQQGTRALLQTLGDLGYRASAKKAQICQKQVKYLGYLLKEGQRWLTEARKETVMGQPTPKTPRQLREFLGKAGFCRLFIPGFAEMAAPLYPLTKPGTLFEWGPDQQKAYQEIKQALLTAPALGLPDLTKPFELFVDEKQGYAKGVLTQKLGPWRRPVAYLSKKLDPVAAGWPPCLRMVAAIAVLTKDAGKLTMGQPLVILAPHAVEALVKQPPDRWLSNARMTHYQALLLDTDRVQFGPIVALNPATLLPLPEEGLQHDCLDILAEAHGTRPDLTDQPLPDADHTWYTDGSSFLQEGQRKAGAAVTTETEVVWAKALPAGTSAQRAELIALTQALKMAEGKKLNVYTDSRYAFATAHIHGEIYRRRGWLTSEGKEIKNKDEILALLKALFLPKRLSIIHCPGHQKGNRAEARGNRMADQAAREVATRETPETSTLLAGKRTADGSEFEKRTADGSEFESPKKKAKVE

SEQ ID NO: 2605 - protein, 2094 aa, synthetic construct
MPAAKRVKLDGGDKKYSIGLDIGTNSVGWAVITDEYKVPSKKFKVLGNTDRHSIKKNLIGALLFDSGETAEATRLKRTARRRYTRRKNRICYLQEIFSNEMAKVDDSFFHRLEESFLVEEDKKHERHPIFGNIVDEVAYHEKYPTIYHLRKKLVDSTDKADLRLIYLALAHMIKFRGHFLIEGDLNPDNSDVDKLFIQLVQTYNQLFEENPINASGVDAKAILSARLSKSRRLENLIAQLPGEKKNGLFGNLIALSLGLTPNFKSNFDLAEDAKLQLSKDTYDDDLDNLLAQIGDQYADLFLAAKNLSDAILLSDILRVNTEITKAPLSASMIKRYDEHHQDLTLLKALVRQQLPEKYKEIFFDQSKNGYAGYIDGGASQEEFYKFIKPILEKMDGTEELLVKLNREDLLRKQRTFDNGSIPHQIHLGELHAILRRQEDFYPFLKDNREKIEKILTFRIPYYVGPLARGNSRFAWMTRKSEETITPWNFEEVVDKGASAQSFIERMTNFDKNLPNEKVLPKHSLLYEYFTVYNELTKVKYVTEGMRKPAFLSGEQKKAIVDLLFKTNRKVTVKQLKEDYFKKIECFDSVEISGVEDRFNASLGTYHDLLKIIKDKDFLDNEENEDILEDIVLTLTLFEDREMIEERLKTYAHLFDDKVMKQLKRRRYTGWGRLSRKLINGIRDKQSGKTILDFLKSDGFANRNFMQLIHDDSLTFKEDIQKAQVSGQGDSLHEHIANLAGSPAIKKGILQTVKVVDELVKVMGRHKPENIVIEMARENQTTQKGQKNSRERMKRIEEGIKELGSQILKEHPVENTQLQNEKLYLYYLQNGRDMYVDQELDINRLSDYDVDHIVPQSFLKDDSIDNKVLTRSDKARGKSDNVPSEEVVKKMKNYWRQLLNAKLITQRKFDNLTKAERGGLSELDKAGFIKRQLVETRQITKHVAQILDSRMNTKYDENDKLIREVKVITLKSKLVSDFRKDFQFYKVREINNYHHAHDAYLNAVVGTALIKKYPKLESEFVYGDYKVYDVRKMIAKSEQEIGKATAKYFFYSNIMNFFKTEITLANGEIRKRPLIETNGETGEIVWDKGRDFATVRKVLSMPQVNIVKKTEVQTGGFSKESILPKRNSDKLIARKKDWDPKKYGGFDSPTVAYSVLVVAKVEKGKSKKLKSVKELLGITIMERSSFEKNPIDFLEAKGYKEVKKDLIIKLPKYSLFELENGRKRMLASAGELQKGNELALPSKYVNFLYLASHYEKLKGSPEDNEQKQLFVEQHKHYLDEIIEQISEFSKRVILADANLDKVLSAYNKHRDKPIREQAENIIHLFTLTNLGAPAAFKYFDTTIDRKRYTSTKEVLDATLIHQSITGLYETRIDLSQLGGDGGGGGGGSGSSGGTLNIEDEYRLHETSKGPDVPLGSTWLSDFPQAWAETGGMGLAVRQAPLIIPLKATSTPVSIKQYPMSQEARLGIKPHIQRLLDQGILVPCQSPWNTPLLPVKKPGTNDYRPVQDLREVNKRVEDIHPTVPNPYNLLSGLPPSHQWYTVLDLKDAFFCLRLHPTSQSLFAFEWRDPEMGISGQLTWTRLPQGFKNSPTLFNEALHRDLADFRIQHPDLILLQYVDDLLLAATSELDCQQGTRALLQTLGDLGYRASAKKAQICQKQVKYLGYLLKEGQRWLTEARKETVMGQPTPKTPRQLREFLGKAGFCRLFIPGFAEMAAPLYPLTKPGTLFEWGPDQQKAYQEIKQALLTAPALGLPDLTKPFELFVDEKQGYAKGVLTQKLGPWRRPVAYLSKKLDPVAAGWPPCLRMVAAIAVLTKDAGKLTMGQPLVILAPHAVEALVKQPPDRWLSNARMTHYQALLLDTDRVQFGPIVALNPATLLPLPEEGLQHDCLDILAEAHGTRPDLTDQPLPDADHTWYTDGSSFLQEGQRKAGAAVTTETEVVWAKALPAGTSAQRAELIALTQALKMAEGKKLNVYTDSRYAFATAHIHGEIYRRRGWLTSEGKEIKNKDEILALLKALFLPKRLSIIHCPGHQKGNRAEARGNRMADQAAREVATRETPETSTLLAGKRTADGSEFEKRTADGSEFESPKKKAKVE

SEQ ID NO: 2606 - protein, 2091 aa, synthetic construct
MPAAKRVKLDGGDKKYSIGLDIGTNSVGWAVITDEYKVPSKKFKVLGNTDRHSIKKNLIGALLFDSGETAEATRLKRTARRRYTRRKNRICYLQEIFSNEMAKVDDSFFHRLEESFLVEEDKKHERHPIFGNIVDEVAYHEKYPTIYHLRKKLVDSTDKADLRLIYLALAHMIKFRGHFLIEGDLNPDNSDVDKLFIQLVQTYNQLFEENPINASGVDAKAILSARLSKSRRLENLIAQLPGEKKNGLFGNLIALSLGLTPNFKSNFDLAEDAKLQLSKDTYDDDLDNLLAQIGDQYADLFLAAKNLSDAILLSDILRVNTEITKAPLSASMIKRYDEHHQDLTLLKALVRQQLPEKYKEIFFDQSKNGYAGYIDGGASQEEFYKFIKPILEKMDGTEELLVKLNREDLLRKQRTFDNGSIPHQIHLGELHAILRRQEDFYPFLKDNREKIEKILTFRIPYYVGPLARGNSRFAWMTRKSEETITPWNFEEVVDKGASAQSFIERMTNFDKNLPNEKVLPKHSLLYEYFTVYNELTKVKYVTEGMRKPAFLSGEQKKAIVDLLFKTNRKVTVKQLKEDYFKKIECFDSVEISGVEDRFNASLGTYHDLLKIIKDKDFLDNEENEDILEDIVLTLTLFEDREMIEERLKTYAHLFDDKVMKQLKRRRYTGWGRLSRKLINGIRDKQSGKTILDFLKSDGFANRNFMQLIHDDSLTFKEDIQKAQVSGQGDSLHEHIANLAGSPAIKKGILQTVKVVDELVKVMGRHKPENIVIEMARENQTTQKGQKNSRERMKRIEEGIKELGSQILKEHPVENTQLQNEKLYLYYLQNGRDMYVDQELDINRLSDYDVDHIVPQSFLKDDSIDNKVLTRSDKARGKSDNVPSEEVVKKMKNYWRQLLNAKLITQRKFDNLTKAERGGLSELDKAGFIKRQLVETRQITKHVAQILDSRMNTKYDENDKLIREVKVITLKSKLVSDFRKDFQFYKVREINNYHHAHDAYLNAVVGTALIKKYPKLESEFVYGDYKVYDVRKMIAKSEQEIGKATAKYFFYSNIMNFFKTEITLANGEIRKRPLIETNGETGEIVWDKGRDFATVRKVLSMPQVNIVKKTEVQTGGFSKESILPKRNSDKLIARKKDWDPKKYGGFDSPTVAYSVLVVAKVEKGKSKKLKSVKELLGITIMERSSFEKNPIDFLEAKGYKEVKKDLIIKLPKYSLFELENGRKRMLASAGELQKGNELALPSKYVNFLYLASHYEKLKGSPEDNEQKQLFVEQHKHYLDEIIEQISEFSKRVILADANLDKVLSAYNKHRDKPIREQAENIIHLFTLTNLGAPAAFKYFDTTIDRKRYTSTKEVLDATLIHQSITGLYETRIDLSQLGGDGGPAPGSSGGTLNIEDEYRLHETSKGPDVPLGSTWLSDFPQAWAETGGMGLAVRQAPLIIPLKATSTPVSIKQYPMSQEARLGIKPHIQRLLDQGILVPCQSPWNTPLLPVKKPGTNDYRPVQDLREVNKRVEDIHPTVPNPYNLLSGLPPSHQWYTVLDLKDAFFCLRLHPTSQSLFAFEWRDPEMGISGQLTWTRLPQGFKNSPTLFNEALHRDLADFRIQHPDLILLQYVDDLLLAATSELDCQQGTRALLQTLGDLGYRASAKKAQICQKQVKYLGYLLKEGQRWLTEARKETVMGQPTPKTPRQLREFLGKAGFCRLFIPGFAEMAAPLYPLTKPGTLFEWGPDQQKAYQEIKQALLTAPALGLPDLTKPFELFVDEKQGYAKGVLTQKLGPWRRPVAYLSKKLDPVAAGWPPCLRMVAAIAVLTKDAGKLTMGQPLVILAPHAVEALVKQPPDRWLSNARMTHYQALLLDTDRVQFGPIVALNPATLLPLPEEGLQHDCLDILAEAHGTRPDLTDQPLPDADHTWYTDGSSFLQEGQRKAGAAVTTETEVVWAKALPAGTSAQRAELIALTQALKMAEGKKLNVYTDSRYAFATAHIHGEIYRRRGWLTSEGKEIKNKDEILALLKALFLPKRLSIIHCPGHQKGNRAEARGNRMADQAAREVATRETPETSTLLAGKRTADGSEFEKRTADGSEFESPKKKAKVE

SEQ ID NO: 2607 - protein, 2093 aa, synthetic construct
MPAAKRVKLDGGDKKYSIGLDIGTNSVGWAVITDEYKVPSKKFKVLGNTDRHSIKKNLIGALLFDSGETAEATRLKRTARRRYTRRKNRICYLQEIFSNEMAKVDDSFFHRLEESFLVEEDKKHERHPIFGNIVDEVAYHEKYPTIYHLRKKLVDSTDKADLRLIYLALAHMIKFRGHFLIEGDLNPDNSDVDKLFIQLVQTYNQLFEENPINASGVDAKAILSARLSKSRRLENLIAQLPGEKKNGLFGNLIALSLGLTPNFKSNFDLAEDAKLQLSKDTYDDDLDNLLAQIGDQYADLFLAAKNLSDAILLSDILRVNTEITKAPLSASMIKRYDEHHQDLTLLKALVRQQLPEKYKEIFFDQSKNGYAGYIDGGASQEEFYKFIKPILEKMDGTEELLVKLNREDLLRKQRTFDNGSIPHQIHLGELHAILRRQEDFYPFLKDNREKIEKILTFRIPYYVGPLARGNSRFAWMTRKSEETITPWNFEEVVDKGASAQSFIERMTNFDKNLPNEKVLPKHSLLYEYFTVYNELTKVKYVTEGMRKPAFLSGEQKKAIVDLLFKTNRKVTVKQLKEDYFKKIECFDSVEISGVEDRFNASLGTYHDLLKIIKDKDFLDNEENEDILEDIVLTLTLFEDREMIEERLKTYAHLFDDKVMKQLKRRRYTGWGRLSRKLINGIRDKQSGKTILDFLKSDGFANRNFMQLIHDDSLTFKEDIQKAQVSGQGDSLHEHIANLAGSPAIKKGILQTVKVVDELVKVMGRHKPENIVIEMARENQTTQKGQKNSRERMKRIEEGIKELGSQILKEHPVENTQLQNEKLYLYYLQNGRDMYVDQELDINRLSDYDVDHIVPQSFLKDDSIDNKVLTRSDKARGKSDNVPSEEVVKKMKNYWRQLLNAKLITQRKFDNLTKAERGGLSELDKAGFIKRQLVETRQITKHVAQILDSRMNTKYDENDKLIREVKVITLKSKLVSDFRKDFQFYKVREINNYHHAHDAYLNAVVGTALIKKYPKLESEFVYGDYKVYDVRKMIAKSEQEIGKATAKYFFYSNIMNFFKTEITLANGEIRKRPLIETNGETGEIVWDKGRDFATVRKVLSMPQVNIVKKTEVQTGGFSKESILPKRNSDKLIARKKDWDPKKYGGFDSPTVAYSVLVVAKVEKGKSKKLKSVKELLGITIMERSSFEKNPIDFLEAKGYKEVKKDLIIKLPKYSLFELENGRKRMLASAGELQKGNELALPSKYVNFLYLASHYEKLKGSPEDNEQKQLFVEQHKHYLDEIIEQISEFSKRVILADANLDKVLSAYNKHRDKPIREQAENIIHLFTLTNLGAPAAFKYFDTTIDRKRYTSTKEVLDATLIHQSITGLYETRIDLSQLGGDGGGGGEAAAKGGTLNIEDEYRLHETSKGPDVPLGSTWLSDFPQAWAETGGMGLAVRQAPLIIPLKATSTPVSIKQYPMSQEARLGIKPHIQRLLDQGILVPCQSPWNTPLLPVKKPGTNDYRPVQDLREVNKRVEDIHPTVPNPYNLLSGLPPSHQWYTVLDLKDAFFCLRLHPTSQSLFAFEWRDPEMGISGQLTWTRLPQGFKNSPTLFNEALHRDLADFRIQHPDLILLQYVDDLLLAATSELDCQQGTRALLQTLGDLGYRASAKKAQICQKQVKYLGYLLKEGQRWLTEARKETVMGQPTPKTPRQLREFLGKAGFCRLFIPGFAEMAAPLYPLTKPGTLFEWGPDQQKAYQEIKQALLTAPALGLPDLTKPFELFVDEKQGYAKGVLTQKLGPWRRPVAYLSKKLDPVAAGWPPCLRMVAAIAVLTKDAGKLTMGQPLVILAPHAVEALVKQPPDRWLSNARMTHYQALLLDTDRVQFGPIVALNPATLLPLPEEGLQHDCLDILAEAHGTRPDLTDQPLPDADHTWYTDGSSFLQEGQRKAGAAVTTETEVVWAKALPAGTSAQRAELIALTQALKMAEGKKLNVYTDSRYAFATAHIHGEIYRRRGWLTSEGKEIKNKDEILALLKALFLPKRLSIIHCPGHQKGNRAEARGNRMADQAAREVATRETPETSTLLAGKRTADGSEFEKRTADGSEFESPKKKAKVE

SEQ ID NO: 2608 - protein, 2096 aa, synthetic construct
MPAAKRVKLDGGDKKYSIGLDIGTNSVGWAVITDEYKVPSKKFKVLGNTDRHSIKKNLIGALLFDSGETAEATRLKRTARRRYTRRKNRICYLQEIFSNEMAKVDDSFFHRLEESFLVEEDKKHERHPIFGNIVDEVAYHEKYPTIYHLRKKLVDSTDKADLRLIYLALAHMIKFRGHFLIEGDLNPDNSDVDKLFIQLVQTYNQLFEENPINASGVDAKAILSARLSKSRRLENLIAQLPGEKKNGLFGNLIALSLGLTPNFKSNFDLAEDAKLQLSKDTYDDDLDNLLAQIGDQYADLFLAAKNLSDAILLSDILRVNTEITKAPLSASMIKRYDEHHQDLTLLKALVRQQLPEKYKEIFFDQSKNGYAGYIDGGASQEEFYKFIKPILEKMDGTEELLVKLNREDLLRKQRTFDNGSIPHQIHLGELHAILRRQEDFYPFLKDNREKIEKILTFRIPYYVGPLARGNSRFAWMTRKSEETITPWNFEEVVDKGASAQSFIERMTNFDKNLPNEKVLPKHSLLYEYFTVYNELTKVKYVTEGMRKPAFLSGEQKKAIVDLLFKTNRKVTVKQLKEDYFKKIECFDSVEISGVEDRFNASLGTYHDLLKIIKDKDFLDNEENEDILEDIVLTLTLFEDREMIEERLKTYAHLFDDKVMKQLKRRRYTGWGRLSRKLINGIRDKQSGKTILDFLKSDGFANRNFMQLIHDDSLTFKEDIQKAQVSGQGDSLHEHIANLAGSPAIKKGILQTVKVVDELVKVMGRHKPENIVIEMARENQTTQKGQKNSRERMKRIEEGIKELGSQILKEHPVENTQLQNEKLYLYYLQNGRDMYVDQELDINRLSDYDVDHIVPQSFLKDDSIDNKVLTRSDKARGKSDNVPSEEVVKKMKNYWRQLLNAKLITQRKFDNLTKAERGGLSELDKAGFIKRQLVETRQITKHVAQILDSRMNTKYDENDKLIREVKVITLKSKLVSDFRKDFQFYKVREINNYHHAHDAYLNAVVGTALIKKYPKLESEFVYGDYKVYDVRKMIAKSEQEIGKATAKYFFYSNIMNFFKTEITLANGEIRKRPLIETNGETGEIVWDKGRDFATVRKVLSMPQVNIVKKTEVQTGGFSKESILPKRNSDKLIARKKDWDPKKYGGFDSPTVAYSVLVVAKVEKGKSKKLKSVKELLGITIMERSSFEKNPIDFLEAKGYKEVKKDLIIKLPKYSLFELENGRKRMLASAGELQKGNELALPSKYVNFLYLASHYEKLKGSPEDNEQKQLFVEQHKHYLDEIIEQISEFSKRVILADANLDKVLSAYNKHRDKPIREQAENIIHLFTLTNLGAPAAFKYFDTTIDRKRYTSTKEVLDATLIHQSITGLYETRIDLSQLGGDGGGGSEAAAKGSSGGTLNIEDEYRLHETSKGPDVPLGSTWLSDFPQAWAETGGMGLAVRQAPLIIPLKATSTPVSIKQYPMSQEARLGIKPHIQRLLDQGILVPCQSPWNTPLLPVKKPGTNDYRPVQDLREVNKRVEDIHPTVPNPYNLLSGLPPSHQWYTVLDLKDAFFCLRLHPTSQSLFAFEWRDPEMGISGQLTWTRLPQGFKNSPTLFNEALHRDLADFRIQHPDLILLQYVDDLLLAATSELDCQQGTRALLQTLGDLGYRASAKKAQICQKQVKYLGYLLKEGQRWLTEARKETVMGQPTPKTPRQLREFLGKAGFCRLFIPGFAEMAAPLYPLTKPGTLFEWGPDQQKAYQEIKQALLTAPALGLPDLTKPFELFVDEKQGYAKGVLTQKLGPWRRPVAYLSKKLDPVAAGWPPCLRMVAAIAVLTKDAGKLTMGQPLVILAPHAVEALVKQPPDRWLSNARMTHYQALLLDTDRVQFGPIVALNPATLLPLPEEGLQHDCLDILAEAHGTRPDLTDQPLPDADHTWYTDGSSFLQEGQRKAGAAVTTETEVVWAKALPAGTSAQRAELIALTQALKMAEGKKLNVYTDSRYAFATAHIHGEIYRRRGWLTSEGKEIKNKDEILALLKALFLPKRLSIIHCPGHQKGNRAEARGNRMADQAAREVATRETPETSTLLAGKRTADGSEFEKRTADGSEFESPKKKAKVE

SEQ ID NO: 2609 - protein, 2118 aa, synthetic construct
MPAAKRVKLDGGDKKYSIGLDIGTNSVGWAVITDEYKVPSKKFKVLGNTDRHSIKKNLIGALLFDSGETAEATRLKRTARRRYTRRKNRICYLQEIFSNEMAKVDDSFFHRLEESFLVEEDKKHERHPIFGNIVDEVAYHEKYPTIYHLRKKLVDSTDKADLRLIYLALAHMIKFRGHFLIEGDLNPDNSDVDKLFIQLVQTYNQLFEENPINASGVDAKAILSARLSKSRRLENLIAQLPGEKKNGLFGNLIALSLGLTPNFKSNFDLAEDAKLQLSKDTYDDDLDNLLAQIGDQYADLFLAAKNLSDAILLSDILRVNTEITKAPLSASMIKRYDEHHQDLTLLKALVRQQLPEKYKEIFFDQSKNGYAGYIDGGASQEEFYKFIKPILEKMDGTEELLVKLNREDLLRKQRTFDNGSIPHQIHLGELHAILRRQEDFYPFLKDNREKIEKILTFRIPYYVGPLARGNSRFAWMTRKSEETITPWNFEEVVDKGASAQSFIERMTNFDKNLPNEKVLPKHSLLYEYFTVYNELTKVKYVTEGMRKPAFLSGEQKKAIVDLLFKTNRKVTVKQLKEDYFKKIECFDSVEISGVEDRFNASLGTYHDLLKIIKDKDFLDNEENEDILEDIVLTLTLFEDREMIEERLKTYAHLFDDKVMKQLKRRRYTGWGRLSRKLINGIRDKQSGKTILDFLKSDGFANRNFMQLIHDDSLTFKEDIQKAQVSGQGDSLHEHIANLAGSPAIKKGILQTVKVVDELVKVMGRHKPENIVIEMARENQTTQKGQKNSRERMKRIEEGIKELGSQILKEHPVENTQLQNEKLYLYYLQNGRDMYVDQELDINRLSDYDVDHIVPQSFLKDDSIDNKVLTRSDKARGKSDNVPSEEVVKKMKNYWRQLLNAKLITQRKFDNLTKAERGGLSELDKAGFIKRQLVETRQITKHVAQILDSRMNTKYDENDKLIREVKVITLKSKLVSDFRKDFQFYKVREINNYHHAHDAYLNAVVGTALIKKYPKLESEFVYGDYKVYDVRKMIAKSEQEIGKATAKYFFYSNIMNFFKTEITLANGEIRKRPLIETNGETGEIVWDKGRDFATVRKVLSMPQVNIVKKTEVQTGGFSKESILPKRNSDKLIARKKDWDPKKYGGFDSPTVAYSVLVVAKVEKGKSKKLKSVKELLGITIMERSSFEKNPIDFLEAKGYKEVKKDLIIKLPKYSLFELENGRKRMLASAGELQKGNELALPSKYVNFLYLASHYEKLKGSPEDNEQKQLFVEQHKHYLDEIIEQISEFSKRVILADANLDKVLSAYNKHRDKPIREQAENIIHLFTLTNLGAPAAFKYFDTTIDRKRYTSTKEVLDATLIHQSITGLYETRIDLSQLGGDGGSGGSSGGSSGSETPGTSESATPESSGGSSGGSSGGTLNIEDEYRLHETSKGPDVPLGSTWLSDFPQAWAETGGMGLAVRQAPLIIPLKATSTPVSIKQYPMSQEARLGIKPHIQRLLDQGILVPCQSPWNTPLLPVKKPGTNDYRPVQDLREVNKRVEDIHPTVPNPYNLLSGLPPSHQWYTVLDLKDAFFCLRLHPTSQSLFAFEWRDPEMGISGQLTWTRLPQGFKNSPTLFNEALHRDLADFRIQHPDLILLQYVDDLLLAATSELDCQQGTRALLQTLGDLGYRASAKKAQICQKQVKYLGYLLKEGQRWLTEARKETVMGQPTPKTPRQLREFLGKAGFCRLFIPGFAEMAAPLYPLTKPGTLFEWGPDQQKAYQEIKQALLTAPALGLPDLTKPFELFVDEKQGYAKGVLTQKLGPWRRPVAYLSKKLDPVAAGWPPCLRMVAAIAVLTKDAGKLTMGQPLVILAPHAVEALVKQPPDRWLSNARMTHYQALLLDTDRVQFGPIVALNPATLLPLPEEGLQHDCLDILAEAHGTRPDLTDQPLPDADHTWYTDGSSFLQEGQRKAGAAVTTETEVVWAKALPAGTSAQRAELIALTQALKMAEGKKLNVYTDSRYAFATAHIHGEIYRRRGWLTSEGKEIKNKDEILALLKALFLPKRLSIIHCPGHQKGNRAEARGNRMADQAAREVATRETPETSTLLAGKRTADGSEFEKRTADGSEFESPKKKAKVE

SEQ ID NO: 2610 - protein, 2125 aa, synthetic construct
MPAAKRVKLDGGDKKYSIGLDIGTNSVGWAVITDEYKVPSKKFKVLGNTDRHSIKKNLIGALLFDSGETAEATRLKRTARRRYTRRKNRICYLQEIFSNEMAKVDDSFFHRLEESFLVEEDKKHERHPIFGNIVDEVAYHEKYPTIYHLRKKLVDSTDKADLRLIYLALAHMIKFRGHFLIEGDLNPDNSDVDKLFIQLVQTYNQLFEENPINASGVDAKAILSARLSKSRRLENLIAQLPGEKKNGLFGNLIALSLGLTPNFKSNFDLAEDAKLQLSKDTYDDDLDNLLAQIGDQYADLFLAAKNLSDAILLSDILRVNTEITKAPLSASMIKRYDEHHQDLTLLKALVRQQLPEKYKEIFFDQSKNGYAGYIDGGASQEEFYKFIKPILEKMDGTEELLVKLNREDLLRKQRTFDNGSIPHQIHLGELHAILRRQEDFYPFLKDNREKIEKILTFRIPYYVGPLARGNSRFAWMTRKSEETITPWNFEEVVDKGASAQSFIERMTNFDKNLPNEKVLPKHSLLYEYFTVYNELTKVKYVTEGMRKPAFLSGEQKKAIVDLLFKTNRKVTVKQLKEDYFKKIECFDSVEISGVEDRFNASLGTYHDLLKIIKDKDFLDNEENEDILEDIVLTLTLFEDREMIEERLKTYAHLFDDKVMKQLKRRRYTGWGRLSRKLINGIRDKQSGKTILDFLKSDGFANRNFMQLIHDDSLTFKEDIQKAQVSGQGDSLHEHIANLAGSPAIKKGILQTVKVVDELVKVMGRHKPENIVIEMARENQTTQKGQKNSRERMKRIEEGIKELGSQILKEHPVENTQLQNEKLYLYYLQNGRDMYVDQELDINRLSDYDVDHIVPQSFLKDDSIDNKVLTRSDKARGKSDNVPSEEVVKKMKNYWRQLLNAKLITQRKFDNLTKAERGGLSELDKAGFIKRQLVETRQITKHVAQILDSRMNTKYDENDKLIREVKVITLKSKLVSDFRKDFQFYKVREINNYHHAHDAYLNAVVGTALIKKYPKLESEFVYGDYKVYDVRKMIAKSEQEIGKATAKYFFYSNIMNFFKTEITLANGEIRKRPLIETNGETGEIVWDKGRDFATVRKVLSMPQVNIVKKTEVQTGGFSKESILPKRNSDKLIARKKDWDPKKYGGFDSPTVAYSVLVVAKVEKGKSKKLKSVKELLGITIMERSSFEKNPIDFLEAKGYKEVKKDLIIKLPKYSLFELENGRKRMLASAGELQKGNELALPSKYVNFLYLASHYEKLKGSPEDNEQKQLFVEQHKHYLDEIIEQISEFSKRVILADANLDKVLSAYNKHRDKPIREQAENIIHLFTLTNLGAPAAFKYFDTTIDRKRYTSTKEVLDATLIHQSITGLYETRIDLSQLGGDGGEAAAKEAAAKEAAAKEAAAKGGTLNIEDEYRLHETSKEPDVSLGSTWLSDFPQAWAETGGMGLAVRQAPLIIPLKATSTPVSIKQYPMSQEARLGIKPHIQRLLDQGILVPCQSPWNTPLLPVKKPGTNDYRPVQDLREVNKRVEDIHPTVPNPYNLLSGLPPSHQWYTVLDLKDAFFCLRLHPTSQPLFAFEWRDPEMGISGQLTWTRLPQGFKNSPTLFNEALHRDLADFRIQHPDLILLQYVDDLLLAATSELDCQQGTRALLQTLGNLGYRASAKKAQICQKQVKYLGYLLKEGQRWLTEARKETVMGQPTPKTPRQLREFLGKAGFCRLFIPGFAEMAAPLYPLTKPGTLFNWGPDQQKAYQEIKQALLTAPALGLPDLTKPFELFVDEKQGYAKGVLTQKLGPWRRPVAYLSKKLDPVAAGWPPCLRMVAAIAVLTKDAGKLTMGQPLVILAPHAVEALVKQPPDRWLSNARMTHYQALLLDTDRVQFGPVVALNPATLLPLPEEGLQHNCLDILAEAHGTRPDLTDQPLPDADHTWYTDGSSLLQEGQRKAGAAVTTETEVIWAKALPAGTSAQRAELIALTQALKMAEGKKLNVYTDSRYAFATAHIHGEIYRRRGWLTSEGKEIKNKDEILALLKALFLPKRLSIIHCPGHQKGHSAEARGNRMADQAARKAAITETPDTSTLLIENSSPSGGSKRTADGSEFEAGKRTADGSEFEKRTADGSEFESPKKKAKVE

SEQ ID NO: 2611 - protein, 2151 aa, synthetic construct
MPAAKRVKLDGGDKKYSIGLDIGTNSVGWAVITDEYKVPSKKFKVLGNTDRHSIKKNLIGALLFDSGETAEATRLKRTARRRYTRRKNRICYLQEIFSNEMAKVDDSFFHRLEESFLVEEDKKHERHPIFGNIVDEVAYHEKYPTIYHLRKKLVDSTDKADLRLIYLALAHMIKFRGHFLIEGDLNPDNSDVDKLFIQLVQTYNQLFEENPINASGVDAKAILSARLSKSRRLENLIAQLPGEKKNGLFGNLIALSLGLTPNFKSNFDLAEDAKLQLSKDTYDDDLDNLLAQIGDQYADLFLAAKNLSDAILLSDILRVNTEITKAPLSASMIKRYDEHHQDLTLLKALVRQQLPEKYKEIFFDQSKNGYAGYIDGGASQEEFYKFIKPILEKMDGTEELLVKLNREDLLRKQRTFDNGSIPHQIHLGELHAILRRQEDFYPFLKDNREKIEKILTFRIPYYVGPLARGNSRFAWMTRKSEETITPWNFEEVVDKGASAQSFIERMTNFDKNLPNEKVLPKHSLLYEYFTVYNELTKVKYVTEGMRKPAFLSGEQKKAIVDLLFKTNRKVTVKQLKEDYFKKIECFDSVEISGVEDRFNASLGTYHDLLKIIKDKDFLDNEENEDILEDIVLTLTLFEDREMIEERLKTYAHLFDDKVMKQLKRRRYTGWGRLSRKLINGIRDKQSGKTILDFLKSDGFANRNFMQLIHDDSLTFKEDIQKAQVSGQGDSLHEHIANLAGSPAIKKGILQTVKVVDELVKVMGRHKPENIVIEMARENQTTQKGQKNSRERMKRIEEGIKELGSQILKEHPVENTQLQNEKLYLYYLQNGRDMYVDQELDINRLSDYDVDHIVPQSFLKDDSIDNKVLTRSDKARGKSDNVPSEEVVKKMKNYWRQLLNAKLITQRKFDNLTKAERGGLSELDKAGFIKRQLVETRQITKHVAQILDSRMNTKYDENDKLIREVKVITLKSKLVSDFRKDFQFYKVREINNYHHAHDAYLNAVVGTALIKKYPKLESEFVYGDYKVYDVRKMIAKSEQEIGKATAKYFFYSNIMNFFKTEITLANGEIRKRPLIETNGETGEIVWDKGRDFATVRKVLSMPQVNIVKKTEVQTGGFSKESILPKRNSDKLIARKKDWDPKKYGGFDSPTVAYSVLVVAKVEKGKSKKLKSVKELLGITIMERSSFEKNPIDFLEAKGYKEVKKDLIIKLPKYSLFELENGRKRMLASAGELQKGNELALPSKYVNFLYLASHYEKLKGSPEDNEQKQLFVEQHKHYLDEIIEQISEFSKRVILADANLDKVLSAYNKHRDKPIREQAENIIHLFTLTNLGAPAAFKYFDTTIDRKRYTSTKEVLDATLIHQSITGLYETRIDLSQLGGDGGAEAAAKEAAAKEAAAKEAAAKALEAEAAAKEAAAKEAAAKEAAAKAGGTLNIEDEYRLHETSKEPDVSLGSTWLSDFPQAWAETGGMGLAVRQAPLIIPLKATSTPVSIKQYPMSQEARLGIKPHIQRLLDQGILVPCQSPWNTPLLPVKKPGTNDYRPVQDLREVNKRVEDIHPTVPNPYNLLSGLPPSHQWYTVLDLKDAFFCLRLHPTSQPLFAFEWRDPEMGISGQLTWTRLPQGFKNSPTLFNEALHRDLADFRIQHPDLILLQYVDDLLLAATSELDCQQGTRALLQTLGNLGYRASAKKAQICQKQVKYLGYLLKEGQRWLTEARKETVMGQPTPKTPRQLREFLGKAGFCRLFIPGFAEMAAPLYPLTKPGTLFNWGPDQQKAYQEIKQALLTAPALGLPDLTKPFELFVDEKQGYAKGVLTQKLGPWRRPVAYLSKKLDPVAAGWPPCLRMVAAIAVLTKDAGKLTMGQPLVILAPHAVEALVKQPPDRWLSNARMTHYQALLLDTDRVQFGPVVALNPATLLPLPEEGLQHNCLDILAEAHGTRPDLTDQPLPDADHTWYTDGSSLLQEGQRKAGAAVTTETEVIWAKALPAGTSAQRAELIALTQALKMAEGKKLNVYTDSRYAFATAHIHGEIYRRRGWLTSEGKEIKNKDEILALLKALFLPKRLSIIHCPGHQKGHSAEARGNRMADQAARKAAITETPDTSTLLIENSSPSGGSKRTADGSEFEAGKRTADGSEFEKRTADGSEFESPKKKAKVE

SEQ ID NO: 2612 - protein, 2123 aa, synthetic construct
MPAAKRVKLDGGDKKYSIGLDIGTNSVGWAVITDEYKVPSKKFKVLGNTDRHSIKKNLIGALLFDSGETAEATRLKRTARRRYTRRKNRICYLQEIFSNEMAKVDDSFFHRLEESFLVEEDKKHERHPIFGNIVDEVAYHEKYPTIYHLRKKLVDSTDKADLRLIYLALAHMIKFRGHFLIEGDLNPDNSDVDKLFIQLVQTYNQLFEENPINASGVDAKAILSARLSKSRRLENLIAQLPGEKKNGLFGNLIALSLGLTPNFKSNFDLAEDAKLQLSKDTYDDDLDNLLAQIGDQYADLFLAAKNLSDAILLSDILRVNTEITKAPLSASMIKRYDEHHQDLTLLKALVRQQLPEKYKEIFFDQSKNGYAGYIDGGASQEEFYKFIKPILEKMDGTEELLVKLNREDLLRKQRTFDNGSIPHQIHLGELHAILRRQEDFYPFLKDNREKIEKILTFRIPYYVGPLARGNSRFAWMTRKSEETITPWNFEEVVDKGASAQSFIERMTNFDKNLPNEKVLPKHSLLYEYFTVYNELTKVKYVTEGMRKPAFLSGEQKKAIVDLLFKTNRKVTVKQLKEDYFKKIECFDSVEISGVEDRFNASLGTYHDLLKIIKDKDFLDNEENEDILEDIVLTLTLFEDREMIEERLKTYAHLFDDKVMKQLKRRRYTGWGRLSRKLINGIRDKQSGKTILDFLKSDGFANRNFMQLIHDDSLTFKEDIQKAQVSGQGDSLHEHIANLAGSPAIKKGILQTVKVVDELVKVMGRHKPENIVIEMARENQTTQKGQKNSRERMKRIEEGIKELGSQILKEHPVENTQLQNEKLYLYYLQNGRDMYVDQELDINRLSDYDVDHIVPQSFLKDDSIDNKVLTRSDKARGKSDNVPSEEVVKKMKNYWRQLLNAKLITQRKFDNLTKAERGGLSELDKAGFIKRQLVETRQITKHVAQILDSRMNTKYDENDKLIREVKVITLKSKLVSDFRKDFQFYKVREINNYHHAHDAYLNAVVGTALIKKYPKLESEFVYGDYKVYDVRKMIAKSEQEIGKATAKYFFYSNIMNFFKTEITLANGEIRKRPLIETNGETGEIVWDKGRDFATVRKVLSMPQVNIVKKTEVQTGGFSKESILPKRNSDKLIARKKDWDPKKYGGFDSPTVAYSVLVVAKVEKGKSKKLKSVKELLGITIMERSSFEKNPIDFLEAKGYKEVKKDLIIKLPKYSLFELENGRKRMLASAGELQKGNELALPSKYVNFLYLASHYEKLKGSPEDNEQKQLFVEQHKHYLDEIIEQISEFSKRVILADANLDKVLSAYNKHRDKPIREQAENIIHLFTLTNLGAPAAFKYFDTTIDRKRYTSTKEVLDATLIHQSITGLYETRIDLSQLGGDGGGSSGSSGSSGSSGSSGSSGGTLNIEDEYRLHETSKEPDVSLGSTWLSDFPQAWAETGGMGLAVRQAPLIIPLKATSTPVSIKQYPMSQEARLGIKPHIQRLLDQGILVPCQSPWNTPLLPVKKPGTNDYRPVQDLREVNKRVEDIHPTVPNPYNLLSGLPPSHQWYTVLDLKDAFFCLRLHPTSQPLFAFEWRDPEMGISGQLTWTRLPQGFKNSPTLFNEALHRDLADFRIQHPDLILLQYVDDLLLAATSELDCQQGTRALLQTLGNLGYRASAKKAQICQKQVKYLGYLLKEGQRWLTEARKETVMGQPTPKTPRQLREFLGKAGFCRLFIPGFAEMAAPLYPLTKPGTLFNWGPDQQKAYQEIKQALLTAPALGLPDLTKPFELFVDEKQGYAKGVLTQKLGPWRRPVAYLSKKLDPVAAGWPPCLRMVAAIAVLTKDAGKLTMGQPLVILAPHAVEALVKQPPDRWLSNARMTHYQALLLDTDRVQFGPVVALNPATLLPLPEEGLQHNCLDILAEAHGTRPDLTDQPLPDADHTWYTDGSSLLQEGQRKAGAAVTTETEVIWAKALPAGTSAQRAELIALTQALKMAEGKKLNVYTDSRYAFATAHIHGEIYRRRGWLTSEGKEIKNKDEILALLKALFLPKRLSIIHCPGHQKGHSAEARGNRMADQAARKAAITETPDTSTLLIENSSPSGGSKRTADGSEFEAGKRTADGSEFEKRTADGSEFESPKKKAKVE

SEQ ID NO: 2613 - protein, 2130 aa, synthetic construct
MPAAKRVKLDGGDKKYSIGLDIGTNSVGWAVITDEYKVPSKKFKVLGNTDRHSIKKNLIGALLFDSGETAEATRLKRTARRRYTRRKNRICYLQEIFSNEMAKVDDSFFHRLEESFLVEEDKKHERHPIFGNIVDEVAYHEKYPTIYHLRKKLVDSTDKADLRLIYLALAHMIKFRGHFLIEGDLNPDNSDVDKLFIQLVQTYNQLFEENPINASGVDAKAILSARLSKSRRLENLIAQLPGEKKNGLFGNLIALSLGLTPNFKSNFDLAEDAKLQLSKDTYDDDLDNLLAQIGDQYADLFLAAKNLSDAILLSDILRVNTEITKAPLSASMIKRYDEHHQDLTLLKALVRQQLPEKYKEIFFDQSKNGYAGYIDGGASQEEFYKFIKPILEKMDGTEELLVKLNREDLLRKQRTFDNGSIPHQIHLGELHAILRRQEDFYPFLKDNREKIEKILTFRIPYYVGPLARGNSRFAWMTRKSEETITPWNFEEVVDKGASAQSFIERMTNFDKNLPNEKVLPKHSLLYEYFTVYNELTKVKYVTEGMRKPAFLSGEQKKAIVDLLFKTNRKVTVKQLKEDYFKKIECFDSVEISGVEDRFNASLGTYHDLLKIIKDKDFLDNEENEDILEDIVLTLTLFEDREMIEERLKTYAHLFDDKVMKQLKRRRYTGWGRLSRKLINGIRDKQSGKTILDFLKSDGFANRNFMQLIHDDSLTFKEDIQKAQVSGQGDSLHEHIANLAGSPAIKKGILQTVKVVDELVKVMGRHKPENIVIEMARENQTTQKGQKNSRERMKRIEEGIKELGSQILKEHPVENTQLQNEKLYLYYLQNGRDMYVDQELDINRLSDYDVDHIVPQSFLKDDSIDNKVLTRSDKARGKSDNVPSEEVVKKMKNYWRQLLNAKLITQRKFDNLTKAERGGLSELDKAGFIKRQLVETRQITKHVAQILDSRMNTKYDENDKLIREVKVITLKSKLVSDFRKDFQFYKVREINNYHHAHDAYLNAVVGTALIKKYPKLESEFVYGDYKVYDVRKMIAKSEQEIGKATAKYFFYSNIMNFFKTEITLANGEIRKRPLIETNGETGEIVWDKGRDFATVRKVLSMPQVNIVKKTEVQTGGFSKESILPKRNSDKLIARKKDWDPKKYGGFDSPTVAYSVLVVAKVEKGKSKKLKSVKELLGITIMERSSFEKNPIDFLEAKGYKEVKKDLIIKLPKYSLFELENGRKRMLASAGELQKGNELALPSKYVNFLYLASHYEKLKGSPEDNEQKQLFVEQHKHYLDEIIEQISEFSKRVILADANLDKVLSAYNKHRDKPIREQAENIIHLFTLTNLGAPAAFKYFDTTIDRKRYTSTKEVLDATLIHQSITGLYETRIDLSQLGGDGGGGGGSGGGGSGGGGSGGGGSGGGGSGGTLNIEDEYRLHETSKEPDVSLGSTWLSDFPQAWAETGGMGLAVRQAPLIIPLKATSTPVSIKQYPMSQEARLGIKPHIQRLLDQGILVPCQSPWNTPLLPVKKPGTNDYRPVQDLREVNKRVEDIHPTVPNPYNLLSGLPPSHQWYTVLDLKDAFFCLRLHPTSQPLFAFEWRDPEMGISGQLTWTRLPQGFKNSPTLFNEALHRDLADFRIQHPDLILLQYVDDLLLAATSELDCQQGTRALLQTLGNLGYRASAKKAQICQKQVKYLGYLLKEGQRWLTEARKETVMGQPTPKTPRQLREFLGKAGFCRLFIPGFAEMAAPLYPLTKPGTLFNWGPDQQKAYQEIKQALLTAPALGLPDLTKPFELFVDEKQGYAKGVLTQKLGPWRRPVAYLSKKLDPVAAGWPPCLRMVAAIAVLTKDAGKLTMGQPLVILAPHAVEALVKQPPDRWLSNARMTHYQALLLDTDRVQFGPVVALNPATLLPLPEEGLQHNCLDILAEAHGTRPDLTDQPLPDADHTWYTDGSSLLQEGQRKAGAAVTTETEVIWAKALPAGTSAQRAELIALTQALKMAEGKKLNVYTDSRYAFATAHIHGEIYRRRGWLTSEGKEIKNKDEILALLKALFLPKRLSIIHCPGHQKGHSAEARGNRMADQAARKAAITETPDTSTLLIENSSPSGGSKRTADGSEFEAGKRTADGSEFEKRTADGSEFESPKKKAKVE

SEQ ID NO: 2614 - protein, 2116 aa, synthetic construct
MPAAKRVKLDGGDKKYSIGLDIGTNSVGWAVITDEYKVPSKKFKVLGNTDRHSIKKNLIGALLFDSGETAEATRLKRTARRRYTRRKNRICYLQEIFSNEMAKVDDSFFHRLEESFLVEEDKKHERHPIFGNIVDEVAYHEKYPTIYHLRKKLVDSTDKADLRLIYLALAHMIKFRGHFLIEGDLNPDNSDVDKLFIQLVQTYNQLFEENPINASGVDAKAILSARLSKSRRLENLIAQLPGEKKNGLFGNLIALSLGLTPNFKSNFDLAEDAKLQLSKDTYDDDLDNLLAQIGDQYADLFLAAKNLSDAILLSDILRVNTEITKAPLSASMIKRYDEHHQDLTLLKALVRQQLPEKYKEIFFDQSKNGYAGYIDGGASQEEFYKFIKPILEKMDGTEELLVKLNREDLLRKQRTFDNGSIPHQIHLGELHAILRRQEDFYPFLKDNREKIEKILTFRIPYYVGPLARGNSRFAWMTRKSEETITPWNFEEVVDKGASAQSFIERMTNFDKNLPNEKVLPKHSLLYEYFTVYNELTKVKYVTEGMRKPAFLSGEQKKAIVDLLFKTNRKVTVKQLKEDYFKKIECFDSVEISGVEDRFNASLGTYHDLLKIIKDKDFLDNEENEDILEDIVLTLTLFEDREMIEERLKTYAHLFDDKVMKQLKRRRYTGWGRLSRKLINGIRDKQSGKTILDFLKSDGFANRNFMQLIHDDSLTFKEDIQKAQVSGQGDSLHEHIANLAGSPAIKKGILQTVKVVDELVKVMGRHKPENIVIEMARENQTTQKGQKNSRERMKRIEEGIKELGSQILKEHPVENTQLQNEKLYLYYLQNGRDMYVDQELDINRLSDYDVDHIVPQSFLKDDSIDNKVLTRSDKARGKSDNVPSEEVVKKMKNYWRQLLNAKLITQRKFDNLTKAERGGLSELDKAGFIKRQLVETRQITKHVAQILDSRMNTKYDENDKLIREVKVITLKSKLVSDFRKDFQFYKVREINNYHHAHDAYLNAVVGTALIKKYPKLESEFVYGDYKVYDVRKMIAKSEQEIGKATAKYFFYSNIMNFFKTEITLANGEIRKRPLIETNGETGEIVWDKGRDFATVRKVLSMPQVNIVKKTEVQTGGFSKESILPKRNSDKLIARKKDWDPKKYGGFDSPTVAYSVLVVAKVEKGKSKKLKSVKELLGITIMERSSFEKNPIDFLEAKGYKEVKKDLIIKLPKYSLFELENGRKRMLASAGELQKGNELALPSKYVNFLYLASHYEKLKGSPEDNEQKQLFVEQHKHYLDEIIEQISEFSKRVILADANLDKVLSAYNKHRDKPIREQAENIIHLFTLTNLGAPAAFKYFDTTIDRKRYTSTKEVLDATLIHQSITGLYETRIDLSQLGGDGGEAAAKGGGPAPGGTLNIEDEYRLHETSKEPDVSLGSTWLSDFPQAWAETGGMGLAVRQAPLIIPLKATSTPVSIKQYPMSQEARLGIKPHIQRLLDQGILVPCQSPWNTPLLPVKKPGTNDYRPVQDLREVNKRVEDIHPTVPNPYNLLSGLPPSHQWYTVLDLKDAFFCLRLHPTSQPLFAFEWRDPEMGISGQLTWTRLPQGFKNSPTLFNEALHRDLADFRIQHPDLILLQYVDDLLLAATSELDCQQGTRALLQTLGNLGYRASAKKAQICQKQVKYLGYLLKEGQRWLTEARKETVMGQPTPKTPRQLREFLGKAGFCRLFIPGFAEMAAPLYPLTKPGTLFNWGPDQQKAYQEIKQALLTAPALGLPDLTKPFELFVDEKQGYAKGVLTQKLGPWRRPVAYLSKKLDPVAAGWPPCLRMVAAIAVLTKDAGKLTMGQPLVILAPHAVEALVKQPPDRWLSNARMTHYQALLLDTDRVQFGPVVALNPATLLPLPEEGLQHNCLDILAEAHGTRPDLTDQPLPDADHTWYTDGSSLLQEGQRKAGAAVTTETEVIWAKALPAGTSAQRAELIALTQALKMAEGKKLNVYTDSRYAFATAHIHGEIYRRRGWLTSEGKEIKNKDEILALLKALFLPKRLSIIHCPGHQKGHSAEARGNRMADQAARKAAITETPDTSTLLIENSSPSGGSKRTADGSEFEAGKRTADGSEFEKRTADGSEFESPKKKAKVE

SEQ ID NO: 2615 - protein, 2125 aa, synthetic construct
MPAAKRVKLDGGDKKYSIGLDIGTNSVGWAVITDEYKVPSKKFKVLGNTDRHSIKKNLIGALLFDSGETAEATRLKRTARRRYTRRKNRICYLQEIFSNEMAKVDDSFFHRLEESFLVEEDKKHERHPIFGNIVDEVAYHEKYPTIYHLRKKLVDSTDKADLRLIYLALAHMIKFRGHFLIEGDLNPDNSDVDKLFIQLVQTYNQLFEENPINASGVDAKAILSARLSKSRRLENLIAQLPGEKKNGLFGNLIALSLGLTPNFKSNFDLAEDAKLQLSKDTYDDDLDNLLAQIGDQYADLFLAAKNLSDAILLSDILRVNTEITKAPLSASMIKRYDEHHQDLTLLKALVRQQLPEKYKEIFFDQSKNGYAGYIDGGASQEEFYKFIKPILEKMDGTEELLVKLNREDLLRKQRTFDNGSIPHQIHLGELHAILRRQEDFYPFLKDNREKIEKILTFRIPYYVGPLARGNSRFAWMTRKSEETITPWNFEEVVDKGASAQSFIERMTNFDKNLPNEKVLPKHSLLYEYFTVYNELTKVKYVTEGMRKPAFLSGEQKKAIVDLLFKTNRKVTVKQLKEDYFKKIECFDSVEISGVEDRFNASLGTYHDLLKIIKDKDFLDNEENEDILEDIVLTLTLFEDREMIEERLKTYAHLFDDKVMKQLKRRRYTGWGRLSRKLINGIRDKQSGKTILDFLKSDGFANRNFMQLIHDDSLTFKEDIQKAQVSGQGDSLHEHIANLAGSPAIKKGILQTVKVVDELVKVMGRHKPENIVIEMARENQTTQKGQKNSRERMKRIEEGIKELGSQILKEHPVENTQLQNEKLYLYYLQNGRDMYVDQELDINRLSDYDVDHIVPQSFLKDDSIDNKVLTRSDKARGKSDNVPSEEVVKKMKNYWRQLLNAKLITQRKFDNLTKAERGGLSELDKAGFIKRQLVETRQITKHVAQILDSRMNTKYDENDKLIREVKVITLKSKLVSDFRKDFQFYKVREINNYHHAHDAYLNAVVGTALIKKYPKLESEFVYGDYKVYDVRKMIAKSEQEIGKATAKYFFYSNIMNFFKTEITLANGEIRKRPLIETNGETGEIVWDKGRDFATVRKVLSMPQVNIVKKTEVQTGGFSKESILPKRNSDKLIARKKDWDPKKYGGFDSPTVAYSVLVVAKVEKGKSKKLKSVKELLGITIMERSSFEKNPIDFLEAKGYKEVKKDLIIKLPKYSLFELENGRKRMLASAGELQKGNELALPSKYVNFLYLASHYEKLKGSPEDNEQKQLFVEQHKHYLDEIIEQISEFSKRVILADANLDKVLSAYNKHRDKPIREQAENIIHLFTLTNLGAPAAFKYFDTTIDRKRYTSTKEVLDATLIHQSITGLYETRIDLSQLGGDGGGGGGSGGGGSGGGGSGGGGSGGTLNIEDEYRLHETSKEPDVSLGSTWLSDFPQAWAETGGMGLAVRQAPLIIPLKATSTPVSIKQYPMSQEARLGIKPHIQRLLDQGILVPCQSPWNTPLLPVKKPGTNDYRPVQDLREVNKRVEDIHPTVPNPYNLLSGLPPSHQWYTVLDLKDAFFCLRLHPTSQPLFAFEWRDPEMGISGQLTWTRLPQGFKNSPTLFNEALHRDLADFRIQHPDLILLQYVDDLLLAATSELDCQQGTRALLQTLGNLGYRASAKKAQICQKQVKYLGYLLKEGQRWLTEARKETVMGQPTPKTPRQLREFLGKAGFCRLFIPGFAEMAAPLYPLTKPGTLFNWGPDQQKAYQEIKQALLTAPALGLPDLTKPFELFVDEKQGYAKGVLTQKLGPWRRPVAYLSKKLDPVAAGWPPCLRMVAAIAVLTKDAGKLTMGQPLVILAPHAVEALVKQPPDRWLSNARMTHYQALLLDTDRVQFGPVVALNPATLLPLPEEGLQHNCLDILAEAHGTRPDLTDQPLPDADHTWYTDGSSLLQEGQRKAGAAVTTETEVIWAKALPAGTSAQRAELIALTQALKMAEGKKLNVYTDSRYAFATAHIHGEIYRRRGWLTSEGKEIKNKDEILALLKALFLPKRLSIIHCPGHQKGHSAEARGNRMADQAARKAAITETPDTSTLLIENSSPSGGSKRTADGSEFEAGKRTADGSEFEKRTADGSEFESPKKKAKVE

SEQ ID NO: 2616 - protein, 2114 aa, synthetic construct
MPAAKRVKLDGGDKKYSIGLDIGTNSVGWAVITDEYKVPSKKFKVLGNTDRHSIKKNLIGALLFDSGETAEATRLKRTARRRYTRRKNRICYLQEIFSNEMAKVDDSFFHRLEESFLVEEDKKHERHPIFGNIVDEVAYHEKYPTIYHLRKKLVDSTDKADLRLIYLALAHMIKFRGHFLIEGDLNPDNSDVDKLFIQLVQTYNQLFEENPINASGVDAKAILSARLSKSRRLENLIAQLPGEKKNGLFGNLIALSLGLTPNFKSNFDLAEDAKLQLSKDTYDDDLDNLLAQIGDQYADLFLAAKNLSDAILLSDILRVNTEITKAPLSASMIKRYDEHHQDLTLLKALVRQQLPEKYKEIFFDQSKNGYAGYIDGGASQEEFYKFIKPILEKMDGTEELLVKLNREDLLRKQRTFDNGSIPHQIHLGELHAILRRQEDFYPFLKDNREKIEKILTFRIPYYVGPLARGNSRFAWMTRKSEETITPWNFEEVVDKGASAQSFIERMTNFDKNLPNEKVLPKHSLLYEYFTVYNELTKVKYVTEGMRKPAFLSGEQKKAIVDLLFKTNRKVTVKQLKEDYFKKIECFDSVEISGVEDRFNASLGTYHDLLKIIKDKDFLDNEENEDILEDIVLTLTLFEDREMIEERLKTYAHLFDDKVMKQLKRRRYTGWGRLSRKLINGIRDKQSGKTILDFLKSDGFANRNFMQLIHDDSLTFKEDIQKAQVSGQGDSLHEHIANLAGSPAIKKGILQTVKVVDELVKVMGRHKPENIVIEMARENQTTQKGQKNSRERMKRIEEGIKELGSQILKEHPVENTQLQNEKLYLYYLQNGRDMYVDQELDINRLSDYDVDHIVPQSFLKDDSIDNKVLTRSDKARGKSDNVPSEEVVKKMKNYWRQLLNAKLITQRKFDNLTKAERGGLSELDKAGFIKRQLVETRQITKHVAQILDSRMNTKYDENDKLIREVKVITLKSKLVSDFRKDFQFYKVREINNYHHAHDAYLNAVVGTALIKKYPKLESEFVYGDYKVYDVRKMIAKSEQEIGKATAKYFFYSNIMNFFKTEITLANGEIRKRPLIETNGETGEIVWDKGRDFATVRKVLSMPQVNIVKKTEVQTGGFSKESILPKRNSDKLIARKKDWDPKKYGGFDSPTVAYSVLVVAKVEKGKSKKLKSVKELLGITIMERSSFEKNPIDFLEAKGYKEVKKDLIIKLPKYSLFELENGRKRMLASAGELQKGNELALPSKYVNFLYLASHYEKLKGSPEDNEQKQLFVEQHKHYLDEIIEQISEFSKRVILADANLDKVLSAYNKHRDKPIREQAENIIHLFTLTNLGAPAAFKYFDTTIDRKRYTSTKEVLDATLIHQSITGLYETRIDLSQLGGDGGPAPGSSGGGGGTLNIEDEYRLHETSKEPDVSLGSTWLSDFPQAWAETGGMGLAVRQAPLIIPLKATSTPVSIKQYPMSQEARLGIKPHIQRLLDQGILVPCQSPWNTPLLPVKKPGTNDYRPVQDLREVNKRVEDIHPTVPNPYNLLSGLPPSHQWYTVLDLKDAFFCLRLHPTSQPLFAFEWRDPEMGISGQLTWTRLPQGFKNSPTLFNEALHRDLADFRIQHPDLILLQYVDDLLLAATSELDCQQGTRALLQTLGNLGYRASAKKAQICQKQVKYLGYLLKEGQRWLTEARKETVMGQPTPKTPRQLREFLGKAGFCRLFIPGFAEMAAPLYPLTKPGTLFNWGPDQQKAYQEIKQALLTAPALGLPDLTKPFELFVDEKQGYAKGVLTQKLGPWRRPVAYLSKKLDPVAAGWPPCLRMVAAIAVLTKDAGKLTMGQPLVILAPHAVEALVKQPPDRWLSNARMTHYQALLLDTDRVQFGPVVALNPATLLPLPEEGLQHNCLDILAEAHGTRPDLTDQPLPDADHTWYTDGSSLLQEGQRKAGAAVTTETEVIWAKALPAGTSAQRAELIALTQALKMAEGKKLNVYTDSRYAFATAHIHGEIYRRRGWLTSEGKEIKNKDEILALLKALFLPKRLSIIHCPGHQKGHSAEARGNRMADQAARKAAITETPDTSTLLIENSSPSGGSKRTADGSEFEAGKRTADGSEFEKRTADGSEFESPKKKAKVE

SEQ ID NO: 2617 - protein, 2114 aa, synthetic construct
MPAAKRVKLDGGDKKYSIGLDIGTNSVGWAVITDEYKVPSKKFKVLGNTDRHSIKKNLIGALLFDSGETAEATRLKRTARRRYTRRKNRICYLQEIFSNEMAKVDDSFFHRLEESFLVEEDKKHERHPIFGNIVDEVAYHEKYPTIYHLRKKLVDSTDKADLRLIYLALAHMIKFRGHFLIEGDLNPDNSDVDKLFIQLVQTYNQLFEENPINASGVDAKAILSARLSKSRRLENLIAQLPGEKKNGLFGNLIALSLGLTPNFKSNFDLAEDAKLQLSKDTYDDDLDNLLAQIGDQYADLFLAAKNLSDAILLSDILRVNTEITKAPLSASMIKRYDEHHQDLTLLKALVRQQLPEKYKEIFFDQSKNGYAGYIDGGASQEEFYKFIKPILEKMDGTEELLVKLNREDLLRKQRTFDNGSIPHQIHLGELHAILRRQEDFYPFLKDNREKIEKILTFRIPYYVGPLARGNSRFAWMTRKSEETITPWNFEEVVDKGASAQSFIERMTNFDKNLPNEKVLPKHSLLYEYFTVYNELTKVKYVTEGMRKPAFLSGEQKKAIVDLLFKTNRKVTVKQLKEDYFKKIECFDSVEISGVEDRFNASLGTYHDLLKIIKDKDFLDNEENEDILEDIVLTLTLFEDREMIEERLKTYAHLFDDKVMKQLKRRRYTGWGRLSRKLINGIRDKQSGKTILDFLKSDGFANRNFMQLIHDDSLTFKEDIQKAQVSGQGDSLHEHIANLAGSPAIKKGILQTVKVVDELVKVMGRHKPENIVIEMARENQTTQKGQKNSRERMKRIEEGIKELGSQILKEHPVENTQLQNEKLYLYYLQNGRDMYVDQELDINRLSDYDVDHIVPQSFLKDDSIDNKVLTRSDKARGKSDNVPSEEVVKKMKNYWRQLLNAKLITQRKFDNLTKAERGGLSELDKAGFIKRQLVETRQITKHVAQILDSRMNTKYDENDKLIREVKVITLKSKLVSDFRKDFQFYKVREINNYHHAHDAYLNAVVGTALIKKYPKLESEFVYGDYKVYDVRKMIAKSEQEIGKATAKYFFYSNIMNFFKTEITLANGEIRKRPLIETNGETGEIVWDKGRDFATVRKVLSMPQVNIVKKTEVQTGGFSKESILPKRNSDKLIARKKDWDPKKYGGFDSPTVAYSVLVVAKVEKGKSKKLKSVKELLGITIMERSSFEKNPIDFLEAKGYKEVKKDLIIKLPKYSLFELENGRKRMLASAGELQKGNELALPSKYVNFLYLASHYEKLKGSPEDNEQKQLFVEQHKHYLDEIIEQISEFSKRVILADANLDKVLSAYNKHRDKPIREQAENIIHLFTLTNLGAPAAFKYFDTTIDRKRYTSTKEVLDATLIHQSITGLYETRIDLSQLGGDGGGSSGGGGGSGGTLNIEDEYRLHETSKEPDVSLGSTWLSDFPQAWAETGGMGLAVRQAPLIIPLKATSTPVSIKQYPMSQEARLGIKPHIQRLLDQGILVPCQSPWNTPLLPVKKPGTNDYRPVQDLREVNKRVEDIHPTVPNPYNLLSGLPPSHQWYTVLDLKDAFFCLRLHPTSQPLFAFEWRDPEMGISGQLTWTRLPQGFKNSPTLFNEALHRDLADFRIQHPDLILLQYVDDLLLAATSELDCQQGTRALLQTLGNLGYRASAKKAQICQKQVKYLGYLLKEGQRWLTEARKETVMGQPTPKTPRQLREFLGKAGFCRLFIPGFAEMAAPLYPLTKPGTLFNWGPDQQKAYQEIKQALLTAPALGLPDLTKPFELFVDEKQGYAKGVLTQKLGPWRRPVAYLSKKLDPVAAGWPPCLRMVAAIAVLTKDAGKLTMGQPLVILAPHAVEALVKQPPDRWLSNARMTHYQALLLDTDRVQFGPVVALNPATLLPLPEEGLQHNCLDILAEAHGTRPDLTDQPLPDADHTWYTDGSSLLQEGQRKAGAAVTTETEVIWAKALPAGTSAQRAELIALTQALKMAEGKKLNVYTDSRYAFATAHIHGEIYRRRGWLTSEGKEIKNKDEILALLKALFLPKRLSIIHCPGHQKGHSAEARGNRMADQAARKAAITETPDTSTLLIENSSPSGGSKRTADGSEFEAGKRTADGSEFEKRTADGSEFESPKKKAKVE

SEQ ID NO: 2618 - protein, 2114 aa, synthetic construct
MPAAKRVKLDGGDKKYSIGLDIGTNSVGWAVITDEYKVPSKKFKVLGNTDRHSIKKNLIGALLFDSGETAEATRLKRTARRRYTRRKNRICYLQEIFSNEMAKVDDSFFHRLEESFLVEEDKKHERHPIFGNIVDEVAYHEKYPTIYHLRKKLVDSTDKADLRLIYLALAHMIKFRGHFLIEGDLNPDNSDVDKLFIQLVQTYNQLFEENPINASGVDAKAILSARLSKSRRLENLIAQLPGEKKNGLFGNLIALSLGLTPNFKSNFDLAEDAKLQLSKDTYDDDLDNLLAQIGDQYADLFLAAKNLSDAILLSDILRVNTEITKAPLSASMIKRYDEHHQDLTLLKALVRQQLPEKYKEIFFDQSKNGYAGYIDGGASQEEFYKFIKPILEKMDGTEELLVKLNREDLLRKQRTFDNGSIPHQIHLGELHAILRRQEDFYPFLKDNREKIEKILTFRIPYYVGPLARGNSRFAWMTRKSEETITPWNFEEVVDKGASAQSFIERMTNFDKNLPNEKVLPKHSLLYEYFTVYNELTKVKYVTEGMRKPAFLSGEQKKAIVDLLFKTNRKVTVKQLKEDYFKKIECFDSVEISGVEDRFNASLGTYHDLLKIIKDKDFLDNEENEDILEDIVLTLTLFEDREMIEERLKTYAHLFDDKVMKQLKRRRYTGWGRLSRKLINGIRDKQSGKTILDFLKSDGFANRNFMQLIHDDSLTFKEDIQKAQVSGQGDSLHEHIANLAGSPAIKKGILQTVKVVDELVKVMGRHKPENIVIEMARENQTTQKGQKNSRERMKRIEEGIKELGSQILKEHPVENTQLQNEKLYLYYLQNGRDMYVDQELDINRLSDYDVDHIVPQSFLKDDSIDNKVLTRSDKARGKSDNVPSEEVVKKMKNYWRQLLNAKLITQRKFDNLTKAERGGLSELDKAGFIKRQLVETRQITKHVAQILDSRMNTKYDENDKLIREVKVITLKSKLVSDFRKDFQFYKVREINNYHHAHDAYLNAVVGTALIKKYPKLESEFVYGDYKVYDVRKMIAKSEQEIGKATAKYFFYSNIMNFFKTEITLANGEIRKRPLIETNGETGEIVWDKGRDFATVRKVLSMPQVNIVKKTEVQTGGFSKESILPKRNSDKLIARKKDWDPKKYGGFDSPTVAYSVLVVAKVEKGKSKKLKSVKELLGITIMERSSFEKNPIDFLEAKGYKEVKKDLIIKLPKYSLFELENGRKRMLASAGELQKGNELALPSKYVNFLYLASHYEKLKGSPEDNEQKQLFVEQHKHYLDEIIEQISEFSKRVILADANLDKVLSAYNKHRDKPIREQAENIIHLFTLTNLGAPAAFKYFDTTIDRKRYTSTKEVLDATLIHQSITGLYETRIDLSQLGGDGGGGGPAPGGSGGTLNIEDEYRLHETSKEPDVSLGSTWLSDFPQAWAETGGMGLAVRQAPLIIPLKATSTPVSIKQYPMSQEARLGIKPHIQRLLDQGILVPCQSPWNTPLLPVKKPGTNDYRPVQDLREVNKRVEDIHPTVPNPYNLLSGLPPSHQWYTVLDLKDAFFCLRLHPTSQPLFAFEWRDPEMGISGQLTWTRLPQGFKNSPTLFNEALHRDLADFRIQHPDLILLQYVDDLLLAATSELDCQQGTRALLQTLGNLGYRASAKKAQICQKQVKYLGYLLKEGQRWLTEARKETVMGQPTPKTPRQLREFLGKAGFCRLFIPGFAEMAAPLYPLTKPGTLFNWGPDQQKAYQEIKQALLTAPALGLPDLTKPFELFVDEKQGYAKGVLTQKLGPWRRPVAYLSKKLDPVAAGWPPCLRMVAAIAVLTKDAGKLTMGQPLVILAPHAVEALVKQPPDRWLSNARMTHYQALLLDTDRVQFGPVVALNPATLLPLPEEGLQHNCLDILAEAHGTRPDLTDQPLPDADHTWYTDGSSLLQEGQRKAGAAVTTETEVIWAKALPAGTSAQRAELIALTQALKMAEGKKLNVYTDSRYAFATAHIHGEIYRRRGWLTSEGKEIKNKDEILALLKALFLPKRLSIIHCPGHQKGHSAEARGNRMADQAARKAAITETPDTSTLLIENSSPSGGSKRTADGSEFEAGKRTADGSEFEKRTADGSEFESPKKKAKVE

SEQ ID NO: 2619 - protein, 2116 aa, synthetic construct
MPAAKRVKLDGGDKKYSIGLDIGTNSVGWAVITDEYKVPSKKFKVLGNTDRHSIKKNLIGALLFDSGETAEATRLKRTARRRYTRRKNRICYLQEIFSNEMAKVDDSFFHRLEESFLVEEDKKHERHPIFGNIVDEVAYHEKYPTIYHLRKKLVDSTDKADLRLIYLALAHMIKFRGHFLIEGDLNPDNSDVDKLFIQLVQTYNQLFEENPINASGVDAKAILSARLSKSRRLENLIAQLPGEKKNGLFGNLIALSLGLTPNFKSNFDLAEDAKLQLSKDTYDDDLDNLLAQIGDQYADLFLAAKNLSDAILLSDILRVNTEITKAPLSASMIKRYDEHHQDLTLLKALVRQQLPEKYKEIFFDQSKNGYAGYIDGGASQEEFYKFIKPILEKMDGTEELLVKLNREDLLRKQRTFDNGSIPHQIHLGELHAILRRQEDFYPFLKDNREKIEKILTFRIPYYVGPLARGNSRFAWMTRKSEETITPWNFEEVVDKGASAQSFIERMTNFDKNLPNEKVLPKHSLLYEYFTVYNELTKVKYVTEGMRKPAFLSGEQKKAIVDLLFKTNRKVTVKQLKEDYFKKIECFDSVEISGVEDRFNASLGTYHDLLKIIKDKDFLDNEENEDILEDIVLTLTLFEDREMIEERLKTYAHLFDDKVMKQLKRRRYTGWGRLSRKLINGIRDKQSGKTILDFLKSDGFANRNFMQLIHDDSLTFKEDIQKAQVSGQGDSLHEHIANLAGSPAIKKGILQTVKVVDELVKVMGRHKPENIVIEMARENQTTQKGQKNSRERMKRIEEGIKELGSQILKEHPVENTQLQNEKLYLYYLQNGRDMYVDQELDINRLSDYDVDHIVPQSFLKDDSIDNKVLTRSDKARGKSDNVPSEEVVKKMKNYWRQLLNAKLITQRKFDNLTKAERGGLSELDKAGFIKRQLVETRQITKHVAQILDSRMNTKYDENDKLIREVKVITLKSKLVSDFRKDFQFYKVREINNYHHAHDAYLNAVVGTALIKKYPKLESEFVYGDYKVYDVRKMIAKSEQEIGKATAKYFFYSNIMNFFKTEITLANGEIRKRPLIETNGETGEIVWDKGRDFATVRKVLSMPQVNIVKKTEVQTGGFSKESILPKRNSDKLIARKKDWDPKKYGGFDSPTVAYSVLVVAKVEKGKSKKLKSVKELLGITIMERSSFEKNPIDFLEAKGYKEVKKDLIIKLPKYSLFELENGRKRMLASAGELQKGNELALPSKYVNFLYLASHYEKLKGSPEDNEQKQLFVEQHKHYLDEIIEQISEFSKRVILADANLDKVLSAYNKHRDKPIREQAENIIHLFTLTNLGAPAAFKYFDTTIDRKRYTSTKEVLDATLIHQSITGLYETRIDLSQLGGDGGPAPAPAPAPAPGGTLNIEDEYRLHETSKEPDVSLGSTWLSDFPQAWAETGGMGLAVRQAPLIIPLKATSTPVSIKQYPMSQEARLGIKPHIQRLLDQGILVPCQSPWNTPLLPVKKPGTNDYRPVQDLREVNKRVEDIHPTVPNPYNLLSGLPPSHQWYTVLDLKDAFFCLRLHPTSQPLFAFEWRDPEMGISGQLTWTRLPQGFKNSPTLFNEALHRDLADFRIQHPDLILLQYVDDLLLAATSELDCQQGTRALLQTLGNLGYRASAKKAQICQKQVKYLGYLLKEGQRWLTEARKETVMGQPTPKTPRQLREFLGKAGFCRLFIPGFAEMAAPLYPLTKPGTLFNWGPDQQKAYQEIKQALLTAPALGLPDLTKPFELFVDEKQGYAKGVLTQKLGPWRRPVAYLSKKLDPVAAGWPPCLRMVAAIAVLTKDAGKLTMGQPLVILAPHAVEALVKQPPDRWLSNARMTHYQALLLDTDRVQFGPVVALNPATLLPLPEEGLQHNCLDILAEAHGTRPDLTDQPLPDADHTWYTDGSSLLQEGQRKAGAAVTTETEVIWAKALPAGTSAQRAELIALTQALKMAEGKKLNVYTDSRYAFATAHIHGEIYRRRGWLTSEGKEIKNKDEILALLKALFLPKRLSIIHCPGHQKGHSAEARGNRMADQAARKAAITETPDTSTLLIENSSPSGGSKRTADGSEFEAGKRTADGSEFEKRTADGSEFESPKKKAKVE

SEQ ID NO: 2620 - protein, 2110 aa, synthetic construct
MPAAKRVKLDGGDKKYSIGLDIGTNSVGWAVITDEYKVPSKKFKVLGNTDRHSIKKNLIGALLFDSGETAEATRLKRTARRRYTRRKNRICYLQEIFSNEMAKVDDSFFHRLEESFLVEEDKKHERHPIFGNIVDEVAYHEKYPTIYHLRKKLVDSTDKADLRLIYLALAHMIKFRGHFLIEGDLNPDNSDVDKLFIQLVQTYNQLFEENPINASGVDAKAILSARLSKSRRLENLIAQLPGEKKNGLFGNLIALSLGLTPNFKSNFDLAEDAKLQLSKDTYDDDLDNLLAQIGDQYADLFLAAKNLSDAILLSDILRVNTEITKAPLSASMIKRYDEHHQDLTLLKALVRQQLPEKYKEIFFDQSKNGYAGYIDGGASQEEFYKFIKPILEKMDGTEELLVKLNREDLLRKQRTFDNGSIPHQIHLGELHAILRRQEDFYPFLKDNREKIEKILTFRIPYYVGPLARGNSRFAWMTRKSEETITPWNFEEVVDKGASAQSFIERMTNFDKNLPNEKVLPKHSLLYEYFTVYNELTKVKYVTEGMRKPAFLSGEQKKAIVDLLFKTNRKVTVKQLKEDYFKKIECFDSVEISGVEDRFNASLGTYHDLLKIIKDKDFLDNEENEDILEDIVLTLTLFEDREMIEERLKTYAHLFDDKVMKQLKRRRYTGWGRLSRKLINGIRDKQSGKTILDFLKSDGFANRNFMQLIHDDSLTFKEDIQKAQVSGQGDSLHEHIANLAGSPAIKKGILQTVKVVDELVKVMGRHKPENIVIEMARENQTTQKGQKNSRERMKRIEEGIKELGSQILKEHPVENTQLQNEKLYLYYLQNGRDMYVDQELDINRLSDYDVDHIVPQSFLKDDSIDNKVLTRSDKARGKSDNVPSEEVVKKMKNYWRQLLNAKLITQRKFDNLTKAERGGLSELDKAGFIKRQLVETRQITKHVAQILDSRMNTKYDENDKLIREVKVITLKSKLVSDFRKDFQFYKVREINNYHHAHDAYLNAVVGTALIKKYPKLESEFVYGDYKVYDVRKMIAKSEQEIGKATAKYFFYSNIMNFFKTEITLANGEIRKRPLIETNGETGEIVWDKGRDFATVRKVLSMPQVNIVKKTEVQTGGFSKESILPKRNSDKLIARKKDWDPKKYGGFDSPTVAYSVLVVAKVEKGKSKKLKSVKELLGITIMERSSFEKNPIDFLEAKGYKEVKKDLIIKLPKYSLFELENGRKRMLASAGELQKGNELALPSKYVNFLYLASHYEKLKGSPEDNEQKQLFVEQHKHYLDEIIEQISEFSKRVILADANLDKVLSAYNKHRDKPIREQAENIIHLFTLTNLGAPAAFKYFDTTIDRKRYTSTKEVLDATLIHQSITGLYETRIDLSQLGGDGGEAAAKGGTLNIEDEYRLHETSKEPDVSLGSTWLSDFPQAWAETGGMGLAVRQAPLIIPLKATSTPVSIKQYPMSQEARLGIKPHIQRLLDQGILVPCQSPWNTPLLPVKKPGTNDYRPVQDLREVNKRVEDIHPTVPNPYNLLSGLPPSHQWYTVLDLKDAFFCLRLHPTSQPLFAFEWRDPEMGISGQLTWTRLPQGFKNSPTLFNEALHRDLADFRIQHPDLILLQYVDDLLLAATSELDCQQGTRALLQTLGNLGYRASAKKAQICQKQVKYLGYLLKEGQRWLTEARKETVMGQPTPKTPRQLREFLGKAGFCRLFIPGFAEMAAPLYPLTKPGTLFNWGPDQQKAYQEIKQALLTAPALGLPDLTKPFELFVDEKQGYAKGVLTQKLGPWRRPVAYLSKKLDPVAAGWPPCLRMVAAIAVLTKDAGKLTMGQPLVILAPHAVEALVKQPPDRWLSNARMTHYQALLLDTDRVQFGPVVALNPATLLPLPEEGLQHNCLDILAEAHGTRPDLTDQPLPDADHTWYTDGSSLLQEGQRKAGAAVTTETEVIWAKALPAGTSAQRAELIALTQALKMAEGKKLNVYTDSRYAFATAHIHGEIYRRRGWLTSEGKEIKNKDEILALLKALFLPKRLSIIHCPGHQKGHSAEARGNRMADQAARKAAITETPDTSTLLIENSSPSGGSKRTADGSEFEAGKRTADGSEFEKRTADGSEFESPKKKAKVE

SEQ ID NO: 2621 - protein, 2111 aa, synthetic construct
MPAAKRVKLDGGDKKYSIGLDIGTNSVGWAVITDEYKVPSKKFKVLGNTDRHSIKKNLIGALLFDSGETAEATRLKRTARRRYTRRKNRICYLQEIFSNEMAKVDDSFFHRLEESFLVEEDKKHERHPIFGNIVDEVAYHEKYPTIYHLRKKLVDSTDKADLRLIYLALAHMIKFRGHFLIEGDLNPDNSDVDKLFIQLVQTYNQLFEENPINASGVDAKAILSARLSKSRRLENLIAQLPGEKKNGLFGNLIALSLGLTPNFKSNFDLAEDAKLQLSKDTYDDDLDNLLAQIGDQYADLFLAAKNLSDAILLSDILRVNTEITKAPLSASMIKRYDEHHQDLTLLKALVRQQLPEKYKEIFFDQSKNGYAGYIDGGASQEEFYKFIKPILEKMDGTEELLVKLNREDLLRKQRTFDNGSIPHQIHLGELHAILRRQEDFYPFLKDNREKIEKILTFRIPYYVGPLARGNSRFAWMTRKSEETITPWNFEEVVDKGASAQSFIERMTNFDKNLPNEKVLPKHSLLYEYFTVYNELTKVKYVTEGMRKPAFLSGEQKKAIVDLLFKTNRKVTVKQLKEDYFKKIECFDSVEISGVEDRFNASLGTYHDLLKIIKDKDFLDNEENEDILEDIVLTLTLFEDREMIEERLKTYAHLFDDKVMKQLKRRRYTGWGRLSRKLINGIRDKQSGKTILDFLKSDGFANRNFMQLIHDDSLTFKEDIQKAQVSGQGDSLHEHIANLAGSPAIKKGILQTVKVVDELVKVMGRHKPENIVIEMARENQTTQKGQKNSRERMKRIEEGIKELGSQILKEHPVENTQLQNEKLYLYYLQNGRDMYVDQELDINRLSDYDVDHIVPQSFLKDDSIDNKVLTRSDKARGKSDNVPSEEVVKKMKNYWRQLLNAKLITQRKFDNLTKAERGGLSELDKAGFIKRQLVETRQITKHVAQILDSRMNTKYDENDKLIREVKVITLKSKLVSDFRKDFQFYKVREINNYHHAHDAYLNAVVGTALIKKYPKLESEFVYGDYKVYDVRKMIAKSEQEIGKATAKYFFYSNIMNFFKTEITLANGEIRKRPLIETNGETGEIVWDKGRDFATVRKVLSMPQVNIVKKTEVQTGGFSKESILPKRNSDKLIARKKDWDPKKYGGFDSPTVAYSVLVVAKVEKGKSKKLKSVKELLGITIMERSSFEKNPIDFLEAKGYKEVKKDLIIKLPKYSLFELENGRKRMLASAGELQKGNELALPSKYVNFLYLASHYEKLKGSPEDNEQKQLFVEQHKHYLDEIIEQISEFSKRVILADANLDKVLSAYNKHRDKPIREQAENIIHLFTLTNLGAPAAFKYFDTTIDRKRYTSTKEVLDATLIHQSITGLYETRIDLSQLGGDGGGGGGSSGGTLNIEDEYRLHETSKEPDVSLGSTWLSDFPQAWAETGGMGLAVRQAPLIIPLKATSTPVSIKQYPMSQEARLGIKPHIQRLLDQGILVPCQSPWNTPLLPVKKPGTNDYRPVQDLREVNKRVEDIHPTVPNPYNLLSGLPPSHQWYTVLDLKDAFFCLRLHPTSQPLFAFEWRDPEMGISGQLTWTRLPQGFKNSPTLFNEALHRDLADFRIQHPDLILLQYVDDLLLAATSELDCQQGTRALLQTLGNLGYRASAKKAQICQKQVKYLGYLLKEGQRWLTEARKETVMGQPTPKTPRQLREFLGKAGFCRLFIPGFAEMAAPLYPLTKPGTLFNWGPDQQKAYQEIKQALLTAPALGLPDLTKPFELFVDEKQGYAKGVLTQKLGPWRRPVAYLSKKLDPVAAGWPPCLRMVAAIAVLTKDAGKLTMGQPLVILAPHAVEALVKQPPDRWLSNARMTHYQALLLDTDRVQFGPVVALNPATLLPLPEEGLQHNCLDILAEAHGTRPDLTDQPLPDADHTWYTDGSSLLQEGQRKAGAAVTTETEVIWAKALPAGTSAQRAELIALTQALKMAEGKKLNVYTDSRYAFATAHIHGEIYRRRGWLTSEGKEIKNKDEILALLKALFLPKRLSIIHCPGHQKGHSAEARGNRMADQAARKAAITETPDTSTLLIENSSPSGGSKRTADGSEFEAGKRTADGSEFEKRTADGSEFESPKKKAKVE

SEQ ID NO: 2622 - protein, 2114 aa, synthetic construct
MPAAKRVKLDGGDKKYSIGLDIGTNSVGWAVITDEYKVPSKKFKVLGNTDRHSIKKNLIGALLFDSGETAEATRLKRTARRRYTRRKNRICYLQEIFSNEMAKVDDSFFHRLEESFLVEEDKKHERHPIFGNIVDEVAYHEKYPTIYHLRKKLVDSTDKADLRLIYLALAHMIKFRGHFLIEGDLNPDNSDVDKLFIQLVQTYNQLFEENPINASGVDAKAILSARLSKSRRLENLIAQLPGEKKNGLFGNLIALSLGLTPNFKSNFDLAEDAKLQLSKDTYDDDLDNLLAQIGDQYADLFLAAKNLSDAILLSDILRVNTEITKAPLSASMIKRYDEHHQDLTLLKALVRQQLPEKYKEIFFDQSKNGYAGYIDGGASQEEFYKFIKPILEKMDGTEELLVKLNREDLLRKQRTFDNGSIPHQIHLGELHAILRRQEDFYPFLKDNREKIEKILTFRIPYYVGPLARGNSRFAWMTRKSEETITPWNFEEVVDKGASAQSFIERMTNFDKNLPNEKVLPKHSLLYEYFTVYNELTKVKYVTEGMRKPAFLSGEQKKAIVDLLFKTNRKVTVKQLKEDYFKKIECFDSVEISGVEDRFNASLGTYHDLLKIIKDKDFLDNEENEDILEDIVLTLTLFEDREMIEERLKTYAHLFDDKVMKQLKRRRYTGWGRLSRKLINGIRDKQSGKTILDFLKSDGFANRNFMQLIHDDSLTFKEDIQKAQVSGQGDSLHEHIANLAGSPAIKKGILQTVKVVDELVKVMGRHKPENIVIEMARENQTTQKGQKNSRERMKRIEEGIKELGSQILKEHPVENTQLQNEKLYLYYLQNGRDMYVDQELDINRLSDYDVDHIVPQSFLKDDSIDNKVLTRSDKARGKSDNVPSEEVVKKMKNYWRQLLNAKLITQRKFDNLTKAERGGLSELDKAGFIKRQLVETRQITKHVAQILDSRMNTKYDENDKLIREVKVITLKSKLVSDFRKDFQFYKVREINNYHHAHDAYLNAVVGTALIKKYPKLESEFVYGDYKVYDVRKMIAKSEQEIGKATAKYFFYSNIMNFFKTEITLANGEIRKRPLIETNGETGEIVWDKGRDFATVRKVLSMPQVNIVKKTEVQTGGFSKESILPKRNSDKLIARKKDWDPKKYGGFDSPTVAYSVLVVAKVEKGKSKKLKSVKELLGITIMERSSFEKNPIDFLEAKGYKEVKKDLIIKLPKYSLFELENGRKRMLASAGELQKGNELALPSKYVNFLYLASHYEKLKGSPEDNEQKQLFVEQHKHYLDEIIEQISEFSKRVILADANLDKVLSAYNKHRDKPIREQAENIIHLFTLTNLGAPAAFKYFDTTIDRKRYTSTKEVLDATLIHQSITGLYETRIDLSQLGGDGGGGSGGGPAPGGTLNIEDEYRLHETSKEPDVSLGSTWLSDFPQAWAETGGMGLAVRQAPLIIPLKATSTPVSIKQYPMSQEARLGIKPHIQRLLDQGILVPCQSPWNTPLLPVKKPGTNDYRPVQDLREVNKRVEDIHPTVPNPYNLLSGLPPSHQWYTVLDLKDAFFCLRLHPTSQPLFAFEWRDPEMGISGQLTWTRLPQGFKNSPTLFNEALHRDLADFRIQHPDLILLQYVDDLLLAATSELDCQQGTRALLQTLGNLGYRASAKKAQICQKQVKYLGYLLKEGQRWLTEARKETVMGQPTPKTPRQLREFLGKAGFCRLFIPGFAEMAAPLYPLTKPGTLFNWGPDQQKAYQEIKQALLTAPALGLPDLTKPFELFVDEKQGYAKGVLTQKLGPWRRPVAYLSKKLDPVAAGWPPCLRMVAAIAVLTKDAGKLTMGQPLVILAPHAVEALVKQPPDRWLSNARMTHYQALLLDTDRVQFGPVVALNPATLLPLPEEGLQHNCLDILAEAHGTRPDLTDQPLPDADHTWYTDGSSLLQEGQRKAGAAVTTETEVIWAKALPAGTSAQRAELIALTQALKMAEGKKLNVYTDSRYAFATAHIHGEIYRRRGWLTSEGKEIKNKDEILALLKALFLPKRLSIIHCPGHQKGHSAEARGNRMADQAARKAAITETPDTSTLLIENSSPSGGSKRTADGSEFEAGKRTADGSEFEKRTADGSEFESPKKKAKVE

SEQ ID NO: 2623 - protein, 2120 aa, synthetic construct
MPAAKRVKLDGGDKKYSIGLDIGTNSVGWAVITDEYKVPSKKFKVLGNTDRHSIKKNLIGALLFDSGETAEATRLKRTARRRYTRRKNRICYLQEIFSNEMAKVDDSFFHRLEESFLVEEDKKHERHPIFGNIVDEVAYHEKYPTIYHLRKKLVDSTDKADLRLIYLALAHMIKFRGHFLIEGDLNPDNSDVDKLFIQLVQTYNQLFEENPINASGVDAKAILSARLSKSRRLENLIAQLPGEKKNGLFGNLIALSLGLTPNFKSNFDLAEDAKLQLSKDTYDDDLDNLLAQIGDQYADLFLAAKNLSDAILLSDILRVNTEITKAPLSASMIKRYDEHHQDLTLLKALVRQQLPEKYKEIFFDQSKNGYAGYIDGGASQEEFYKFIKPILEKMDGTEELLVKLNREDLLRKQRTFDNGSIPHQIHLGELHAILRRQEDFYPFLKDNREKIEKILTFRIPYYVGPLARGNSRFAWMTRKSEETITPWNFEEVVDKGASAQSFIERMTNFDKNLPNEKVLPKHSLLYEYFTVYNELTKVKYVTEGMRKPAFLSGEQKKAIVDLLFKTNRKVTVKQLKEDYFKKIECFDSVEISGVEDRFNASLGTYHDLLKIIKDKDFLDNEENEDILEDIVLTLTLFEDREMIEERLKTYAHLFDDKVMKQLKRRRYTGWGRLSRKLINGIRDKQSGKTILDFLKSDGFANRNFMQLIHDDSLTFKEDIQKAQVSGQGDSLHEHIANLAGSPAIKKGILQTVKVVDELVKVMGRHKPENIVIEMARENQTTQKGQKNSRERMKRIEEGIKELGSQILKEHPVENTQLQNEKLYLYYLQNGRDMYVDQELDINRLSDYDVDHIVPQSFLKDDSIDNKVLTRSDKARGKSDNVPSEEVVKKMKNYWRQLLNAKLITQRKFDNLTKAERGGLSELDKAGFIKRQLVETRQITKHVAQILDSRMNTKYDENDKLIREVKVITLKSKLVSDFRKDFQFYKVREINNYHHAHDAYLNAVVGTALIKKYPKLESEFVYGDYKVYDVRKMIAKSEQEIGKATAKYFFYSNIMNFFKTEITLANGEIRKRPLIETNGETGEIVWDKGRDFATVRKVLSMPQVNIVKKTEVQTGGFSKESILPKRNSDKLIARKKDWDPKKYGGFDSPTVAYSVLVVAKVEKGKSKKLKSVKELLGITIMERSSFEKNPIDFLEAKGYKEVKKDLIIKLPKYSLFELENGRKRMLASAGELQKGNELALPSKYVNFLYLASHYEKLKGSPEDNEQKQLFVEQHKHYLDEIIEQISEFSKRVILADANLDKVLSAYNKHRDKPIREQAENIIHLFTLTNLGAPAAFKYFDTTIDRKRYTSTKEVLDATLIHQSITGLYETRIDLSQLGGDGGEAAAKGGGGSEAAAKGGTLNIEDEYRLHETSKEPDVSLGSTWLSDFPQAWAETGGMGLAVRQAPLIIPLKATSTPVSIKQYPMSQEARLGIKPHIQRLLDQGILVPCQSPWNTPLLPVKKPGTNDYRPVQDLREVNKRVEDIHPTVPNPYNLLSGLPPSHQWYTVLDLKDAFFCLRLHPTSQPLFAFEWRDPEMGISGQLTWTRLPQGFKNSPTLFNEALHRDLADFRIQHPDLILLQYVDDLLLAATSELDCQQGTRALLQTLGNLGYRASAKKAQICQKQVKYLGYLLKEGQRWLTEARKETVMGQPTPKTPRQLREFLGKAGFCRLFIPGFAEMAAPLYPLTKPGTLFNWGPDQQKAYQEIKQALLTAPALGLPDLTKPFELFVDEKQGYAKGVLTQKLGPWRRPVAYLSKKLDPVAAGWPPCLRMVAAIAVLTKDAGKLTMGQPLVILAPHAVEALVKQPPDRWLSNARMTHYQALLLDTDRVQFGPVVALNPATLLPLPEEGLQHNCLDILAEAHGTRPDLTDQPLPDADHTWYTDGSSLLQEGQRKAGAAVTTETEVIWAKALPAGTSAQRAELIALTQALKMAEGKKLNVYTDSRYAFATAHIHGEIYRRRGWLTSEGKEIKNKDEILALLKALFLPKRLSIIHCPGHQKGHSAEARGNRMADQAARKAAITETPDTSTLLIENSSPSGGSKRTADGSEFEAGKRTADGSEFEKRTADGSEFESPKKKAKVE

SEQ ID NO: 2624 - protein, 2108 aa, synthetic construct
MPAAKRVKLDGGDKKYSIGLDIGTNSVGWAVITDEYKVPSKKFKVLGNTDRHSIKKNLIGALLFDSGETAEATRLKRTARRRYTRRKNRICYLQEIFSNEMAKVDDSFFHRLEESFLVEEDKKHERHPIFGNIVDEVAYHEKYPTIYHLRKKLVDSTDKADLRLIYLALAHMIKFRGHFLIEGDLNPDNSDVDKLFIQLVQTYNQLFEENPINASGVDAKAILSARLSKSRRLENLIAQLPGEKKNGLFGNLIALSLGLTPNFKSNFDLAEDAKLQLSKDTYDDDLDNLLAQIGDQYADLFLAAKNLSDAILLSDILRVNTEITKAPLSASMIKRYDEHHQDLTLLKALVRQQLPEKYKEIFFDQSKNGYAGYIDGGASQEEFYKFIKPILEKMDGTEELLVKLNREDLLRKQRTFDNGSIPHQIHLGELHAILRRQEDFYPFLKDNREKIEKILTFRIPYYVGPLARGNSRFAWMTRKSEETITPWNFEEVVDKGASAQSFIERMTNFDKNLPNEKVLPKHSLLYEYFTVYNELTKVKYVTEGMRKPAFLSGEQKKAIVDLLFKTNRKVTVKQLKEDYFKKIECFDSVEISGVEDRFNASLGTYHDLLKIIKDKDFLDNEENEDILEDIVLTLTLFEDREMIEERLKTYAHLFDDKVMKQLKRRRYTGWGRLSRKLINGIRDKQSGKTILDFLKSDGFANRNFMQLIHDDSLTFKEDIQKAQVSGQGDSLHEHIANLAGSPAIKKGILQTVKVVDELVKVMGRHKPENIVIEMARENQTTQKGQKNSRERMKRIEEGIKELGSQILKEHPVENTQLQNEKLYLYYLQNGRDMYVDQELDINRLSDYDVDHIVPQSFLKDDSIDNKVLTRSDKARGKSDNVPSEEVVKKMKNYWRQLLNAKLITQRKFDNLTKAERGGLSELDKAGFIKRQLVETRQITKHVAQILDSRMNTKYDENDKLIREVKVITLKSKLVSDFRKDFQFYKVREINNYHHAHDAYLNAVVGTALIKKYPKLESEFVYGDYKVYDVRKMIAKSEQEIGKATAKYFFYSNIMNFFKTEITLANGEIRKRPLIETNGETGEIVWDKGRDFATVRKVLSMPQVNIVKKTEVQTGGFSKESILPKRNSDKLIARKKDWDPKKYGGFDSPTVAYSVLVVAKVEKGKSKKLKSVKELLGITIMERSSFEKNPIDFLEAKGYKEVKKDLIIKLPKYSLFELENGRKRMLASAGELQKGNELALPSKYVNFLYLASHYEKLKGSPEDNEQKQLFVEQHKHYLDEIIEQISEFSKRVILADANLDKVLSAYNKHRDKPIREQAENIIHLFTLTNLGAPAAFKYFDTTIDRKRYTSTKEVLDATLIHQSITGLYETRIDLSQLGGDGGPAPGGTLNIEDEYRLHETSKEPDVSLGSTWLSDFPQAWAETGGMGLAVRQAPLIIPLKATSTPVSIKQYPMSQEARLGIKPHIQRLLDQGILVPCQSPWNTPLLPVKKPGTNDYRPVQDLREVNKRVEDIHPTVPNPYNLLSGLPPSHQWYTVLDLKDAFFCLRLHPTSQPLFAFEWRDPEMGISGQLTWTRLPQGFKNSPTLFNEALHRDLADFRIQHPDLILLQYVDDLLLAATSELDCQQGTRALLQTLGNLGYRASAKKAQICQKQVKYLGYLLKEGQRWLTEARKETVMGQPTPKTPRQLREFLGKAGFCRLFIPGFAEMAAPLYPLTKPGTLFNWGPDQQKAYQEIKQALLTAPALGLPDLTKPFELFVDEKQGYAKGVLTQKLGPWRRPVAYLSKKLDPVAAGWPPCLRMVAAIAVLTKDAGKLTMGQPLVILAPHAVEALVKQPPDRWLSNARMTHYQALLLDTDRVQFGPVVALNPATLLPLPEEGLQHNCLDILAEAHGTRPDLTDQPLPDADHTWYTDGSSLLQEGQRKAGAAVTTETEVIWAKALPAGTSAQRAELIALTQALKMAEGKKLNVYTDSRYAFATAHIHGEIYRRRGWLTSEGKEIKNKDEILALLKALFLPKRLSIIHCPGHQKGHSAEARGNRMADQAARKAAITETPDTSTLLIENSSPSGGSKRTADGSEFEAGKRTADGSEFEKRTADGSEFESPKKKAKVE

SEQ ID NO: 2625 - protein, 2113 aa, synthetic construct
MPAAKRVKLDGGDKKYSIGLDIGTNSVGWAVITDEYKVPSKKFKVLGNTDRHSIKKNLIGALLFDSGETAEATRLKRTARRRYTRRKNRICYLQEIFSNEMAKVDDSFFHRLEESFLVEEDKKHERHPIFGNIVDEVAYHEKYPTIYHLRKKLVDSTDKADLRLIYLALAHMIKFRGHFLIEGDLNPDNSDVDKLFIQLVQTYNQLFEENPINASGVDAKAILSARLSKSRRLENLIAQLPGEKKNGLFGNLIALSLGLTPNFKSNFDLAEDAKLQLSKDTYDDDLDNLLAQIGDQYADLFLAAKNLSDAILLSDILRVNTEITKAPLSASMIKRYDEHHQDLTLLKALVRQQLPEKYKEIFFDQSKNGYAGYIDGGASQEEFYKFIKPILEKMDGTEELLVKLNREDLLRKQRTFDNGSIPHQIHLGELHAILRRQEDFYPFLKDNREKIEKILTFRIPYYVGPLARGNSRFAWMTRKSEETITPWNFEEVVDKGASAQSFIERMTNFDKNLPNEKVLPKHSLLYEYFTVYNELTKVKYVTEGMRKPAFLSGEQKKAIVDLLFKTNRKVTVKQLKEDYFKKIECFDSVEISGVEDRFNASLGTYHDLLKIIKDKDFLDNEENEDILEDIVLTLTLFEDREMIEERLKTYAHLFDDKVMKQLKRRRYTGWGRLSRKLINGIRDKQSGKTILDFLKSDGFANRNFMQLIHDDSLTFKEDIQKAQVSGQGDSLHEHIANLAGSPAIKKGILQTVKVVDELVKVMGRHKPENIVIEMARENQTTQKGQKNSRERMKRIEEGIKELGSQILKEHPVENTQLQNEKLYLYYLQNGRDMYVDQELDINRLSDYDVDHIVPQSFLKDDSIDNKVLTRSDKARGKSDNVPSEEVVKKMKNYWRQLLNAKLITQRKFDNLTKAERGGLSELDKAGFIKRQLVETRQITKHVAQILDSRMNTKYDENDKLIREVKVITLKSKLVSDFRKDFQFYKVREINNYHHAHDAYLNAVVGTALIKKYPKLESEFVYGDYKVYDVRKMIAKSEQEIGKATAKYFFYSNIMNFFKTEITLANGEIRKRPLIETNGETGEIVWDKGRDFATVRKVLSMPQVNIVKKTEVQTGGFSKESILPKRNSDKLIARKKDWDPKKYGGFDSPTVAYSVLVVAKVEKGKSKKLKSVKELLGITIMERSSFEKNPIDFLEAKGYKEVKKDLIIKLPKYSLFELENGRKRMLASAGELQKGNELALPSKYVNFLYLASHYEKLKGSPEDNEQKQLFVEQHKHYLDEIIEQISEFSKRVILADANLDKVLSAYNKHRDKPIREQAENIIHLFTLTNLGAPAAFKYFDTTIDRKRYTSTKEVLDATLIHQSITGLYETRIDLSQLGGDGGEAAAKGSSGGTLNIEDEYRLHETSKEPDVSLGSTWLSDFPQAWAETGGMGLAVRQAPLIIPLKATSTPVSIKQYPMSQEARLGIKPHIQRLLDQGILVPCQSPWNTPLLPVKKPGTNDYRPVQDLREVNKRVEDIHPTVPNPYNLLSGLPPSHQWYTVLDLKDAFFCLRLHPTSQPLFAFEWRDPEMGISGQLTWTRLPQGFKNSPTLFNEALHRDLADFRIQHPDLILLQYVDDLLLAATSELDCQQGTRALLQTLGNLGYRASAKKAQICQKQVKYLGYLLKEGQRWLTEARKETVMGQPTPKTPRQLREFLGKAGFCRLFIPGFAEMAAPLYPLTKPGTLFNWGPDQQKAYQEIKQALLTAPALGLPDLTKPFELFVDEKQGYAKGVLTQKLGPWRRPVAYLSKKLDPVAAGWPPCLRMVAAIAVLTKDAGKLTMGQPLVILAPHAVEALVKQPPDRWLSNARMTHYQALLLDTDRVQFGPVVALNPATLLPLPEEGLQHNCLDILAEAHGTRPDLTDQPLPDADHTWYTDGSSLLQEGQRKAGAAVTTETEVIWAKALPAGTSAQRAELIALTQALKMAEGKKLNVYTDSRYAFATAHIHGEIYRRRGWLTSEGKEIKNKDEILALLKALFLPKRLSIIHCPGHQKGHSAEARGNRMADQAARKAAITETPDTSTLLIENSSPSGGSKRTADGSEFEAGKRTADGSEFEKRTADGSEFESPKKKAKVE

SEQ ID NO: 2626 - protein, 2113 aa, synthetic construct
MPAAKRVKLDGGDKKYSIGLDIGTNSVGWAVITDEYKVPSKKFKVLGNTDRHSIKKNLIGALLFDSGETAEATRLKRTARRRYTRRKNRICYLQEIFSNEMAKVDDSFFHRLEESFLVEEDKKHERHPIFGNIVDEVAYHEKYPTIYHLRKKLVDSTDKADLRLIYLALAHMIKFRGHFLIEGDLNPDNSDVDKLFIQLVQTYNQLFEENPINASGVDAKAILSARLSKSRRLENLIAQLPGEKKNGLFGNLIALSLGLTPNFKSNFDLAEDAKLQLSKDTYDDDLDNLLAQIGDQYADLFLAAKNLSDAILLSDILRVNTEITKAPLSASMIKRYDEHHQDLTLLKALVRQQLPEKYKEIFFDQSKNGYAGYIDGGASQEEFYKFIKPILEKMDGTEELLVKLNREDLLRKQRTFDNGSIPHQIHLGELHAILRRQEDFYPFLKDNREKIEKILTFRIPYYVGPLARGNSRFAWMTRKSEETITPWNFEEVVDKGASAQSFIERMTNFDKNLPNEKVLPKHSLLYEYFTVYNELTKVKYVTEGMRKPAFLSGEQKKAIVDLLFKTNRKVTVKQLKEDYFKKIECFDSVEISGVEDRFNASLGTYHDLLKIIKDKDFLDNEENEDILEDIVLTLTLFEDREMIEERLKTYAHLFDDKVMKQLKRRRYTGWGRLSRKLINGIRDKQSGKTILDFLKSDGFANRNFMQLIHDDSLTFKEDIQKAQVSGQGDSLHEHIANLAGSPAIKKGILQTVKVVDELVKVMGRHKPENIVIEMARENQTTQKGQKNSRERMKRIEEGIKELGSQILKEHPVENTQLQNEKLYLYYLQNGRDMYVDQELDINRLSDYDVDHIVPQSFLKDDSIDNKVLTRSDKARGKSDNVPSEEVVKKMKNYWRQLLNAKLITQRKFDNLTKAERGGLSELDKAGFIKRQLVETRQITKHVAQILDSRMNTKYDENDKLIREVKVITLKSKLVSDFRKDFQFYKVREINNYHHAHDAYLNAVVGTALIKKYPKLESEFVYGDYKVYDVRKMIAKSEQEIGKATAKYFFYSNIMNFFKTEITLANGEIRKRPLIETNGETGEIVWDKGRDFATVRKVLSMPQVNIVKKTEVQTGGFSKESILPKRNSDKLIARKKDWDPKKYGGFDSPTVAYSVLVVAKVEKGKSKKLKSVKELLGITIMERSSFEKNPIDFLEAKGYKEVKKDLIIKLPKYSLFELENGRKRMLASAGELQKGNELALPSKYVNFLYLASHYEKLKGSPEDNEQKQLFVEQHKHYLDEIIEQISEFSKRVILADANLDKVLSAYNKHRDKPIREQAENIIHLFTLTNLGAPAAFKYFDTTIDRKRYTSTKEVLDATLIHQSITGLYETRIDLSQLGGDGGGGGGGGGGGGTLNIEDEYRLHETSKEPDVSLGSTWLSDFPQAWAETGGMGLAVRQAPLIIPLKATSTPVSIKQYPMSQEARLGIKPHIQRLLDQGILVPCQSPWNTPLLPVKKPGTNDYRPVQDLREVNKRVEDIHPTVPNPYNLLSGLPPSHQWYTVLDLKDAFFCLRLHPTSQPLFAFEWRDPEMGISGQLTWTRLPQGFKNSPTLFNEALHRDLADFRIQHPDLILLQYVDDLLLAATSELDCQQGTRALLQTLGNLGYRASAKKAQICQKQVKYLGYLLKEGQRWLTEARKETVMGQPTPKTPRQLREFLGKAGFCRLFIPGFAEMAAPLYPLTKPGTLFNWGPDQQKAYQEIKQALLTAPALGLPDLTKPFELFVDEKQGYAKGVLTQKLGPWRRPVAYLSKKLDPVAAGWPPCLRMVAAIAVLTKDAGKLTMGQPLVILAPHAVEALVKQPPDRWLSNARMTHYQALLLDTDRVQFGPVVALNPATLLPLPEEGLQHNCLDILAEAHGTRPDLTDQPLPDADHTWYTDGSSLLQEGQRKAGAAVTTETEVIWAKALPAGTSAQRAELIALTQALKMAEGKKLNVYTDSRYAFATAHIHGEIYRRRGWLTSEGKEIKNKDEILALLKALFLPKRLSIIHCPGHQKGHSAEARGNRMADQAARKAAITETPDTSTLLIENSSPSGGSKRTADGSEFEAGKRTADGSEFEKRTADGSEFESPKKKAKVE

SEQ ID NO: 2627 - protein, 2120 aa, synthetic construct
MPAAKRVKLDGGDKKYSIGLDIGTNSVGWAVITDEYKVPSKKFKVLGNTDRHSIKKNLIGALLFDSGETAEATRLKRTARRRYTRRKNRICYLQEIFSNEMAKVDDSFFHRLEESFLVEEDKKHERHPIFGNIVDEVAYHEKYPTIYHLRKKLVDSTDKADLRLIYLALAHMIKFRGHFLIEGDLNPDNSDVDKLFIQLVQTYNQLFEENPINASGVDAKAILSARLSKSRRLENLIAQLPGEKKNGLFGNLIALSLGLTPNFKSNFDLAEDAKLQLSKDTYDDDLDNLLAQIGDQYADLFLAAKNLSDAILLSDILRVNTEITKAPLSASMIKRYDEHHQDLTLLKALVRQQLPEKYKEIFFDQSKNGYAGYIDGGASQEEFYKFIKPILEKMDGTEELLVKLNREDLLRKQRTFDNGSIPHQIHLGELHAILRRQEDFYPFLKDNREKIEKILTFRIPYYVGPLARGNSRFAWMTRKSEETITPWNFEEVVDKGASAQSFIERMTNFDKNLPNEKVLPKHSLLYEYFTVYNELTKVKYVTEGMRKPAFLSGEQKKAIVDLLFKTNRKVTVKQLKEDYFKKIECFDSVEISGVEDRFNASLGTYHDLLKIIKDKDFLDNEENEDILEDIVLTLTLFEDREMIEERLKTYAHLFDDKVMKQLKRRRYTGWGRLSRKLINGIRDKQSGKTILDFLKSDGFANRNFMQLIHDDSLTFKEDIQKAQVSGQGDSLHEHIANLAGSPAIKKGILQTVKVVDELVKVMGRHKPENIVIEMARENQTTQKGQKNSRERMKRIEEGIKELGSQILKEHPVENTQLQNEKLYLYYLQNGRDMYVDQELDINRLSDYDVDHIVPQSFLKDDSIDNKVLTRSDKARGKSDNVPSEEVVKKMKNYWRQLLNAKLITQRKFDNLTKAERGGLSELDKAGFIKRQLVETRQITKHVAQILDSRMNTKYDENDKLIREVKVITLKSKLVSDFRKDFQFYKVREINNYHHAHDAYLNAVVGTALIKKYPKLESEFVYGDYKVYDVRKMIAKSEQEIGKATAKYFFYSNIMNFFKTEITLANGEIRKRPLIETNGETGEIVWDKGRDFATVRKVLSMPQVNIVKKTEVQTGGFSKESILPKRNSDKLIARKKDWDPKKYGGFDSPTVAYSVLVVAKVEKGKSKKLKSVKELLGITIMERSSFEKNPIDFLEAKGYKEVKKDLIIKLPKYSLFELENGRKRMLASAGELQKGNELALPSKYVNFLYLASHYEKLKGSPEDNEQKQLFVEQHKHYLDEIIEQISEFSKRVILADANLDKVLSAYNKHRDKPIREQAENIIHLFTLTNLGAPAAFKYFDTTIDRKRYTSTKEVLDATLIHQSITGLYETRIDLSQLGGDGGEAAAKEAAAKEAAAKGGTLNIEDEYRLHETSKEPDVSLGSTWLSDFPQAWAETGGMGLAVRQAPLIIPLKATSTPVSIKQYPMSQEARLGIKPHIQRLLDQGILVPCQSPWNTPLLPVKKPGTNDYRPVQDLREVNKRVEDIHPTVPNPYNLLSGLPPSHQWYTVLDLKDAFFCLRLHPTSQPLFAFEWRDPEMGISGQLTWTRLPQGFKNSPTLFNEALHRDLADFRIQHPDLILLQYVDDLLLAATSELDCQQGTRALLQTLGNLGYRASAKKAQICQKQVKYLGYLLKEGQRWLTEARKETVMGQPTPKTPRQLREFLGKAGFCRLFIPGFAEMAAPLYPLTKPGTLFNWGPDQQKAYQEIKQALLTAPALGLPDLTKPFELFVDEKQGYAKGVLTQKLGPWRRPVAYLSKKLDPVAAGWPPCLRMVAAIAVLTKDAGKLTMGQPLVILAPHAVEALVKQPPDRWLSNARMTHYQALLLDTDRVQFGPVVALNPATLLPLPEEGLQHNCLDILAEAHGTRPDLTDQPLPDADHTWYTDGSSLLQEGQRKAGAAVTTETEVIWAKALPAGTSAQRAELIALTQALKMAEGKKLNVYTDSRYAFATAHIHGEIYRRRGWLTSEGKEIKNKDEILALLKALFLPKRLSIIHCPGHQKGHSAEARGNRMADQAARKAAITETPDTSTLLIENSSPSGGSKRTADGSEFEAGKRTADGSEFEKRTADGSEFESPKKKAKVE

SEQ ID NO: 2628 - protein, 2116 aa, synthetic construct
MPAAKRVKLDGGDKKYSIGLDIGTNSVGWAVITDEYKVPSKKFKVLGNTDRHSIKKNLIGALLFDSGETAEATRLKRTARRRYTRRKNRICYLQEIFSNEMAKVDDSFFHRLEESFLVEEDKKHERHPIFGNIVDEVAYHEKYPTIYHLRKKLVDSTDKADLRLIYLALAHMIKFRGHFLIEGDLNPDNSDVDKLFIQLVQTYNQLFEENPINASGVDAKAILSARLSKSRRLENLIAQLPGEKKNGLFGNLIALSLGLTPNFKSNFDLAEDAKLQLSKDTYDDDLDNLLAQIGDQYADLFLAAKNLSDAILLSDILRVNTEITKAPLSASMIKRYDEHHQDLTLLKALVRQQLPEKYKEIFFDQSKNGYAGYIDGGASQEEFYKFIKPILEKMDGTEELLVKLNREDLLRKQRTFDNGSIPHQIHLGELHAILRRQEDFYPFLKDNREKIEKILTFRIPYYVGPLARGNSRFAWMTRKSEETITPWNFEEVVDKGASAQSFIERMTNFDKNLPNEKVLPKHSLLYEYFTVYNELTKVKYVTEGMRKPAFLSGEQKKAIVDLLFKTNRKVTVKQLKEDYFKKIECFDSVEISGVEDRFNASLGTYHDLLKIIKDKDFLDNEENEDILEDIVLTLTLFEDREMIEERLKTYAHLFDDKVMKQLKRRRYTGWGRLSRKLINGIRDKQSGKTILDFLKSDGFANRNFMQLIHDDSLTFKEDIQKAQVSGQGDSLHEHIANLAGSPAIKKGILQTVKVVDELVKVMGRHKPENIVIEMARENQTTQKGQKNSRERMKRIEEGIKELGSQILKEHPVENTQLQNEKLYLYYLQNGRDMYVDQELDINRLSDYDVDHIVPQSFLKDDSIDNKVLTRSDKARGKSDNVPSEEVVKKMKNYWRQLLNAKLITQRKFDNLTKAERGGLSELDKAGFIKRQLVETRQITKHVAQILDSRMNTKYDENDKLIREVKVITLKSKLVSDFRKDFQFYKVREINNYHHAHDAYLNAVVGTALIKKYPKLESEFVYGDYKVYDVRKMIAKSEQEIGKATAKYFFYSNIMNFFKTEITLANGEIRKRPLIETNGETGEIVWDKGRDFATVRKVLSMPQVNIVKKTEVQTGGFSKESILPKRNSDKLIARKKDWDPKKYGGFDSPTVAYSVLVVAKVEKGKSKKLKSVKELLGITIMERSSFEKNPIDFLEAKGYKEVKKDLIIKLPKYSLFELENGRKRMLASAGELQKGNELALPSKYVNFLYLASHYEKLKGSPEDNEQKQLFVEQHKHYLDEIIEQISEFSKRVILADANLDKVLSAYNKHRDKPIREQAENIIHLFTLTNLGAPAAFKYFDTTIDRKRYTSTKEVLDATLIHQSITGLYETRIDLSQLGGDGGEAAAKPAPGSSGGTLNIEDEYRLHETSKEPDVSLGSTWLSDFPQAWAETGGMGLAVRQAPLIIPLKATSTPVSIKQYPMSQEARLGIKPHIQRLLDQGILVPCQSPWNTPLLPVKKPGTNDYRPVQDLREVNKRVEDIHPTVPNPYNLLSGLPPSHQWYTVLDLKDAFFCLRLHPTSQPLFAFEWRDPEMGISGQLTWTRLPQGFKNSPTLFNEALHRDLADFRIQHPDLILLQYVDDLLLAATSELDCQQGTRALLQTLGNLGYRASAKKAQICQKQVKYLGYLLKEGQRWLTEARKETVMGQPTPKTPRQLREFLGKAGFCRLFIPGFAEMAAPLYPLTKPGTLFNWGPDQQKAYQEIKQALLTAPALGLPDLTKPFELFVDEKQGYAKGVLTQKLGPWRRPVAYLSKKLDPVAAGWPPCLRMVAAIAVLTKDAGKLTMGQPLVILAPHAVEALVKQPPDRWLSNARMTHYQALLLDTDRVQFGPVVALNPATLLPLPEEGLQHNCLDILAEAHGTRPDLTDQPLPDADHTWYTDGSSLLQEGQRKAGAAVTTETEVIWAKALPAGTSAQRAELIALTQALKMAEGKKLNVYTDSRYAFATAHIHGEIYRRRGWLTSEGKEIKNKDEILALLKALFLPKRLSIIHCPGHQKGHSAEARGNRMADQAARKAAITETPDTSTLLIENSSPSGGSKRTADGSEFEAGKRTADGSEFEKRTADGSEFESPKKKAKVE

SEQ ID NO: 2629 - protein, 2116 aa, synthetic construct
MPAAKRVKLDGGDKKYSIGLDIGTNSVGWAVITDEYKVPSKKFKVLGNTDRHSIKKNLIGALLFDSGETAEATRLKRTARRRYTRRKNRICYLQEIFSNEMAKVDDSFFHRLEESFLVEEDKKHERHPIFGNIVDEVAYHEKYPTIYHLRKKLVDSTDKADLRLIYLALAHMIKFRGHFLIEGDLNPDNSDVDKLFIQLVQTYNQLFEENPINASGVDAKAILSARLSKSRRLENLIAQLPGEKKNGLFGNLIALSLGLTPNFKSNFDLAEDAKLQLSKDTYDDDLDNLLAQIGDQYADLFLAAKNLSDAILLSDILRVNTEITKAPLSASMIKRYDEHHQDLTLLKALVRQQLPEKYKEIFFDQSKNGYAGYIDGGASQEEFYKFIKPILEKMDGTEELLVKLNREDLLRKQRTFDNGSIPHQIHLGELHAILRRQEDFYPFLKDNREKIEKILTFRIPYYVGPLARGNSRFAWMTRKSEETITPWNFEEVVDKGASAQSFIERMTNFDKNLPNEKVLPKHSLLYEYFTVYNELTKVKYVTEGMRKPAFLSGEQKKAIVDLLFKTNRKVTVKQLKEDYFKKIECFDSVEISGVEDRFNASLGTYHDLLKIIKDKDFLDNEENEDILEDIVLTLTLFEDREMIEERLKTYAHLFDDKVMKQLKRRRYTGWGRLSRKLINGIRDKQSGKTILDFLKSDGFANRNFMQLIHDDSLTFKEDIQKAQVSGQGDSLHEHIANLAGSPAIKKGILQTVKVVDELVKVMGRHKPENIVIEMARENQTTQKGQKNSRERMKRIEEGIKELGSQILKEHPVENTQLQNEKLYLYYLQNGRDMYVDQELDINRLSDYDVDHIVPQSFLKDDSIDNKVLTRSDKARGKSDNVPSEEVVKKMKNYWRQLLNAKLITQRKFDNLTKAERGGLSELDKAGFIKRQLVETRQITKHVAQILDSRMNTKYDENDKLIREVKVITLKSKLVSDFRKDFQFYKVREINNYHHAHDAYLNAVVGTALIKKYPKLESEFVYGDYKVYDVRKMIAKSEQEIGKATAKYFFYSNIMNFFKTEITLANGEIRKRPLIETNGETGEIVWDKGRDFATVRKVLSMPQVNIVKKTEVQTGGFSKESILPKRNSDKLIARKKDWDPKKYGGFDSPTVAYSVLVVAKVEKGKSKKLKSVKELLGITIMERSSFEKNPIDFLEAKGYKEVKKDLIIKLPKYSLFELENGRKRMLASAGELQKGNELALPSKYVNFLYLASHYEKLKGSPEDNEQKQLFVEQHKHYLDEIIEQISEFSKRVILADANLDKVLSAYNKHRDKPIREQAENIIHLFTLTNLGAPAAFKYFDTTIDRKRYTSTKEVLDATLIHQSITGLYETRIDLSQLGGDGGGGSEAAAKGGGGGTLNIEDEYRLHETSKEPDVSLGSTWLSDFPQAWAETGGMGLAVRQAPLIIPLKATSTPVSIKQYPMSQEARLGIKPHIQRLLDQGILVPCQSPWNTPLLPVKKPGTNDYRPVQDLREVNKRVEDIHPTVPNPYNLLSGLPPSHQWYTVLDLKDAFFCLRLHPTSQPLFAFEWRDPEMGISGQLTWTRLPQGFKNSPTLFNEALHRDLADFRIQHPDLILLQYVDDLLLAATSELDCQQGTRALLQTLGNLGYRASAKKAQICQKQVKYLGYLLKEGQRWLTEARKETVMGQPTPKTPRQLREFLGKAGFCRLFIPGFAEMAAPLYPLTKPGTLFNWGPDQQKAYQEIKQALLTAPALGLPDLTKPFELFVDEKQGYAKGVLTQKLGPWRRPVAYLSKKLDPVAAGWPPCLRMVAAIAVLTKDAGKLTMGQPLVILAPHAVEALVKQPPDRWLSNARMTHYQALLLDTDRVQFGPVVALNPATLLPLPEEGLQHNCLDILAEAHGTRPDLTDQPLPDADHTWYTDGSSLLQEGQRKAGAAVTTETEVIWAKALPAGTSAQRAELIALTQALKMAEGKKLNVYTDSRYAFATAHIHGEIYRRRGWLTSEGKEIKNKDEILALLKALFLPKRLSIIHCPGHQKGHSAEARGNRMADQAARKAAITETPDTSTLLIENSSPSGGSKRTADGSEFEAGKRTADGSEFEKRTADGSEFESPKKKAKVE

SEQ ID NO: 2630 - protein, 2135 aa, synthetic construct
MPAAKRVKLDGGDKKYSIGLDIGTNSVGWAVITDEYKVPSKKFKVLGNTDRHSIKKNLIGALLFDSGETAEATRLKRTARRRYTRRKNRICYLQEIFSNEMAKVDDSFFHRLEESFLVEEDKKHERHPIFGNIVDEVAYHEKYPTIYHLRKKLVDSTDKADLRLIYLALAHMIKFRGHFLIEGDLNPDNSDVDKLFIQLVQTYNQLFEENPINASGVDAKAILSARLSKSRRLENLIAQLPGEKKNGLFGNLIALSLGLTPNFKSNFDLAEDAKLQLSKDTYDDDLDNLLAQIGDQYADLFLAAKNLSDAILLSDILRVNTEITKAPLSASMIKRYDEHHQDLTLLKALVRQQLPEKYKEIFFDQSKNGYAGYIDGGASQEEFYKFIKPILEKMDGTEELLVKLNREDLLRKQRTFDNGSIPHQIHLGELHAILRRQEDFYPFLKDNREKIEKILTFRIPYYVGPLARGNSRFAWMTRKSEETITPWNFEEVVDKGASAQSFIERMTNFDKNLPNEKVLPKHSLLYEYFTVYNELTKVKYVTEGMRKPAFLSGEQKKAIVDLLFKTNRKVTVKQLKEDYFKKIECFDSVEISGVEDRFNASLGTYHDLLKIIKDKDFLDNEENEDILEDIVLTLTLFEDREMIEERLKTYAHLFDDKVMKQLKRRRYTGWGRLSRKLINGIRDKQSGKTILDFLKSDGFANRNFMQLIHDDSLTFKEDIQKAQVSGQGDSLHEHIANLAGSPAIKKGILQTVKVVDELVKVMGRHKPENIVIEMARENQTTQKGQKNSRERMKRIEEGIKELGSQILKEHPVENTQLQNEKLYLYYLQNGRDMYVDQELDINRLSDYDVDHIVPQSFLKDDSIDNKVLTRSDKARGKSDNVPSEEVVKKMKNYWRQLLNAKLITQRKFDNLTKAERGGLSELDKAGFIKRQLVETRQITKHVAQILDSRMNTKYDENDKLIREVKVITLKSKLVSDFRKDFQFYKVREINNYHHAHDAYLNAVVGTALIKKYPKLESEFVYGDYKVYDVRKMIAKSEQEIGKATAKYFFYSNIMNFFKTEITLANGEIRKRPLIETNGETGEIVWDKGRDFATVRKVLSMPQVNIVKKTEVQTGGFSKESILPKRNSDKLIARKKDWDPKKYGGFDSPTVAYSVLVVAKVEKGKSKKLKSVKELLGITIMERSSFEKNPIDFLEAKGYKEVKKDLIIKLPKYSLFELENGRKRMLASAGELQKGNELALPSKYVNFLYLASHYEKLKGSPEDNEQKQLFVEQHKHYLDEIIEQISEFSKRVILADANLDKVLSAYNKHRDKPIREQAENIIHLFTLTNLGAPAAFKYFDTTIDRKRYTSTKEVLDATLIHQSITGLYETRIDLSQLGGDGGEAAAKEAAAKEAAAKEAAAKEAAAKEAAAKGGTLNIEDEYRLHETSKEPDVSLGSTWLSDFPQAWAETGGMGLAVRQAPLIIPLKATSTPVSIKQYPMSQEARLGIKPHIQRLLDQGILVPCQSPWNTPLLPVKKPGTNDYRPVQDLREVNKRVEDIHPTVPNPYNLLSGLPPSHQWYTVLDLKDAFFCLRLHPTSQPLFAFEWRDPEMGISGQLTWTRLPQGFKNSPTLFNEALHRDLADFRIQHPDLILLQYVDDLLLAATSELDCQQGTRALLQTLGNLGYRASAKKAQICQKQVKYLGYLLKEGQRWLTEARKETVMGQPTPKTPRQLREFLGKAGFCRLFIPGFAEMAAPLYPLTKPGTLFNWGPDQQKAYQEIKQALLTAPALGLPDLTKPFELFVDEKQGYAKGVLTQKLGPWRRPVAYLSKKLDPVAAGWPPCLRMVAAIAVLTKDAGKLTMGQPLVILAPHAVEALVKQPPDRWLSNARMTHYQALLLDTDRVQFGPVVALNPATLLPLPEEGLQHNCLDILAEAHGTRPDLTDQPLPDADHTWYTDGSSLLQEGQRKAGAAVTTETEVIWAKALPAGTSAQRAELIALTQALKMAEGKKLNVYTDSRYAFATAHIHGEIYRRRGWLTSEGKEIKNKDEILALLKALFLPKRLSIIHCPGHQKGHSAEARGNRMADQAARKAAITETPDTSTLLIENSSPSGGSKRTADGSEFEAGKRTADGSEFEKRTADGSEFESPKKKAKVE

SEQ ID NO: 2631 - protein, 2108 aa, synthetic construct
MPAAKRVKLDGGDKKYSIGLDIGTNSVGWAVITDEYKVPSKKFKVLGNTDRHSIKKNLIGALLFDSGETAEATRLKRTARRRYTRRKNRICYLQEIFSNEMAKVDDSFFHRLEESFLVEEDKKHERHPIFGNIVDEVAYHEKYPTIYHLRKKLVDSTDKADLRLIYLALAHMIKFRGHFLIEGDLNPDNSDVDKLFIQLVQTYNQLFEENPINASGVDAKAILSARLSKSRRLENLIAQLPGEKKNGLFGNLIALSLGLTPNFKSNFDLAEDAKLQLSKDTYDDDLDNLLAQIGDQYADLFLAAKNLSDAILLSDILRVNTEITKAPLSASMIKRYDEHHQDLTLLKALVRQQLPEKYKEIFFDQSKNGYAGYIDGGASQEEFYKFIKPILEKMDGTEELLVKLNREDLLRKQRTFDNGSIPHQIHLGELHAILRRQEDFYPFLKDNREKIEKILTFRIPYYVGPLARGNSRFAWMTRKSEETITPWNFEEVVDKGASAQSFIERMTNFDKNLPNEKVLPKHSLLYEYFTVYNELTKVKYVTEGMRKPAFLSGEQKKAIVDLLFKTNRKVTVKQLKEDYFKKIECFDSVEISGVEDRFNASLGTYHDLLKIIKDKDFLDNEENEDILEDIVLTLTLFEDREMIEERLKTYAHLFDDKVMKQLKRRRYTGWGRLSRKLINGIRDKQSGKTILDFLKSDGFANRNFMQLIHDDSLTFKEDIQKAQVSGQGDSLHEHIANLAGSPAIKKGILQTVKVVDELVKVMGRHKPENIVIEMARENQTTQKGQKNSRERMKRIEEGIKELGSQILKEHPVENTQLQNEKLYLYYLQNGRDMYVDQELDINRLSDYDVDHIVPQSFLKDDSIDNKVLTRSDKARGKSDNVPSEEVVKKMKNYWRQLLNAKLITQRKFDNLTKAERGGLSELDKAGFIKRQLVETRQITKHVAQILDSRMNTKYDENDKLIREVKVITLKSKLVSDFRKDFQFYKVREINNYHHAHDAYLNAVVGTALIKKYPKLESEFVYGDYKVYDVRKMIAKSEQEIGKATAKYFFYSNIMNFFKTEITLANGEIRKRPLIETNGETGEIVWDKGRDFATVRKVLSMPQVNIVKKTEVQTGGFSKESILPKRNSDKLIARKKDWDPKKYGGFDSPTVAYSVLVVAKVEKGKSKKLKSVKELLGITIMERSSFEKNPIDFLEAKGYKEVKKDLIIKLPKYSLFELENGRKRMLASAGELQKGNELALPSKYVNFLYLASHYEKLKGSPEDNEQKQLFVEQHKHYLDEIIEQISEFSKRVILADANLDKVLSAYNKHRDKPIREQAENIIHLFTLTNLGAPAAFKYFDTTIDRKRYTSTKEVLDATLIHQSITGLYETRIDLSQLGGDGGGGSGGTLNIEDEYRLHETSKEPDVSLGSTWLSDFPQAWAETGGMGLAVRQAPLIIPLKATSTPVSIKQYPMSQEARLGIKPHIQRLLDQGILVPCQSPWNTPLLPVKKPGTNDYRPVQDLREVNKRVEDIHPTVPNPYNLLSGLPPSHQWYTVLDLKDAFFCLRLHPTSQPLFAFEWRDPEMGISGQLTWTRLPQGFKNSPTLFNEALHRDLADFRIQHPDLILLQYVDDLLLAATSELDCQQGTRALLQTLGNLGYRASAKKAQICQKQVKYLGYLLKEGQRWLTEARKETVMGQPTPKTPRQLREFLGKAGFCRLFIPGFAEMAAPLYPLTKPGTLFNWGPDQQKAYQEIKQALLTAPALGLPDLTKPFELFVDEKQGYAKGVLTQKLGPWRRPVAYLSKKLDPVAAGWPPCLRMVAAIAVLTKDAGKLTMGQPLVILAPHAVEALVKQPPDRWLSNARMTHYQALLLDTDRVQFGPVVALNPATLLPLPEEGLQHNCLDILAEAHGTRPDLTDQPLPDADHTWYTDGSSLLQEGQRKAGAAVTTETEVIWAKALPAGTSAQRAELIALTQALKMAEGKKLNVYTDSRYAFATAHIHGEIYRRRGWLTSEGKEIKNKDEILALLKALFLPKRLSIIHCPGHQKGHSAEARGNRMADQAARKAAITETPDTSTLLIENSSPSGGSKRTADGSEFEAGKRTADGSEFEKRTADGSEFESPKKKAKVE

SEQ ID NO: 2632 - protein, 2114 aa, synthetic construct
MPAAKRVKLDGGDKKYSIGLDIGTNSVGWAVITDEYKVPSKKFKVLGNTDRHSIKKNLIGALLFDSGETAEATRLKRTARRRYTRRKNRICYLQEIFSNEMAKVDDSFFHRLEESFLVEEDKKHERHPIFGNIVDEVAYHEKYPTIYHLRKKLVDSTDKADLRLIYLALAHMIKFRGHFLIEGDLNPDNSDVDKLFIQLVQTYNQLFEENPINASGVDAKAILSARLSKSRRLENLIAQLPGEKKNGLFGNLIALSLGLTPNFKSNFDLAEDAKLQLSKDTYDDDLDNLLAQIGDQYADLFLAAKNLSDAILLSDILRVNTEITKAPLSASMIKRYDEHHQDLTLLKALVRQQLPEKYKEIFFDQSKNGYAGYIDGGASQEEFYKFIKPILEKMDGTEELLVKLNREDLLRKQRTFDNGSIPHQIHLGELHAILRRQEDFYPFLKDNREKIEKILTFRIPYYVGPLARGNSRFAWMTRKSEETITPWNFEEVVDKGASAQSFIERMTNFDKNLPNEKVLPKHSLLYEYFTVYNELTKVKYVTEGMRKPAFLSGEQKKAIVDLLFKTNRKVTVKQLKEDYFKKIECFDSVEISGVEDRFNASLGTYHDLLKIIKDKDFLDNEENEDILEDIVLTLTLFEDREMIEERLKTYAHLFDDKVMKQLKRRRYTGWGRLSRKLINGIRDKQSGKTILDFLKSDGFANRNFMQLIHDDSLTFKEDIQKAQVSGQGDSLHEHIANLAGSPAIKKGILQTVKVVDELVKVMGRHKPENIVIEMARENQTTQKGQKNSRERMKRIEEGIKELGSQILKEHPVENTQLQNEKLYLYYLQNGRDMYVDQELDINRLSDYDVDHIVPQSFLKDDSIDNKVLTRSDKARGKSDNVPSEEVVKKMKNYWRQLLNAKLITQRKFDNLTKAERGGLSELDKAGFIKRQLVETRQITKHVAQILDSRMNTKYDENDKLIREVKVITLKSKLVSDFRKDFQFYKVREINNYHHAHDAYLNAVVGTALIKKYPKLESEFVYGDYKVYDVRKMIAKSEQEIGKATAKYFFYSNIMNFFKTEITLANGEIRKRPLIETNGETGEIVWDKGRDFATVRKVLSMPQVNIVKKTEVQTGGFSKESILPKRNSDKLIARKKDWDPKKYGGFDSPTVAYSVLVVAKVEKGKSKKLKSVKELLGITIMERSSFEKNPIDFLEAKGYKEVKKDLIIKLPKYSLFELENGRKRMLASAGELQKGNELALPSKYVNFLYLASHYEKLKGSPEDNEQKQLFVEQHKHYLDEIIEQISEFSKRVILADANLDKVLSAYNKHRDKPIREQAENIIHLFTLTNLGAPAAFKYFDTTIDRKRYTSTKEVLDATLIHQSITGLYETRIDLSQLGGDGGGGGGSSGGSGGTLNIEDEYRLHETSKEPDVSLGSTWLSDFPQAWAETGGMGLAVRQAPLIIPLKATSTPVSIKQYPMSQEARLGIKPHIQRLLDQGILVPCQSPWNTPLLPVKKPGTNDYRPVQDLREVNKRVEDIHPTVPNPYNLLSGLPPSHQWYTVLDLKDAFFCLRLHPTSQPLFAFEWRDPEMGISGQLTWTRLPQGFKNSPTLFNEALHRDLADFRIQHPDLILLQYVDDLLLAATSELDCQQGTRALLQTLGNLGYRASAKKAQICQKQVKYLGYLLKEGQRWLTEARKETVMGQPTPKTPRQLREFLGKAGFCRLFIPGFAEMAAPLYPLTKPGTLFNWGPDQQKAYQEIKQALLTAPALGLPDLTKPFELFVDEKQGYAKGVLTQKLGPWRRPVAYLSKKLDPVAAGWPPCLRMVAAIAVLTKDAGKLTMGQPLVILAPHAVEALVKQPPDRWLSNARMTHYQALLLDTDRVQFGPVVALNPATLLPLPEEGLQHNCLDILAEAHGTRPDLTDQPLPDADHTWYTDGSSLLQEGQRKAGAAVTTETEVIWAKALPAGTSAQRAELIALTQALKMAEGKKLNVYTDSRYAFATAHIHGEIYRRRGWLTSEGKEIKNKDEILALLKALFLPKRLSIIHCPGHQKGHSAEARGNRMADQAARKAAITETPDTSTLLIENSSPSGGSKRTADGSEFEAGKRTADGSEFEKRTADGSEFESPKKKAKVE

SEQ ID NO: 2633 - protein, 2114 aa, synthetic construct
MPAAKRVKLDGGDKKYSIGLDIGTNSVGWAVITDEYKVPSKKFKVLGNTDRHSIKKNLIGALLFDSGETAEATRLKRTARRRYTRRKNRICYLQEIFSNEMAKVDDSFFHRLEESFLVEEDKKHERHPIFGNIVDEVAYHEKYPTIYHLRKKLVDSTDKADLRLIYLALAHMIKFRGHFLIEGDLNPDNSDVDKLFIQLVQTYNQLFEENPINASGVDAKAILSARLSKSRRLENLIAQLPGEKKNGLFGNLIALSLGLTPNFKSNFDLAEDAKLQLSKDTYDDDLDNLLAQIGDQYADLFLAAKNLSDAILLSDILRVNTEITKAPLSASMIKRYDEHHQDLTLLKALVRQQLPEKYKEIFFDQSKNGYAGYIDGGASQEEFYKFIKPILEKMDGTEELLVKLNREDLLRKQRTFDNGSIPHQIHLGELHAILRRQEDFYPFLKDNREKIEKILTFRIPYYVGPLARGNSRFAWMTRKSEETITPWNFEEVVDKGASAQSFIERMTNFDKNLPNEKVLPKHSLLYEYFTVYNELTKVKYVTEGMRKPAFLSGEQKKAIVDLLFKTNRKVTVKQLKEDYFKKIECFDSVEISGVEDRFNASLGTYHDLLKIIKDKDFLDNEENEDILEDIVLTLTLFEDREMIEERLKTYAHLFDDKVMKQLKRRRYTGWGRLSRKLINGIRDKQSGKTILDFLKSDGFANRNFMQLIHDDSLTFKEDIQKAQVSGQGDSLHEHIANLAGSPAIKKGILQTVKVVDELVKVMGRHKPENIVIEMARENQTTQKGQKNSRERMKRIEEGIKELGSQILKEHPVENTQLQNEKLYLYYLQNGRDMYVDQELDINRLSDYDVDHIVPQSFLKDDSIDNKVLTRSDKARGKSDNVPSEEVVKKMKNYWRQLLNAKLITQRKFDNLTKAERGGLSELDKAGFIKRQLVETRQITKHVAQILDSRMNTKYDENDKLIREVKVITLKSKLVSDFRKDFQFYKVREINNYHHAHDAYLNAVVGTALIKKYPKLESEFVYGDYKVYDVRKMIAKSEQEIGKATAKYFFYSNIMNFFKTEITLANGEIRKRPLIETNGETGEIVWDKGRDFATVRKVLSMPQVNIVKKTEVQTGGFSKESILPKRNSDKLIARKKDWDPKKYGGFDSPTVAYSVLVVAKVEKGKSKKLKSVKELLGITIMERSSFEKNPIDFLEAKGYKEVKKDLIIKLPKYSLFELENGRKRMLASAGELQKGNELALPSKYVNFLYLASHYEKLKGSPEDNEQKQLFVEQHKHYLDEIIEQISEFSKRVILADANLDKVLSAYNKHRDKPIREQAENIIHLFTLTNLGAPAAFKYFDTTIDRKRYTSTKEVLDATLIHQSITGLYETRIDLSQLGGDGGGSSPAPGGGGGTLNIEDEYRLHETSKEPDVSLGSTWLSDFPQAWAETGGMGLAVRQAPLIIPLKATSTPVSIKQYPMSQEARLGIKPHIQRLLDQGILVPCQSPWNTPLLPVKKPGTNDYRPVQDLREVNKRVEDIHPTVPNPYNLLSGLPPSHQWYTVLDLKDAFFCLRLHPTSQPLFAFEWRDPEMGISGQLTWTRLPQGFKNSPTLFNEALHRDLADFRIQHPDLILLQYVDDLLLAATSELDCQQGTRALLQTLGNLGYRASAKKAQICQKQVKYLGYLLKEGQRWLTEARKETVMGQPTPKTPRQLREFLGKAGFCRLFIPGFAEMAAPLYPLTKPGTLFNWGPDQQKAYQEIKQALLTAPALGLPDLTKPFELFVDEKQGYAKGVLTQKLGPWRRPVAYLSKKLDPVAAGWPPCLRMVAAIAVLTKDAGKLTMGQPLVILAPHAVEALVKQPPDRWLSNARMTHYQALLLDTDRVQFGPVVALNPATLLPLPEEGLQHNCLDILAEAHGTRPDLTDQPLPDADHTWYTDGSSLLQEGQRKAGAAVTTETEVIWAKALPAGTSAQRAELIALTQALKMAEGKKLNVYTDSRYAFATAHIHGEIYRRRGWLTSEGKEIKNKDEILALLKALFLPKRLSIIHCPGHQKGHSAEARGNRMADQAARKAAITETPDTSTLLIENSSPSGGSKRTADGSEFEAGKRTADGSEFEKRTADGSEFESPKKKAKVE

SEQ ID NO: 2634 - protein, 2114 aa, synthetic construct
MPAAKRVKLDGGDKKYSIGLDIGTNSVGWAVITDEYKVPSKKFKVLGNTDRHSIKKNLIGALLFDSGETAEATRLKRTARRRYTRRKNRICYLQEIFSNEMAKVDDSFFHRLEESFLVEEDKKHERHPIFGNIVDEVAYHEKYPTIYHLRKKLVDSTDKADLRLIYLALAHMIKFRGHFLIEGDLNPDNSDVDKLFIQLVQTYNQLFEENPINASGVDAKAILSARLSKSRRLENLIAQLPGEKKNGLFGNLIALSLGLTPNFKSNFDLAEDAKLQLSKDTYDDDLDNLLAQIGDQYADLFLAAKNLSDAILLSDILRVNTEITKAPLSASMIKRYDEHHQDLTLLKALVRQQLPEKYKEIFFDQSKNGYAGYIDGGASQEEFYKFIKPILEKMDGTEELLVKLNREDLLRKQRTFDNGSIPHQIHLGELHAILRRQEDFYPFLKDNREKIEKILTFRIPYYVGPLARGNSRFAWMTRKSEETITPWNFEEVVDKGASAQSFIERMTNFDKNLPNEKVLPKHSLLYEYFTVYNELTKVKYVTEGMRKPAFLSGEQKKAIVDLLFKTNRKVTVKQLKEDYFKKIECFDSVEISGVEDRFNASLGTYHDLLKIIKDKDFLDNEENEDILEDIVLTLTLFEDREMIEERLKTYAHLFDDKVMKQLKRRRYTGWGRLSRKLINGIRDKQSGKTILDFLKSDGFANRNFMQLIHDDSLTFKEDIQKAQVSGQGDSLHEHIANLAGSPAIKKGILQTVKVVDELVKVMGRHKPENIVIEMARENQTTQKGQKNSRERMKRIEEGIKELGSQILKEHPVENTQLQNEKLYLYYLQNGRDMYVDQELDINRLSDYDVDHIVPQSFLKDDSIDNKVLTRSDKARGKSDNVPSEEVVKKMKNYWRQLLNAKLITQRKFDNLTKAERGGLSELDKAGFIKRQLVETRQITKHVAQILDSRMNTKYDENDKLIREVKVITLKSKLVSDFRKDFQFYKVREINNYHHAHDAYLNAVVGTALIKKYPKLESEFVYGDYKVYDVRKMIAKSEQEIGKATAKYFFYSNIMNFFKTEITLANGEIRKRPLIETNGETGEIVWDKGRDFATVRKVLSMPQVNIVKKTEVQTGGFSKESILPKRNSDKLIARKKDWDPKKYGGFDSPTVAYSVLVVAKVEKGKSKKLKSVKELLGITIMERSSFEKNPIDFLEAKGYKEVKKDLIIKLPKYSLFELENGRKRMLASAGELQKGNELALPSKYVNFLYLASHYEKLKGSPEDNEQKQLFVEQHKHYLDEIIEQISEFSKRVILADANLDKVLSAYNKHRDKPIREQAENIIHLFTLTNLGAPAAFKYFDTTIDRKRYTSTKEVLDATLIHQSITGLYETRIDLSQLGGDGGGSSGSSGSSGGTLNIEDEYRLHETSKEPDVSLGSTWLSDFPQAWAETGGMGLAVRQAPLIIPLKATSTPVSIKQYPMSQEARLGIKPHIQRLLDQGILVPCQSPWNTPLLPVKKPGTNDYRPVQDLREVNKRVEDIHPTVPNPYNLLSGLPPSHQWYTVLDLKDAFFCLRLHPTSQPLFAFEWRDPEMGISGQLTWTRLPQGFKNSPTLFNEALHRDLADFRIQHPDLILLQYVDDLLLAATSELDCQQGTRALLQTLGNLGYRASAKKAQICQKQVKYLGYLLKEGQRWLTEARKETVMGQPTPKTPRQLREFLGKAGFCRLFIPGFAEMAAPLYPLTKPGTLFNWGPDQQKAYQEIKQALLTAPALGLPDLTKPFELFVDEKQGYAKGVLTQKLGPWRRPVAYLSKKLDPVAAGWPPCLRMVAAIAVLTKDAGKLTMGQPLVILAPHAVEALVKQPPDRWLSNARMTHYQALLLDTDRVQFGPVVALNPATLLPLPEEGLQHNCLDILAEAHGTRPDLTDQPLPDADHTWYTDGSSLLQEGQRKAGAAVTTETEVIWAKALPAGTSAQRAELIALTQALKMAEGKKLNVYTDSRYAFATAHIHGEIYRRRGWLTSEGKEIKNKDEILALLKALFLPKRLSIIHCPGHQKGHSAEARGNRMADQAARKAAITETPDTSTLLIENSSPSGGSKRTADGSEFEAGKRTADGSEFEKRTADGSEFESPKKKAKVE

SEQ ID NO: 2635 - protein, 2112 aa, synthetic construct
MPAAKRVKLDGGDKKYSIGLDIGTNSVGWAVITDEYKVPSKKFKVLGNTDRHSIKKNLIGALLFDSGETAEATRLKRTARRRYTRRKNRICYLQEIFSNEMAKVDDSFFHRLEESFLVEEDKKHERHPIFGNIVDEVAYHEKYPTIYHLRKKLVDSTDKADLRLIYLALAHMIKFRGHFLIEGDLNPDNSDVDKLFIQLVQTYNQLFEENPINASGVDAKAILSARLSKSRRLENLIAQLPGEKKNGLFGNLIALSLGLTPNFKSNFDLAEDAKLQLSKDTYDDDLDNLLAQIGDQYADLFLAAKNLSDAILLSDILRVNTEITKAPLSASMIKRYDEHHQDLTLLKALVRQQLPEKYKEIFFDQSKNGYAGYIDGGASQEEFYKFIKPILEKMDGTEELLVKLNREDLLRKQRTFDNGSIPHQIHLGELHAILRRQEDFYPFLKDNREKIEKILTFRIPYYVGPLARGNSRFAWMTRKSEETITPWNFEEVVDKGASAQSFIERMTNFDKNLPNEKVLPKHSLLYEYFTVYNELTKVKYVTEGMRKPAFLSGEQKKAIVDLLFKTNRKVTVKQLKEDYFKKIECFDSVEISGVEDRFNASLGTYHDLLKIIKDKDFLDNEENEDILEDIVLTLTLFEDREMIEERLKTYAHLFDDKVMKQLKRRRYTGWGRLSRKLINGIRDKQSGKTILDFLKSDGFANRNFMQLIHDDSLTFKEDIQKAQVSGQGDSLHEHIANLAGSPAIKKGILQTVKVVDELVKVMGRHKPENIVIEMARENQTTQKGQKNSRERMKRIEEGIKELGSQILKEHPVENTQLQNEKLYLYYLQNGRDMYVDQELDINRLSDYDVDHIVPQSFLKDDSIDNKVLTRSDKARGKSDNVPSEEVVKKMKNYWRQLLNAKLITQRKFDNLTKAERGGLSELDKAGFIKRQLVETRQITKHVAQILDSRMNTKYDENDKLIREVKVITLKSKLVSDFRKDFQFYKVREINNYHHAHDAYLNAVVGTALIKKYPKLESEFVYGDYKVYDVRKMIAKSEQEIGKATAKYFFYSNIMNFFKTEITLANGEIRKRPLIETNGETGEIVWDKGRDFATVRKVLSMPQVNIVKKTEVQTGGFSKESILPKRNSDKLIARKKDWDPKKYGGFDSPTVAYSVLVVAKVEKGKSKKLKSVKELLGITIMERSSFEKNPIDFLEAKGYKEVKKDLIIKLPKYSLFELENGRKRMLASAGELQKGNELALPSKYVNFLYLASHYEKLKGSPEDNEQKQLFVEQHKHYLDEIIEQISEFSKRVILADANLDKVLSAYNKHRDKPIREQAENIIHLFTLTNLGAPAAFKYFDTTIDRKRYTSTKEVLDATLIHQSITGLYETRIDLSQLGGDGGGGGGGGGGGTLNIEDEYRLHETSKEPDVSLGSTWLSDFPQAWAETGGMGLAVRQAPLIIPLKATSTPVSIKQYPMSQEARLGIKPHIQRLLDQGILVPCQSPWNTPLLPVKKPGTNDYRPVQDLREVNKRVEDIHPTVPNPYNLLSGLPPSHQWYTVLDLKDAFFCLRLHPTSQPLFAFEWRDPEMGISGQLTWTRLPQGFKNSPTLFNEALHRDLADFRIQHPDLILLQYVDDLLLAATSELDCQQGTRALLQTLGNLGYRASAKKAQICQKQVKYLGYLLKEGQRWLTEARKETVMGQPTPKTPRQLREFLGKAGFCRLFIPGFAEMAAPLYPLTKPGTLFNWGPDQQKAYQEIKQALLTAPALGLPDLTKPFELFVDEKQGYAKGVLTQKLGPWRRPVAYLSKKLDPVAAGWPPCLRMVAAIAVLTKDAGKLTMGQPLVILAPHAVEALVKQPPDRWLSNARMTHYQALLLDTDRVQFGPVVALNPATLLPLPEEGLQHNCLDILAEAHGTRPDLTDQPLPDADHTWYTDGSSLLQEGQRKAGAAVTTETEVIWAKALPAGTSAQRAELIALTQALKMAEGKKLNVYTDSRYAFATAHIHGEIYRRRGWLTSEGKEIKNKDEILALLKALFLPKRLSIIHCPGHQKGHSAEARGNRMADQAARKAAITETPDTSTLLIENSSPSGGSKRTADGSEFEAGKRTADGSEFEKRTADGSEFESPKKKAKVE

SEQ ID NO: 2636 - protein, 2120 aa, synthetic construct
MPAAKRVKLDGGDKKYSIGLDIGTNSVGWAVITDEYKVPSKKFKVLGNTDRHSIKKNLIGALLFDSGETAEATRLKRTARRRYTRRKNRICYLQEIFSNEMAKVDDSFFHRLEESFLVEEDKKHERHPIFGNIVDEVAYHEKYPTIYHLRKKLVDSTDKADLRLIYLALAHMIKFRGHFLIEGDLNPDNSDVDKLFIQLVQTYNQLFEENPINASGVDAKAILSARLSKSRRLENLIAQLPGEKKNGLFGNLIALSLGLTPNFKSNFDLAEDAKLQLSKDTYDDDLDNLLAQIGDQYADLFLAAKNLSDAILLSDILRVNTEITKAPLSASMIKRYDEHHQDLTLLKALVRQQLPEKYKEIFFDQSKNGYAGYIDGGASQEEFYKFIKPILEKMDGTEELLVKLNREDLLRKQRTFDNGSIPHQIHLGELHAILRRQEDFYPFLKDNREKIEKILTFRIPYYVGPLARGNSRFAWMTRKSEETITPWNFEEVVDKGASAQSFIERMTNFDKNLPNEKVLPKHSLLYEYFTVYNELTKVKYVTEGMRKPAFLSGEQKKAIVDLLFKTNRKVTVKQLKEDYFKKIECFDSVEISGVEDRFNASLGTYHDLLKIIKDKDFLDNEENEDILEDIVLTLTLFEDREMIEERLKTYAHLFDDKVMKQLKRRRYTGWGRLSRKLINGIRDKQSGKTILDFLKSDGFANRNFMQLIHDDSLTFKEDIQKAQVSGQGDSLHEHIANLAGSPAIKKGILQTVKVVDELVKVMGRHKPENIVIEMARENQTTQKGQKNSRERMKRIEEGIKELGSQILKEHPVENTQLQNEKLYLYYLQNGRDMYVDQELDINRLSDYDVDHIVPQSFLKDDSIDNKVLTRSDKARGKSDNVPSEEVVKKMKNYWRQLLNAKLITQRKFDNLTKAERGGLSELDKAGFIKRQLVETRQITKHVAQILDSRMNTKYDENDKLIREVKVITLKSKLVSDFRKDFQFYKVREINNYHHAHDAYLNAVVGTALIKKYPKLESEFVYGDYKVYDVRKMIAKSEQEIGKATAKYFFYSNIMNFFKTEITLANGEIRKRPLIETNGETGEIVWDKGRDFATVRKVLSMPQVNIVKKTEVQTGGFSKESILPKRNSDKLIARKKDWDPKKYGGFDSPTVAYSVLVVAKVEKGKSKKLKSVKELLGITIMERSSFEKNPIDFLEAKGYKEVKKDLIIKLPKYSLFELENGRKRMLASAGELQKGNELALPSKYVNFLYLASHYEKLKGSPEDNEQKQLFVEQHKHYLDEIIEQISEFSKRVILADANLDKVLSAYNKHRDKPIREQAENIIHLFTLTNLGAPAAFKYFDTTIDRKRYTSTKEVLDATLIHQSITGLYETRIDLSQLGGDGGGGGGSEAAAKGGGGSGGTLNIEDEYRLHETSKEPDVSLGSTWLSDFPQAWAETGGMGLAVRQAPLIIPLKATSTPVSIKQYPMSQEARLGIKPHIQRLLDQGILVPCQSPWNTPLLPVKKPGTNDYRPVQDLREVNKRVEDIHPTVPNPYNLLSGLPPSHQWYTVLDLKDAFFCLRLHPTSQPLFAFEWRDPEMGISGQLTWTRLPQGFKNSPTLFNEALHRDLADFRIQHPDLILLQYVDDLLLAATSELDCQQGTRALLQTLGNLGYRASAKKAQICQKQVKYLGYLLKEGQRWLTEARKETVMGQPTPKTPRQLREFLGKAGFCRLFIPGFAEMAAPLYPLTKPGTLFNWGPDQQKAYQEIKQALLTAPALGLPDLTKPFELFVDEKQGYAKGVLTQKLGPWRRPVAYLSKKLDPVAAGWPPCLRMVAAIAVLTKDAGKLTMGQPLVILAPHAVEALVKQPPDRWLSNARMTHYQALLLDTDRVQFGPVVALNPATLLPLPEEGLQHNCLDILAEAHGTRPDLTDQPLPDADHTWYTDGSSLLQEGQRKAGAAVTTETEVIWAKALPAGTSAQRAELIALTQALKMAEGKKLNVYTDSRYAFATAHIHGEIYRRRGWLTSEGKEIKNKDEILALLKALFLPKRLSIIHCPGHQKGHSAEARGNRMADQAARKAAITETPDTSTLLIENSSPSGGSKRTADGSEFEAGKRTADGSEFEKRTADGSEFESPKKKAKVE

SEQ ID NO: 2637 - protein, 2116 aa, synthetic construct
MPAAKRVKLDGGDKKYSIGLDIGTNSVGWAVITDEYKVPSKKFKVLGNTDRHSIKKNLIGALLFDSGETAEATRLKRTARRRYTRRKNRICYLQEIFSNEMAKVDDSFFHRLEESFLVEEDKKHERHPIFGNIVDEVAYHEKYPTIYHLRKKLVDSTDKADLRLIYLALAHMIKFRGHFLIEGDLNPDNSDVDKLFIQLVQTYNQLFEENPINASGVDAKAILSARLSKSRRLENLIAQLPGEKKNGLFGNLIALSLGLTPNFKSNFDLAEDAKLQLSKDTYDDDLDNLLAQIGDQYADLFLAAKNLSDAILLSDILRVNTEITKAPLSASMIKRYDEHHQDLTLLKALVRQQLPEKYKEIFFDQSKNGYAGYIDGGASQEEFYKFIKPILEKMDGTEELLVKLNREDLLRKQRTFDNGSIPHQIHLGELHAILRRQEDFYPFLKDNREKIEKILTFRIPYYVGPLARGNSRFAWMTRKSEETITPWNFEEVVDKGASAQSFIERMTNFDKNLPNEKVLPKHSLLYEYFTVYNELTKVKYVTEGMRKPAFLSGEQKKAIVDLLFKTNRKVTVKQLKEDYFKKIECFDSVEISGVEDRFNASLGTYHDLLKIIKDKDFLDNEENEDILEDIVLTLTLFEDREMIEERLKTYAHLFDDKVMKQLKRRRYTGWGRLSRKLINGIRDKQSGKTILDFLKSDGFANRNFMQLIHDDSLTFKEDIQKAQVSGQGDSLHEHIANLAGSPAIKKGILQTVKVVDELVKVMGRHKPENIVIEMARENQTTQKGQKNSRERMKRIEEGIKELGSQILKEHPVENTQLQNEKLYLYYLQNGRDMYVDQELDINRLSDYDVDHIVPQSFLKDDSIDNKVLTRSDKARGKSDNVPSEEVVKKMKNYWRQLLNAKLITQRKFDNLTKAERGGLSELDKAGFIKRQLVETRQITKHVAQILDSRMNTKYDENDKLIREVKVITLKSKLVSDFRKDFQFYKVREINNYHHAHDAYLNAVVGTALIKKYPKLESEFVYGDYKVYDVRKMIAKSEQEIGKATAKYFFYSNIMNFFKTEITLANGEIRKRPLIETNGETGEIVWDKGRDFATVRKVLSMPQVNIVKKTEVQTGGFSKESILPKRNSDKLIARKKDWDPKKYGGFDSPTVAYSVLVVAKVEKGKSKKLKSVKELLGITIMERSSFEKNPIDFLEAKGYKEVKKDLIIKLPKYSLFELENGRKRMLASAGELQKGNELALPSKYVNFLYLASHYEKLKGSPEDNEQKQLFVEQHKHYLDEIIEQISEFSKRVILADANLDKVLSAYNKHRDKPIREQAENIIHLFTLTNLGAPAAFKYFDTTIDRKRYTSTKEVLDATLIHQSITGLYETRIDLSQLGGDGGEAAAKGGSGGGGGTLNIEDEYRLHETSKEPDVSLGSTWLSDFPQAWAETGGMGLAVRQAPLIIPLKATSTPVSIKQYPMSQEARLGIKPHIQRLLDQGILVPCQSPWNTPLLPVKKPGTNDYRPVQDLREVNKRVEDIHPTVPNPYNLLSGLPPSHQWYTVLDLKDAFFCLRLHPTSQPLFAFEWRDPEMGISGQLTWTRLPQGFKNSPTLFNEALHRDLADFRIQHPDLILLQYVDDLLLAATSELDCQQGTRALLQTLGNLGYRASAKKAQICQKQVKYLGYLLKEGQRWLTEARKETVMGQPTPKTPRQLREFLGKAGFCRLFIPGFAEMAAPLYPLTKPGTLFNWGPDQQKAYQEIKQALLTAPALGLPDLTKPFELFVDEKQGYAKGVLTQKLGPWRRPVAYLSKKLDPVAAGWPPCLRMVAAIAVLTKDAGKLTMGQPLVILAPHAVEALVKQPPDRWLSNARMTHYQALLLDTDRVQFGPVVALNPATLLPLPEEGLQHNCLDILAEAHGTRPDLTDQPLPDADHTWYTDGSSLLQEGQRKAGAAVTTETEVIWAKALPAGTSAQRAELIALTQALKMAEGKKLNVYTDSRYAFATAHIHGEIYRRRGWLTSEGKEIKNKDEILALLKALFLPKRLSIIHCPGHQKGHSAEARGNRMADQAARKAAITETPDTSTLLIENSSPSGGSKRTADGSEFEAGKRTADGSEFEKRTADGSEFESPKKKAKVE

SEQ ID NO: 2638 - protein, 2116 aa, synthetic construct
MPAAKRVKLDGGDKKYSIGLDIGTNSVGWAVITDEYKVPSKKFKVLGNTDRHSIKKNLIGALLFDSGETAEATRLKRTARRRYTRRKNRICYLQEIFSNEMAKVDDSFFHRLEESFLVEEDKKHERHPIFGNIVDEVAYHEKYPTIYHLRKKLVDSTDKADLRLIYLALAHMIKFRGHFLIEGDLNPDNSDVDKLFIQLVQTYNQLFEENPINASGVDAKAILSARLSKSRRLENLIAQLPGEKKNGLFGNLIALSLGLTPNFKSNFDLAEDAKLQLSKDTYDDDLDNLLAQIGDQYADLFLAAKNLSDAILLSDILRVNTEITKAPLSASMIKRYDEHHQDLTLLKALVRQQLPEKYKEIFFDQSKNGYAGYIDGGASQEEFYKFIKPILEKMDGTEELLVKLNREDLLRKQRTFDNGSIPHQIHLGELHAILRRQEDFYPFLKDNREKIEKILTFRIPYYVGPLARGNSRFAWMTRKSEETITPWNFEEVVDKGASAQSFIERMTNFDKNLPNEKVLPKHSLLYEYFTVYNELTKVKYVTEGMRKPAFLSGEQKKAIVDLLFKTNRKVTVKQLKEDYFKKIECFDSVEISGVEDRFNASLGTYHDLLKIIKDKDFLDNEENEDILEDIVLTLTLFEDREMIEERLKTYAHLFDDKVMKQLKRRRYTGWGRLSRKLINGIRDKQSGKTILDFLKSDGFANRNFMQLIHDDSLTFKEDIQKAQVSGQGDSLHEHIANLAGSPAIKKGILQTVKVVDELVKVMGRHKPENIVIEMARENQTTQKGQKNSRERMKRIEEGIKELGSQILKEHPVENTQLQNEKLYLYYLQNGRDMYVDQELDINRLSDYDVDHIVPQSFLKDDSIDNKVLTRSDKARGKSDNVPSEEVVKKMKNYWRQLLNAKLITQRKFDNLTKAERGGLSELDKAGFIKRQLVETRQITKHVAQILDSRMNTKYDENDKLIREVKVITLKSKLVSDFRKDFQFYKVREINNYHHAHDAYLNAVVGTALIKKYPKLESEFVYGDYKVYDVRKMIAKSEQEIGKATAKYFFYSNIMNFFKTEITLANGEIRKRPLIETNGETGEIVWDKGRDFATVRKVLSMPQVNIVKKTEVQTGGFSKESILPKRNSDKLIARKKDWDPKKYGGFDSPTVAYSVLVVAKVEKGKSKKLKSVKELLGITIMERSSFEKNPIDFLEAKGYKEVKKDLIIKLPKYSLFELENGRKRMLASAGELQKGNELALPSKYVNFLYLASHYEKLKGSPEDNEQKQLFVEQHKHYLDEIIEQISEFSKRVILADANLDKVLSAYNKHRDKPIREQAENIIHLFTLTNLGAPAAFKYFDTTIDRKRYTSTKEVLDATLIHQSITGLYETRIDLSQLGGDGGGGGEAAAKGGSGGTLNIEDEYRLHETSKEPDVSLGSTWLSDFPQAWAETGGMGLAVRQAPLIIPLKATSTPVSIKQYPMSQEARLGIKPHIQRLLDQGILVPCQSPWNTPLLPVKKPGTNDYRPVQDLREVNKRVEDIHPTVPNPYNLLSGLPPSHQWYTVLDLKDAFFCLRLHPTSQPLFAFEWRDPEMGISGQLTWTRLPQGFKNSPTLFNEALHRDLADFRIQHPDLILLQYVDDLLLAATSELDCQQGTRALLQTLGNLGYRASAKKAQICQKQVKYLGYLLKEGQRWLTEARKETVMGQPTPKTPRQLREFLGKAGFCRLFIPGFAEMAAPLYPLTKPGTLFNWGPDQQKAYQEIKQALLTAPALGLPDLTKPFELFVDEKQGYAKGVLTQKLGPWRRPVAYLSKKLDPVAAGWPPCLRMVAAIAVLTKDAGKLTMGQPLVILAPHAVEALVKQPPDRWLSNARMTHYQALLLDTDRVQFGPVVALNPATLLPLPEEGLQHNCLDILAEAHGTRPDLTDQPLPDADHTWYTDGSSLLQEGQRKAGAAVTTETEVIWAKALPAGTSAQRAELIALTQALKMAEGKKLNVYTDSRYAFATAHIHGEIYRRRGWLTSEGKEIKNKDEILALLKALFLPKRLSIIHCPGHQKGHSAEARGNRMADQAARKAAITETPDTSTLLIENSSPSGGSKRTADGSEFEAGKRTADGSEFEKRTADGSEFESPKKKAKVE

SEQ ID NO: 2639 - protein, 2115 aa, synthetic construct
MPAAKRVKLDGGDKKYSIGLDIGTNSVGWAVITDEYKVPSKKFKVLGNTDRHSIKKNLIGALLFDSGETAEATRLKRTARRRYTRRKNRICYLQEIFSNEMAKVDDSFFHRLEESFLVEEDKKHERHPIFGNIVDEVAYHEKYPTIYHLRKKLVDSTDKADLRLIYLALAHMIKFRGHFLIEGDLNPDNSDVDKLFIQLVQTYNQLFEENPINASGVDAKAILSARLSKSRRLENLIAQLPGEKKNGLFGNLIALSLGLTPNFKSNFDLAEDAKLQLSKDTYDDDLDNLLAQIGDQYADLFLAAKNLSDAILLSDILRVNTEITKAPLSASMIKRYDEHHQDLTLLKALVRQQLPEKYKEIFFDQSKNGYAGYIDGGASQEEFYKFIKPILEKMDGTEELLVKLNREDLLRKQRTFDNGSIPHQIHLGELHAILRRQEDFYPFLKDNREKIEKILTFRIPYYVGPLARGNSRFAWMTRKSEETITPWNFEEVVDKGASAQSFIERMTNFDKNLPNEKVLPKHSLLYEYFTVYNELTKVKYVTEGMRKPAFLSGEQKKAIVDLLFKTNRKVTVKQLKEDYFKKIECFDSVEISGVEDRFNASLGTYHDLLKIIKDKDFLDNEENEDILEDIVLTLTLFEDREMIEERLKTYAHLFDDKVMKQLKRRRYTGWGRLSRKLINGIRDKQSGKTILDFLKSDGFANRNFMQLIHDDSLTFKEDIQKAQVSGQGDSLHEHIANLAGSPAIKKGILQTVKVVDELVKVMGRHKPENIVIEMARENQTTQKGQKNSRERMKRIEEGIKELGSQILKEHPVENTQLQNEKLYLYYLQNGRDMYVDQELDINRLSDYDVDHIVPQSFLKDDSIDNKVLTRSDKARGKSDNVPSEEVVKKMKNYWRQLLNAKLITQRKFDNLTKAERGGLSELDKAGFIKRQLVETRQITKHVAQILDSRMNTKYDENDKLIREVKVITLKSKLVSDFRKDFQFYKVREINNYHHAHDAYLNAVVGTALIKKYPKLESEFVYGDYKVYDVRKMIAKSEQEIGKATAKYFFYSNIMNFFKTEITLANGEIRKRPLIETNGETGEIVWDKGRDFATVRKVLSMPQVNIVKKTEVQTGGFSKESILPKRNSDKLIARKKDWDPKKYGGFDSPTVAYSVLVVAKVEKGKSKKLKSVKELLGITIMERSSFEKNPIDFLEAKGYKEVKKDLIIKLPKYSLFELENGRKRMLASAGELQKGNELALPSKYVNFLYLASHYEKLKGSPEDNEQKQLFVEQHKHYLDEIIEQISEFSKRVILADANLDKVLSAYNKHRDKPIREQAENIIHLFTLTNLGAPAAFKYFDTTIDRKRYTSTKEVLDATLIHQSITGLYETRIDLSQLGGDGGGGGGSGGGGSGGTLNIEDEYRLHETSKEPDVSLGSTWLSDFPQAWAETGGMGLAVRQAPLIIPLKATSTPVSIKQYPMSQEARLGIKPHIQRLLDQGILVPCQSPWNTPLLPVKKPGTNDYRPVQDLREVNKRVEDIHPTVPNPYNLLSGLPPSHQWYTVLDLKDAFFCLRLHPTSQPLFAFEWRDPEMGISGQLTWTRLPQGFKNSPTLFNEALHRDLADFRIQHPDLILLQYVDDLLLAATSELDCQQGTRALLQTLGNLGYRASAKKAQICQKQVKYLGYLLKEGQRWLTEARKETVMGQPTPKTPRQLREFLGKAGFCRLFIPGFAEMAAPLYPLTKPGTLFNWGPDQQKAYQEIKQALLTAPALGLPDLTKPFELFVDEKQGYAKGVLTQKLGPWRRPVAYLSKKLDPVAAGWPPCLRMVAAIAVLTKDAGKLTMGQPLVILAPHAVEALVKQPPDRWLSNARMTHYQALLLDTDRVQFGPVVALNPATLLPLPEEGLQHNCLDILAEAHGTRPDLTDQPLPDADHTWYTDGSSLLQEGQRKAGAAVTTETEVIWAKALPAGTSAQRAELIALTQALKMAEGKKLNVYTDSRYAFATAHIHGEIYRRRGWLTSEGKEIKNKDEILALLKALFLPKRLSIIHCPGHQKGHSAEARGNRMADQAARKAAITETPDTSTLLIENSSPSGGSKRTADGSEFEAGKRTADGSEFEKRTADGSEFESPKKKAKVE

SEQ ID NO: 2640 - protein, 2116 aa, synthetic construct
MPAAKRVKLDGGDKKYSIGLDIGTNSVGWAVITDEYKVPSKKFKVLGNTDRHSIKKNLIGALLFDSGETAEATRLKRTARRRYTRRKNRICYLQEIFSNEMAKVDDSFFHRLEESFLVEEDKKHERHPIFGNIVDEVAYHEKYPTIYHLRKKLVDSTDKADLRLIYLALAHMIKFRGHFLIEGDLNPDNSDVDKLFIQLVQTYNQLFEENPINASGVDAKAILSARLSKSRRLENLIAQLPGEKKNGLFGNLIALSLGLTPNFKSNFDLAEDAKLQLSKDTYDDDLDNLLAQIGDQYADLFLAAKNLSDAILLSDILRVNTEITKAPLSASMIKRYDEHHQDLTLLKALVRQQLPEKYKEIFFDQSKNGYAGYIDGGASQEEFYKFIKPILEKMDGTEELLVKLNREDLLRKQRTFDNGSIPHQIHLGELHAILRRQEDFYPFLKDNREKIEKILTFRIPYYVGPLARGNSRFAWMTRKSEETITPWNFEEVVDKGASAQSFIERMTNFDKNLPNEKVLPKHSLLYEYFTVYNELTKVKYVTEGMRKPAFLSGEQKKAIVDLLFKTNRKVTVKQLKEDYFKKIECFDSVEISGVEDRFNASLGTYHDLLKIIKDKDFLDNEENEDILEDIVLTLTLFEDREMIEERLKTYAHLFDDKVMKQLKRRRYTGWGRLSRKLINGIRDKQSGKTILDFLKSDGFANRNFMQLIHDDSLTFKEDIQKAQVSGQGDSLHEHIANLAGSPAIKKGILQTVKVVDELVKVMGRHKPENIVIEMARENQTTQKGQKNSRERMKRIEEGIKELGSQILKEHPVENTQLQNEKLYLYYLQNGRDMYVDQELDINRLSDYDVDHIVPQSFLKDDSIDNKVLTRSDKARGKSDNVPSEEVVKKMKNYWRQLLNAKLITQRKFDNLTKAERGGLSELDKAGFIKRQLVETRQITKHVAQILDSRMNTKYDENDKLIREVKVITLKSKLVSDFRKDFQFYKVREINNYHHAHDAYLNAVVGTALIKKYPKLESEFVYGDYKVYDVRKMIAKSEQEIGKATAKYFFYSNIMNFFKTEITLANGEIRKRPLIETNGETGEIVWDKGRDFATVRKVLSMPQVNIVKKTEVQTGGFSKESILPKRNSDKLIARKKDWDPKKYGGFDSPTVAYSVLVVAKVEKGKSKKLKSVKELLGITIMERSSFEKNPIDFLEAKGYKEVKKDLIIKLPKYSLFELENGRKRMLASAGELQKGNELALPSKYVNFLYLASHYEKLKGSPEDNEQKQLFVEQHKHYLDEIIEQISEFSKRVILADANLDKVLSAYNKHRDKPIREQAENIIHLFTLTNLGAPAAFKYFDTTIDRKRYTSTKEVLDATLIHQSITGLYETRIDLSQLGGDGGPAPGGSEAAAKGGTLNIEDEYRLHETSKEPDVSLGSTWLSDFPQAWAETGGMGLAVRQAPLIIPLKATSTPVSIKQYPMSQEARLGIKPHIQRLLDQGILVPCQSPWNTPLLPVKKPGTNDYRPVQDLREVNKRVEDIHPTVPNPYNLLSGLPPSHQWYTVLDLKDAFFCLRLHPTSQPLFAFEWRDPEMGISGQLTWTRLPQGFKNSPTLFNEALHRDLADFRIQHPDLILLQYVDDLLLAATSELDCQQGTRALLQTLGNLGYRASAKKAQICQKQVKYLGYLLKEGQRWLTEARKETVMGQPTPKTPRQLREFLGKAGFCRLFIPGFAEMAAPLYPLTKPGTLFNWGPDQQKAYQEIKQALLTAPALGLPDLTKPFELFVDEKQGYAKGVLTQKLGPWRRPVAYLSKKLDPVAAGWPPCLRMVAAIAVLTKDAGKLTMGQPLVILAPHAVEALVKQPPDRWLSNARMTHYQALLLDTDRVQFGPVVALNPATLLPLPEEGLQHNCLDILAEAHGTRPDLTDQPLPDADHTWYTDGSSLLQEGQRKAGAAVTTETEVIWAKALPAGTSAQRAELIALTQALKMAEGKKLNVYTDSRYAFATAHIHGEIYRRRGWLTSEGKEIKNKDEILALLKALFLPKRLSIIHCPGHQKGHSAEARGNRMADQAARKAAITETPDTSTLLIENSSPSGGSKRTADGSEFEAGKRTADGSEFEKRTADGSEFESPKKKAKVE

SEQ ID NO: 2641 - protein, 2116 aa, synthetic construct
MPAAKRVKLDGGDKKYSIGLDIGTNSVGWAVITDEYKVPSKKFKVLGNTDRHSIKKNLIGALLFDSGETAEATRLKRTARRRYTRRKNRICYLQEIFSNEMAKVDDSFFHRLEESFLVEEDKKHERHPIFGNIVDEVAYHEKYPTIYHLRKKLVDSTDKADLRLIYLALAHMIKFRGHFLIEGDLNPDNSDVDKLFIQLVQTYNQLFEENPINASGVDAKAILSARLSKSRRLENLIAQLPGEKKNGLFGNLIALSLGLTPNFKSNFDLAEDAKLQLSKDTYDDDLDNLLAQIGDQYADLFLAAKNLSDAILLSDILRVNTEITKAPLSASMIKRYDEHHQDLTLLKALVRQQLPEKYKEIFFDQSKNGYAGYIDGGASQEEFYKFIKPILEKMDGTEELLVKLNREDLLRKQRTFDNGSIPHQIHLGELHAILRRQEDFYPFLKDNREKIEKILTFRIPYYVGPLARGNSRFAWMTRKSEETITPWNFEEVVDKGASAQSFIERMTNFDKNLPNEKVLPKHSLLYEYFTVYNELTKVKYVTEGMRKPAFLSGEQKKAIVDLLFKTNRKVTVKQLKEDYFKKIECFDSVEISGVEDRFNASLGTYHDLLKIIKDKDFLDNEENEDILEDIVLTLTLFEDREMIEERLKTYAHLFDDKVMKQLKRRRYTGWGRLSRKLINGIRDKQSGKTILDFLKSDGFANRNFMQLIHDDSLTFKEDIQKAQVSGQGDSLHEHIANLAGSPAIKKGILQTVKVVDELVKVMGRHKPENIVIEMARENQTTQKGQKNSRERMKRIEEGIKELGSQILKEHPVENTQLQNEKLYLYYLQNGRDMYVDQELDINRLSDYDVDHIVPQSFLKDDSIDNKVLTRSDKARGKSDNVPSEEVVKKMKNYWRQLLNAKLITQRKFDNLTKAERGGLSELDKAGFIKRQLVETRQITKHVAQILDSRMNTKYDENDKLIREVKVITLKSKLVSDFRKDFQFYKVREINNYHHAHDAYLNAVVGTALIKKYPKLESEFVYGDYKVYDVRKMIAKSEQEIGKATAKYFFYSNIMNFFKTEITLANGEIRKRPLIETNGETGEIVWDKGRDFATVRKVLSMPQVNIVKKTEVQTGGFSKESILPKRNSDKLIARKKDWDPKKYGGFDSPTVAYSVLVVAKVEKGKSKKLKSVKELLGITIMERSSFEKNPIDFLEAKGYKEVKKDLIIKLPKYSLFELENGRKRMLASAGELQKGNELALPSKYVNFLYLASHYEKLKGSPEDNEQKQLFVEQHKHYLDEIIEQISEFSKRVILADANLDKVLSAYNKHRDKPIREQAENIIHLFTLTNLGAPAAFKYFDTTIDRKRYTSTKEVLDATLIHQSITGLYETRIDLSQLGGDGGGSSEAAAKPAPGGTLNIEDEYRLHETSKEPDVSLGSTWLSDFPQAWAETGGMGLAVRQAPLIIPLKATSTPVSIKQYPMSQEARLGIKPHIQRLLDQGILVPCQSPWNTPLLPVKKPGTNDYRPVQDLREVNKRVEDIHPTVPNPYNLLSGLPPSHQWYTVLDLKDAFFCLRLHPTSQPLFAFEWRDPEMGISGQLTWTRLPQGFKNSPTLFNEALHRDLADFRIQHPDLILLQYVDDLLLAATSELDCQQGTRALLQTLGNLGYRASAKKAQICQKQVKYLGYLLKEGQRWLTEARKETVMGQPTPKTPRQLREFLGKAGFCRLFIPGFAEMAAPLYPLTKPGTLFNWGPDQQKAYQEIKQALLTAPALGLPDLTKPFELFVDEKQGYAKGVLTQKLGPWRRPVAYLSKKLDPVAAGWPPCLRMVAAIAVLTKDAGKLTMGQPLVILAPHAVEALVKQPPDRWLSNARMTHYQALLLDTDRVQFGPVVALNPATLLPLPEEGLQHNCLDILAEAHGTRPDLTDQPLPDADHTWYTDGSSLLQEGQRKAGAAVTTETEVIWAKALPAGTSAQRAELIALTQALKMAEGKKLNVYTDSRYAFATAHIHGEIYRRRGWLTSEGKEIKNKDEILALLKALFLPKRLSIIHCPGHQKGHSAEARGNRMADQAARKAAITETPDTSTLLIENSSPSGGSKRTADGSEFEAGKRTADGSEFEKRTADGSEFESPKKKAKVE

SEQ ID NO: 2642 - protein, 2111 aa, synthetic construct
MPAAKRVKLDGGDKKYSIGLDIGTNSVGWAVITDEYKVPSKKFKVLGNTDRHSIKKNLIGALLFDSGETAEATRLKRTARRRYTRRKNRICYLQEIFSNEMAKVDDSFFHRLEESFLVEEDKKHERHPIFGNIVDEVAYHEKYPTIYHLRKKLVDSTDKADLRLIYLALAHMIKFRGHFLIEGDLNPDNSDVDKLFIQLVQTYNQLFEENPINASGVDAKAILSARLSKSRRLENLIAQLPGEKKNGLFGNLIALSLGLTPNFKSNFDLAEDAKLQLSKDTYDDDLDNLLAQIGDQYADLFLAAKNLSDAILLSDILRVNTEITKAPLSASMIKRYDEHHQDLTLLKALVRQQLPEKYKEIFFDQSKNGYAGYIDGGASQEEFYKFIKPILEKMDGTEELLVKLNREDLLRKQRTFDNGSIPHQIHLGELHAILRRQEDFYPFLKDNREKIEKILTFRIPYYVGPLARGNSRFAWMTRKSEETITPWNFEEVVDKGASAQSFIERMTNFDKNLPNEKVLPKHSLLYEYFTVYNELTKVKYVTEGMRKPAFLSGEQKKAIVDLLFKTNRKVTVKQLKEDYFKKIECFDSVEISGVEDRFNASLGTYHDLLKIIKDKDFLDNEENEDILEDIVLTLTLFEDREMIEERLKTYAHLFDDKVMKQLKRRRYTGWGRLSRKLINGIRDKQSGKTILDFLKSDGFANRNFMQLIHDDSLTFKEDIQKAQVSGQGDSLHEHIANLAGSPAIKKGILQTVKVVDELVKVMGRHKPENIVIEMARENQTTQKGQKNSRERMKRIEEGIKELGSQILKEHPVENTQLQNEKLYLYYLQNGRDMYVDQELDINRLSDYDVDHIVPQSFLKDDSIDNKVLTRSDKARGKSDNVPSEEVVKKMKNYWRQLLNAKLITQRKFDNLTKAERGGLSELDKAGFIKRQLVETRQITKHVAQILDSRMNTKYDENDKLIREVKVITLKSKLVSDFRKDFQFYKVREINNYHHAHDAYLNAVVGTALIKKYPKLESEFVYGDYKVYDVRKMIAKSEQEIGKATAKYFFYSNIMNFFKTEITLANGEIRKRPLIETNGETGEIVWDKGRDFATVRKVLSMPQVNIVKKTEVQTGGFSKESILPKRNSDKLIARKKDWDPKKYGGFDSPTVAYSVLVVAKVEKGKSKKLKSVKELLGITIMERSSFEKNPIDFLEAKGYKEVKKDLIIKLPKYSLFELENGRKRMLASAGELQKGNELALPSKYVNFLYLASHYEKLKGSPEDNEQKQLFVEQHKHYLDEIIEQISEFSKRVILADANLDKVLSAYNKHRDKPIREQAENIIHLFTLTNLGAPAAFKYFDTTIDRKRYTSTKEVLDATLIHQSITGLYETRIDLSQLGGDGGGGGGGGGGTLNIEDEYRLHETSKEPDVSLGSTWLSDFPQAWAETGGMGLAVRQAPLIIPLKATSTPVSIKQYPMSQEARLGIKPHIQRLLDQGILVPCQSPWNTPLLPVKKPGTNDYRPVQDLREVNKRVEDIHPTVPNPYNLLSGLPPSHQWYTVLDLKDAFFCLRLHPTSQPLFAFEWRDPEMGISGQLTWTRLPQGFKNSPTLFNEALHRDLADFRIQHPDLILLQYVDDLLLAATSELDCQQGTRALLQTLGNLGYRASAKKAQICQKQVKYLGYLLKEGQRWLTEARKETVMGQPTPKTPRQLREFLGKAGFCRLFIPGFAEMAAPLYPLTKPGTLFNWGPDQQKAYQEIKQALLTAPALGLPDLTKPFELFVDEKQGYAKGVLTQKLGPWRRPVAYLSKKLDPVAAGWPPCLRMVAAIAVLTKDAGKLTMGQPLVILAPHAVEALVKQPPDRWLSNARMTHYQALLLDTDRVQFGPVVALNPATLLPLPEEGLQHNCLDILAEAHGTRPDLTDQPLPDADHTWYTDGSSLLQEGQRKAGAAVTTETEVIWAKALPAGTSAQRAELIALTQALKMAEGKKLNVYTDSRYAFATAHIHGEIYRRRGWLTSEGKEIKNKDEILALLKALFLPKRLSIIHCPGHQKGHSAEARGNRMADQAARKAAITETPDTSTLLIENSSPSGGSKRTADGSEFEAGKRTADGSEFEKRTADGSEFESPKKKAKVE

SEQ ID NO: 2643 - protein, 2111 aa, synthetic construct
MPAAKRVKLDGGDKKYSIGLDIGTNSVGWAVITDEYKVPSKKFKVLGNTDRHSIKKNLIGALLFDSGETAEATRLKRTARRRYTRRKNRICYLQEIFSNEMAKVDDSFFHRLEESFLVEEDKKHERHPIFGNIVDEVAYHEKYPTIYHLRKKLVDSTDKADLRLIYLALAHMIKFRGHFLIEGDLNPDNSDVDKLFIQLVQTYNQLFEENPINASGVDAKAILSARLSKSRRLENLIAQLPGEKKNGLFGNLIALSLGLTPNFKSNFDLAEDAKLQLSKDTYDDDLDNLLAQIGDQYADLFLAAKNLSDAILLSDILRVNTEITKAPLSASMIKRYDEHHQDLTLLKALVRQQLPEKYKEIFFDQSKNGYAGYIDGGASQEEFYKFIKPILEKMDGTEELLVKLNREDLLRKQRTFDNGSIPHQIHLGELHAILRRQEDFYPFLKDNREKIEKILTFRIPYYVGPLARGNSRFAWMTRKSEETITPWNFEEVVDKGASAQSFIERMTNFDKNLPNEKVLPKHSLLYEYFTVYNELTKVKYVTEGMRKPAFLSGEQKKAIVDLLFKTNRKVTVKQLKEDYFKKIECFDSVEISGVEDRFNASLGTYHDLLKIIKDKDFLDNEENEDILEDIVLTLTLFEDREMIEERLKTYAHLFDDKVMKQLKRRRYTGWGRLSRKLINGIRDKQSGKTILDFLKSDGFANRNFMQLIHDDSLTFKEDIQKAQVSGQGDSLHEHIANLAGSPAIKKGILQTVKVVDELVKVMGRHKPENIVIEMARENQTTQKGQKNSRERMKRIEEGIKELGSQILKEHPVENTQLQNEKLYLYYLQNGRDMYVDQELDINRLSDYDVDHIVPQSFLKDDSIDNKVLTRSDKARGKSDNVPSEEVVKKMKNYWRQLLNAKLITQRKFDNLTKAERGGLSELDKAGFIKRQLVETRQITKHVAQILDSRMNTKYDENDKLIREVKVITLKSKLVSDFRKDFQFYKVREINNYHHAHDAYLNAVVGTALIKKYPKLESEFVYGDYKVYDVRKMIAKSEQEIGKATAKYFFYSNIMNFFKTEITLANGEIRKRPLIETNGETGEIVWDKGRDFATVRKVLSMPQVNIVKKTEVQTGGFSKESILPKRNSDKLIARKKDWDPKKYGGFDSPTVAYSVLVVAKVEKGKSKKLKSVKELLGITIMERSSFEKNPIDFLEAKGYKEVKKDLIIKLPKYSLFELENGRKRMLASAGELQKGNELALPSKYVNFLYLASHYEKLKGSPEDNEQKQLFVEQHKHYLDEIIEQISEFSKRVILADANLDKVLSAYNKHRDKPIREQAENIIHLFTLTNLGAPAAFKYFDTTIDRKRYTSTKEVLDATLIHQSITGLYETRIDLSQLGGDGGPAPGGSGGTLNIEDEYRLHETSKEPDVSLGSTWLSDFPQAWAETGGMGLAVRQAPLIIPLKATSTPVSIKQYPMSQEARLGIKPHIQRLLDQGILVPCQSPWNTPLLPVKKPGTNDYRPVQDLREVNKRVEDIHPTVPNPYNLLSGLPPSHQWYTVLDLKDAFFCLRLHPTSQPLFAFEWRDPEMGISGQLTWTRLPQGFKNSPTLFNEALHRDLADFRIQHPDLILLQYVDDLLLAATSELDCQQGTRALLQTLGNLGYRASAKKAQICQKQVKYLGYLLKEGQRWLTEARKETVMGQPTPKTPRQLREFLGKAGFCRLFIPGFAEMAAPLYPLTKPGTLFNWGPDQQKAYQEIKQALLTAPALGLPDLTKPFELFVDEKQGYAKGVLTQKLGPWRRPVAYLSKKLDPVAAGWPPCLRMVAAIAVLTKDAGKLTMGQPLVILAPHAVEALVKQPPDRWLSNARMTHYQALLLDTDRVQFGPVVALNPATLLPLPEEGLQHNCLDILAEAHGTRPDLTDQPLPDADHTWYTDGSSLLQEGQRKAGAAVTTETEVIWAKALPAGTSAQRAELIALTQALKMAEGKKLNVYTDSRYAFATAHIHGEIYRRRGWLTSEGKEIKNKDEILALLKALFLPKRLSIIHCPGHQKGHSAEARGNRMADQAARKAAITETPDTSTLLIENSSPSGGSKRTADGSEFEAGKRTADGSEFEKRTADGSEFESPKKKAKVE

SEQ ID NO: 2644 - protein, 2135 aa, synthetic construct
MPAAKRVKLDGGDKKYSIGLDIGTNSVGWAVITDEYKVPSKKFKVLGNTDRHSIKKNLIGALLFDSGETAEATRLKRTARRRYTRRKNRICYLQEIFSNEMAKVDDSFFHRLEESFLVEEDKKHERHPIFGNIVDEVAYHEKYPTIYHLRKKLVDSTDKADLRLIYLALAHMIKFRGHFLIEGDLNPDNSDVDKLFIQLVQTYNQLFEENPINASGVDAKAILSARLSKSRRLENLIAQLPGEKKNGLFGNLIALSLGLTPNFKSNFDLAEDAKLQLSKDTYDDDLDNLLAQIGDQYADLFLAAKNLSDAILLSDILRVNTEITKAPLSASMIKRYDEHHQDLTLLKALVRQQLPEKYKEIFFDQSKNGYAGYIDGGASQEEFYKFIKPILEKMDGTEELLVKLNREDLLRKQRTFDNGSIPHQIHLGELHAILRRQEDFYPFLKDNREKIEKILTFRIPYYVGPLARGNSRFAWMTRKSEETITPWNFEEVVDKGASAQSFIERMTNFDKNLPNEKVLPKHSLLYEYFTVYNELTKVKYVTEGMRKPAFLSGEQKKAIVDLLFKTNRKVTVKQLKEDYFKKIECFDSVEISGVEDRFNASLGTYHDLLKIIKDKDFLDNEENEDILEDIVLTLTLFEDREMIEERLKTYAHLFDDKVMKQLKRRRYTGWGRLSRKLINGIRDKQSGKTILDFLKSDGFANRNFMQLIHDDSLTFKEDIQKAQVSGQGDSLHEHIANLAGSPAIKKGILQTVKVVDELVKVMGRHKPENIVIEMARENQTTQKGQKNSRERMKRIEEGIKELGSQILKEHPVENTQLQNEKLYLYYLQNGRDMYVDQELDINRLSDYDVDHIVPQSFLKDDSIDNKVLTRSDKARGKSDNVPSEEVVKKMKNYWRQLLNAKLITQRKFDNLTKAERGGLSELDKAGFIKRQLVETRQITKHVAQILDSRMNTKYDENDKLIREVKVITLKSKLVSDFRKDFQFYKVREINNYHHAHDAYLNAVVGTALIKKYPKLESEFVYGDYKVYDVRKMIAKSEQEIGKATAKYFFYSNIMNFFKTEITLANGEIRKRPLIETNGETGEIVWDKGRDFATVRKVLSMPQVNIVKKTEVQTGGFSKESILPKRNSDKLIARKKDWDPKKYGGFDSPTVAYSVLVVAKVEKGKSKKLKSVKELLGITIMERSSFEKNPIDFLEAKGYKEVKKDLIIKLPKYSLFELENGRKRMLASAGELQKGNELALPSKYVNFLYLASHYEKLKGSPEDNEQKQLFVEQHKHYLDEIIEQISEFSKRVILADANLDKVLSAYNKHRDKPIREQAENIIHLFTLTNLGAPAAFKYFDTTIDRKRYTSTKEVLDATLIHQSITGLYETRIDLSQLGGDGGGGGGSGGGGSGGGGSGGGGSGGGGSGGGGSGGTLNIEDEYRLHETSKEPDVSLGSTWLSDFPQAWAETGGMGLAVRQAPLIIPLKATSTPVSIKQYPMSQEARLGIKPHIQRLLDQGILVPCQSPWNTPLLPVKKPGTNDYRPVQDLREVNKRVEDIHPTVPNPYNLLSGLPPSHQWYTVLDLKDAFFCLRLHPTSQPLFAFEWRDPEMGISGQLTWTRLPQGFKNSPTLFNEALHRDLADFRIQHPDLILLQYVDDLLLAATSELDCQQGTRALLQTLGNLGYRASAKKAQICQKQVKYLGYLLKEGQRWLTEARKETVMGQPTPKTPRQLREFLGKAGFCRLFIPGFAEMAAPLYPLTKPGTLFNWGPDQQKAYQEIKQALLTAPALGLPDLTKPFELFVDEKQGYAKGVLTQKLGPWRRPVAYLSKKLDPVAAGWPPCLRMVAAIAVLTKDAGKLTMGQPLVILAPHAVEALVKQPPDRWLSNARMTHYQALLLDTDRVQFGPVVALNPATLLPLPEEGLQHNCLDILAEAHGTRPDLTDQPLPDADHTWYTDGSSLLQEGQRKAGAAVTTETEVIWAKALPAGTSAQRAELIALTQALKMAEGKKLNVYTDSRYAFATAHIHGEIYRRRGWLTSEGKEIKNKDEILALLKALFLPKRLSIIHCPGHQKGHSAEARGNRMADQAARKAAITETPDTSTLLIENSSPSGGSKRTADGSEFEAGKRTADGSEFEKRTADGSEFESPKKKAKVE

SEQ ID NO: 2645 - protein, 2116 aa, synthetic construct
MPAAKRVKLDGGDKKYSIGLDIGTNSVGWAVITDEYKVPSKKFKVLGNTDRHSIKKNLIGALLFDSGETAEATRLKRTARRRYTRRKNRICYLQEIFSNEMAKVDDSFFHRLEESFLVEEDKKHERHPIFGNIVDEVAYHEKYPTIYHLRKKLVDSTDKADLRLIYLALAHMIKFRGHFLIEGDLNPDNSDVDKLFIQLVQTYNQLFEENPINASGVDAKAILSARLSKSRRLENLIAQLPGEKKNGLFGNLIALSLGLTPNFKSNFDLAEDAKLQLSKDTYDDDLDNLLAQIGDQYADLFLAAKNLSDAILLSDILRVNTEITKAPLSASMIKRYDEHHQDLTLLKALVRQQLPEKYKEIFFDQSKNGYAGYIDGGASQEEFYKFIKPILEKMDGTEELLVKLNREDLLRKQRTFDNGSIPHQIHLGELHAILRRQEDFYPFLKDNREKIEKILTFRIPYYVGPLARGNSRFAWMTRKSEETITPWNFEEVVDKGASAQSFIERMTNFDKNLPNEKVLPKHSLLYEYFTVYNELTKVKYVTEGMRKPAFLSGEQKKAIVDLLFKTNRKVTVKQLKEDYFKKIECFDSVEISGVEDRFNASLGTYHDLLKIIKDKDFLDNEENEDILEDIVLTLTLFEDREMIEERLKTYAHLFDDKVMKQLKRRRYTGWGRLSRKLINGIRDKQSGKTILDFLKSDGFANRNFMQLIHDDSLTFKEDIQKAQVSGQGDSLHEHIANLAGSPAIKKGILQTVKVVDELVKVMGRHKPENIVIEMARENQTTQKGQKNSRERMKRIEEGIKELGSQILKEHPVENTQLQNEKLYLYYLQNGRDMYVDQELDINRLSDYDVDHIVPQSFLKDDSIDNKVLTRSDKARGKSDNVPSEEVVKKMKNYWRQLLNAKLITQRKFDNLTKAERGGLSELDKAGFIKRQLVETRQITKHVAQILDSRMNTKYDENDKLIREVKVITLKSKLVSDFRKDFQFYKVREINNYHHAHDAYLNAVVGTALIKKYPKLESEFVYGDYKVYDVRKMIAKSEQEIGKATAKYFFYSNIMNFFKTEITLANGEIRKRPLIETNGETGEIVWDKGRDFATVRKVLSMPQVNIVKKTEVQTGGFSKESILPKRNSDKLIARKKDWDPKKYGGFDSPTVAYSVLVVAKVEKGKSKKLKSVKELLGITIMERSSFEKNPIDFLEAKGYKEVKKDLIIKLPKYSLFELENGRKRMLASAGELQKGNELALPSKYVNFLYLASHYEKLKGSPEDNEQKQLFVEQHKHYLDEIIEQISEFSKRVILADANLDKVLSAYNKHRDKPIREQAENIIHLFTLTNLGAPAAFKYFDTTIDRKRYTSTKEVLDATLIHQSITGLYETRIDLSQLGGDGGPAPEAAAKGSSGGTLNIEDEYRLHETSKEPDVSLGSTWLSDFPQAWAETGGMGLAVRQAPLIIPLKATSTPVSIKQYPMSQEARLGIKPHIQRLLDQGILVPCQSPWNTPLLPVKKPGTNDYRPVQDLREVNKRVEDIHPTVPNPYNLLSGLPPSHQWYTVLDLKDAFFCLRLHPTSQPLFAFEWRDPEMGISGQLTWTRLPQGFKNSPTLFNEALHRDLADFRIQHPDLILLQYVDDLLLAATSELDCQQGTRALLQTLGNLGYRASAKKAQICQKQVKYLGYLLKEGQRWLTEARKETVMGQPTPKTPRQLREFLGKAGFCRLFIPGFAEMAAPLYPLTKPGTLFNWGPDQQKAYQEIKQALLTAPALGLPDLTKPFELFVDEKQGYAKGVLTQKLGPWRRPVAYLSKKLDPVAAGWPPCLRMVAAIAVLTKDAGKLTMGQPLVILAPHAVEALVKQPPDRWLSNARMTHYQALLLDTDRVQFGPVVALNPATLLPLPEEGLQHNCLDILAEAHGTRPDLTDQPLPDADHTWYTDGSSLLQEGQRKAGAAVTTETEVIWAKALPAGTSAQRAELIALTQALKMAEGKKLNVYTDSRYAFATAHIHGEIYRRRGWLTSEGKEIKNKDEILALLKALFLPKRLSIIHCPGHQKGHSAEARGNRMADQAARKAAITETPDTSTLLIENSSPSGGSKRTADGSEFEAGKRTADGSEFEKRTADGSEFESPKKKAKVE

SEQ ID NO: 2646 - protein, 2108 aa, synthetic construct
MPAAKRVKLDGGDKKYSIGLDIGTNSVGWAVITDEYKVPSKKFKVLGNTDRHSIKKNLIGALLFDSGETAEATRLKRTARRRYTRRKNRICYLQEIFSNEMAKVDDSFFHRLEESFLVEEDKKHERHPIFGNIVDEVAYHEKYPTIYHLRKKLVDSTDKADLRLIYLALAHMIKFRGHFLIEGDLNPDNSDVDKLFIQLVQTYNQLFEENPINASGVDAKAILSARLSKSRRLENLIAQLPGEKKNGLFGNLIALSLGLTPNFKSNFDLAEDAKLQLSKDTYDDDLDNLLAQIGDQYADLFLAAKNLSDAILLSDILRVNTEITKAPLSASMIKRYDEHHQDLTLLKALVRQQLPEKYKEIFFDQSKNGYAGYIDGGASQEEFYKFIKPILEKMDGTEELLVKLNREDLLRKQRTFDNGSIPHQIHLGELHAILRRQEDFYPFLKDNREKIEKILTFRIPYYVGPLARGNSRFAWMTRKSEETITPWNFEEVVDKGASAQSFIERMTNFDKNLPNEKVLPKHSLLYEYFTVYNELTKVKYVTEGMRKPAFLSGEQKKAIVDLLFKTNRKVTVKQLKEDYFKKIECFDSVEISGVEDRFNASLGTYHDLLKIIKDKDFLDNEENEDILEDIVLTLTLFEDREMIEERLKTYAHLFDDKVMKQLKRRRYTGWGRLSRKLINGIRDKQSGKTILDFLKSDGFANRNFMQLIHDDSLTFKEDIQKAQVSGQGDSLHEHIANLAGSPAIKKGILQTVKVVDELVKVMGRHKPENIVIEMARENQTTQKGQKNSRERMKRIEEGIKELGSQILKEHPVENTQLQNEKLYLYYLQNGRDMYVDQELDINRLSDYDVDHIVPQSFLKDDSIDNKVLTRSDKARGKSDNVPSEEVVKKMKNYWRQLLNAKLITQRKFDNLTKAERGGLSELDKAGFIKRQLVETRQITKHVAQILDSRMNTKYDENDKLIREVKVITLKSKLVSDFRKDFQFYKVREINNYHHAHDAYLNAVVGTALIKKYPKLESEFVYGDYKVYDVRKMIAKSEQEIGKATAKYFFYSNIMNFFKTEITLANGEIRKRPLIETNGETGEIVWDKGRDFATVRKVLSMPQVNIVKKTEVQTGGFSKESILPKRNSDKLIARKKDWDPKKYGGFDSPTVAYSVLVVAKVEKGKSKKLKSVKELLGITIMERSSFEKNPIDFLEAKGYKEVKKDLIIKLPKYSLFELENGRKRMLASAGELQKGNELALPSKYVNFLYLASHYEKLKGSPEDNEQKQLFVEQHKHYLDEIIEQISEFSKRVILADANLDKVLSAYNKHRDKPIREQAENIIHLFTLTNLGAPAAFKYFDTTIDRKRYTSTKEVLDATLIHQSITGLYETRIDLSQLGGDGGGGGGGTLNIEDEYRLHETSKEPDVSLGSTWLSDFPQAWAETGGMGLAVRQAPLIIPLKATSTPVSIKQYPMSQEARLGIKPHIQRLLDQGILVPCQSPWNTPLLPVKKPGTNDYRPVQDLREVNKRVEDIHPTVPNPYNLLSGLPPSHQWYTVLDLKDAFFCLRLHPTSQPLFAFEWRDPEMGISGQLTWTRLPQGFKNSPTLFNEALHRDLADFRIQHPDLILLQYVDDLLLAATSELDCQQGTRALLQTLGNLGYRASAKKAQICQKQVKYLGYLLKEGQRWLTEARKETVMGQPTPKTPRQLREFLGKAGFCRLFIPGFAEMAAPLYPLTKPGTLFNWGPDQQKAYQEIKQALLTAPALGLPDLTKPFELFVDEKQGYAKGVLTQKLGPWRRPVAYLSKKLDPVAAGWPPCLRMVAAIAVLTKDAGKLTMGQPLVILAPHAVEALVKQPPDRWLSNARMTHYQALLLDTDRVQFGPVVALNPATLLPLPEEGLQHNCLDILAEAHGTRPDLTDQPLPDADHTWYTDGSSLLQEGQRKAGAAVTTETEVIWAKALPAGTSAQRAELIALTQALKMAEGKKLNVYTDSRYAFATAHIHGEIYRRRGWLTSEGKEIKNKDEILALLKALFLPKRLSIIHCPGHQKGHSAEARGNRMADQAARKAAITETPDTSTLLIENSSPSGGSKRTADGSEFEAGKRTADGSEFEKRTADGSEFESPKKKAKVE

SEQ ID NO: 2647 - protein, 2115 aa, synthetic construct
MPAAKRVKLDGGDKKYSIGLDIGTNSVGWAVITDEYKVPSKKFKVLGNTDRHSIKKNLIGALLFDSGETAEATRLKRTARRRYTRRKNRICYLQEIFSNEMAKVDDSFFHRLEESFLVEEDKKHERHPIFGNIVDEVAYHEKYPTIYHLRKKLVDSTDKADLRLIYLALAHMIKFRGHFLIEGDLNPDNSDVDKLFIQLVQTYNQLFEENPINASGVDAKAILSARLSKSRRLENLIAQLPGEKKNGLFGNLIALSLGLTPNFKSNFDLAEDAKLQLSKDTYDDDLDNLLAQIGDQYADLFLAAKNLSDAILLSDILRVNTEITKAPLSASMIKRYDEHHQDLTLLKALVRQQLPEKYKEIFFDQSKNGYAGYIDGGASQEEFYKFIKPILEKMDGTEELLVKLNREDLLRKQRTFDNGSIPHQIHLGELHAILRRQEDFYPFLKDNREKIEKILTFRIPYYVGPLARGNSRFAWMTRKSEETITPWNFEEVVDKGASAQSFIERMTNFDKNLPNEKVLPKHSLLYEYFTVYNELTKVKYVTEGMRKPAFLSGEQKKAIVDLLFKTNRKVTVKQLKEDYFKKIECFDSVEISGVEDRFNASLGTYHDLLKIIKDKDFLDNEENEDILEDIVLTLTLFEDREMIEERLKTYAHLFDDKVMKQLKRRRYTGWGRLSRKLINGIRDKQSGKTILDFLKSDGFANRNFMQLIHDDSLTFKEDIQKAQVSGQGDSLHEHIANLAGSPAIKKGILQTVKVVDELVKVMGRHKPENIVIEMARENQTTQKGQKNSRERMKRIEEGIKELGSQILKEHPVENTQLQNEKLYLYYLQNGRDMYVDQELDINRLSDYDVDHIVPQSFLKDDSIDNKVLTRSDKARGKSDNVPSEEVVKKMKNYWRQLLNAKLITQRKFDNLTKAERGGLSELDKAGFIKRQLVETRQITKHVAQILDSRMNTKYDENDKLIREVKVITLKSKLVSDFRKDFQFYKVREINNYHHAHDAYLNAVVGTALIKKYPKLESEFVYGDYKVYDVRKMIAKSEQEIGKATAKYFFYSNIMNFFKTEITLANGEIRKRPLIETNGETGEIVWDKGRDFATVRKVLSMPQVNIVKKTEVQTGGFSKESILPKRNSDKLIARKKDWDPKKYGGFDSPTVAYSVLVVAKVEKGKSKKLKSVKELLGITIMERSSFEKNPIDFLEAKGYKEVKKDLIIKLPKYSLFELENGRKRMLASAGELQKGNELALPSKYVNFLYLASHYEKLKGSPEDNEQKQLFVEQHKHYLDEIIEQISEFSKRVILADANLDKVLSAYNKHRDKPIREQAENIIHLFTLTNLGAPAAFKYFDTTIDRKRYTSTKEVLDATLIHQSITGLYETRIDLSQLGGDGGEAAAKEAAAKGGTLNIEDEYRLHETSKEPDVSLGSTWLSDFPQAWAETGGMGLAVRQAPLIIPLKATSTPVSIKQYPMSQEARLGIKPHIQRLLDQGILVPCQSPWNTPLLPVKKPGTNDYRPVQDLREVNKRVEDIHPTVPNPYNLLSGLPPSHQWYTVLDLKDAFFCLRLHPTSQPLFAFEWRDPEMGISGQLTWTRLPQGFKNSPTLFNEALHRDLADFRIQHPDLILLQYVDDLLLAATSELDCQQGTRALLQTLGNLGYRASAKKAQICQKQVKYLGYLLKEGQRWLTEARKETVMGQPTPKTPRQLREFLGKAGFCRLFIPGFAEMAAPLYPLTKPGTLFNWGPDQQKAYQEIKQALLTAPALGLPDLTKPFELFVDEKQGYAKGVLTQKLGPWRRPVAYLSKKLDPVAAGWPPCLRMVAAIAVLTKDAGKLTMGQPLVILAPHAVEALVKQPPDRWLSNARMTHYQALLLDTDRVQFGPVVALNPATLLPLPEEGLQHNCLDILAEAHGTRPDLTDQPLPDADHTWYTDGSSLLQEGQRKAGAAVTTETEVIWAKALPAGTSAQRAELIALTQALKMAEGKKLNVYTDSRYAFATAHIHGEIYRRRGWLTSEGKEIKNKDEILALLKALFLPKRLSIIHCPGHQKGHSAEARGNRMADQAARKAAITETPDTSTLLIENSSPSGGSKRTADGSEFEAGKRTADGSEFEKRTADGSEFESPKKKAKVE

SEQ ID NO: 2648 - protein, 2116 aa, synthetic construct
MPAAKRVKLDGGDKKYSIGLDIGTNSVGWAVITDEYKVPSKKFKVLGNTDRHSIKKNLIGALLFDSGETAEATRLKRTARRRYTRRKNRICYLQEIFSNEMAKVDDSFFHRLEESFLVEEDKKHERHPIFGNIVDEVAYHEKYPTIYHLRKKLVDSTDKADLRLIYLALAHMIKFRGHFLIEGDLNPDNSDVDKLFIQLVQTYNQLFEENPINASGVDAKAILSARLSKSRRLENLIAQLPGEKKNGLFGNLIALSLGLTPNFKSNFDLAEDAKLQLSKDTYDDDLDNLLAQIGDQYADLFLAAKNLSDAILLSDILRVNTEITKAPLSASMIKRYDEHHQDLTLLKALVRQQLPEKYKEIFFDQSKNGYAGYIDGGASQEEFYKFIKPILEKMDGTEELLVKLNREDLLRKQRTFDNGSIPHQIHLGELHAILRRQEDFYPFLKDNREKIEKILTFRIPYYVGPLARGNSRFAWMTRKSEETITPWNFEEVVDKGASAQSFIERMTNFDKNLPNEKVLPKHSLLYEYFTVYNELTKVKYVTEGMRKPAFLSGEQKKAIVDLLFKTNRKVTVKQLKEDYFKKIECFDSVEISGVEDRFNASLGTYHDLLKIIKDKDFLDNEENEDILEDIVLTLTLFEDREMIEERLKTYAHLFDDKVMKQLKRRRYTGWGRLSRKLINGIRDKQSGKTILDFLKSDGFANRNFMQLIHDDSLTFKEDIQKAQVSGQGDSLHEHIANLAGSPAIKKGILQTVKVVDELVKVMGRHKPENIVIEMARENQTTQKGQKNSRERMKRIEEGIKELGSQILKEHPVENTQLQNEKLYLYYLQNGRDMYVDQELDINRLSDYDVDHIVPQSFLKDDSIDNKVLTRSDKARGKSDNVPSEEVVKKMKNYWRQLLNAKLITQRKFDNLTKAERGGLSELDKAGFIKRQLVETRQITKHVAQILDSRMNTKYDENDKLIREVKVITLKSKLVSDFRKDFQFYKVREINNYHHAHDAYLNAVVGTALIKKYPKLESEFVYGDYKVYDVRKMIAKSEQEIGKATAKYFFYSNIMNFFKTEITLANGEIRKRPLIETNGETGEIVWDKGRDFATVRKVLSMPQVNIVKKTEVQTGGFSKESILPKRNSDKLIARKKDWDPKKYGGFDSPTVAYSVLVVAKVEKGKSKKLKSVKELLGITIMERSSFEKNPIDFLEAKGYKEVKKDLIIKLPKYSLFELENGRKRMLASAGELQKGNELALPSKYVNFLYLASHYEKLKGSPEDNEQKQLFVEQHKHYLDEIIEQISEFSKRVILADANLDKVLSAYNKHRDKPIREQAENIIHLFTLTNLGAPAAFKYFDTTIDRKRYTSTKEVLDATLIHQSITGLYETRIDLSQLGGDGGGSSPAPEAAAKGGTLNIEDEYRLHETSKEPDVSLGSTWLSDFPQAWAETGGMGLAVRQAPLIIPLKATSTPVSIKQYPMSQEARLGIKPHIQRLLDQGILVPCQSPWNTPLLPVKKPGTNDYRPVQDLREVNKRVEDIHPTVPNPYNLLSGLPPSHQWYTVLDLKDAFFCLRLHPTSQPLFAFEWRDPEMGISGQLTWTRLPQGFKNSPTLFNEALHRDLADFRIQHPDLILLQYVDDLLLAATSELDCQQGTRALLQTLGNLGYRASAKKAQICQKQVKYLGYLLKEGQRWLTEARKETVMGQPTPKTPRQLREFLGKAGFCRLFIPGFAEMAAPLYPLTKPGTLFNWGPDQQKAYQEIKQALLTAPALGLPDLTKPFELFVDEKQGYAKGVLTQKLGPWRRPVAYLSKKLDPVAAGWPPCLRMVAAIAVLTKDAGKLTMGQPLVILAPHAVEALVKQPPDRWLSNARMTHYQALLLDTDRVQFGPVVALNPATLLPLPEEGLQHNCLDILAEAHGTRPDLTDQPLPDADHTWYTDGSSLLQEGQRKAGAAVTTETEVIWAKALPAGTSAQRAELIALTQALKMAEGKKLNVYTDSRYAFATAHIHGEIYRRRGWLTSEGKEIKNKDEILALLKALFLPKRLSIIHCPGHQKGHSAEARGNRMADQAARKAAITETPDTSTLLIENSSPSGGSKRTADGSEFEAGKRTADGSEFEKRTADGSEFESPKKKAKVE

SEQ ID NO: 2649 - protein, 2114 aa, synthetic construct
MPAAKRVKLDGGDKKYSIGLDIGTNSVGWAVITDEYKVPSKKFKVLGNTDRHSIKKNLIGALLFDSGETAEATRLKRTARRRYTRRKNRICYLQEIFSNEMAKVDDSFFHRLEESFLVEEDKKHERHPIFGNIVDEVAYHEKYPTIYHLRKKLVDSTDKADLRLIYLALAHMIKFRGHFLIEGDLNPDNSDVDKLFIQLVQTYNQLFEENPINASGVDAKAILSARLSKSRRLENLIAQLPGEKKNGLFGNLIALSLGLTPNFKSNFDLAEDAKLQLSKDTYDDDLDNLLAQIGDQYADLFLAAKNLSDAILLSDILRVNTEITKAPLSASMIKRYDEHHQDLTLLKALVRQQLPEKYKEIFFDQSKNGYAGYIDGGASQEEFYKFIKPILEKMDGTEELLVKLNREDLLRKQRTFDNGSIPHQIHLGELHAILRRQEDFYPFLKDNREKIEKILTFRIPYYVGPLARGNSRFAWMTRKSEETITPWNFEEVVDKGASAQSFIERMTNFDKNLPNEKVLPKHSLLYEYFTVYNELTKVKYVTEGMRKPAFLSGEQKKAIVDLLFKTNRKVTVKQLKEDYFKKIECFDSVEISGVEDRFNASLGTYHDLLKIIKDKDFLDNEENEDILEDIVLTLTLFEDREMIEERLKTYAHLFDDKVMKQLKRRRYTGWGRLSRKLINGIRDKQSGKTILDFLKSDGFANRNFMQLIHDDSLTFKEDIQKAQVSGQGDSLHEHIANLAGSPAIKKGILQTVKVVDELVKVMGRHKPENIVIEMARENQTTQKGQKNSRERMKRIEEGIKELGSQILKEHPVENTQLQNEKLYLYYLQNGRDMYVDQELDINRLSDYDVDHIVPQSFLKDDSIDNKVLTRSDKARGKSDNVPSEEVVKKMKNYWRQLLNAKLITQRKFDNLTKAERGGLSELDKAGFIKRQLVETRQITKHVAQILDSRMNTKYDENDKLIREVKVITLKSKLVSDFRKDFQFYKVREINNYHHAHDAYLNAVVGTALIKKYPKLESEFVYGDYKVYDVRKMIAKSEQEIGKATAKYFFYSNIMNFFKTEITLANGEIRKRPLIETNGETGEIVWDKGRDFATVRKVLSMPQVNIVKKTEVQTGGFSKESILPKRNSDKLIARKKDWDPKKYGGFDSPTVAYSVLVVAKVEKGKSKKLKSVKELLGITIMERSSFEKNPIDFLEAKGYKEVKKDLIIKLPKYSLFELENGRKRMLASAGELQKGNELALPSKYVNFLYLASHYEKLKGSPEDNEQKQLFVEQHKHYLDEIIEQISEFSKRVILADANLDKVLSAYNKHRDKPIREQAENIIHLFTLTNLGAPAAFKYFDTTIDRKRYTSTKEVLDATLIHQSITGLYETRIDLSQLGGDGGPAPGGSGGGGGTLNIEDEYRLHETSKEPDVSLGSTWLSDFPQAWAETGGMGLAVRQAPLIIPLKATSTPVSIKQYPMSQEARLGIKPHIQRLLDQGILVPCQSPWNTPLLPVKKPGTNDYRPVQDLREVNKRVEDIHPTVPNPYNLLSGLPPSHQWYTVLDLKDAFFCLRLHPTSQPLFAFEWRDPEMGISGQLTWTRLPQGFKNSPTLFNEALHRDLADFRIQHPDLILLQYVDDLLLAATSELDCQQGTRALLQTLGNLGYRASAKKAQICQKQVKYLGYLLKEGQRWLTEARKETVMGQPTPKTPRQLREFLGKAGFCRLFIPGFAEMAAPLYPLTKPGTLFNWGPDQQKAYQEIKQALLTAPALGLPDLTKPFELFVDEKQGYAKGVLTQKLGPWRRPVAYLSKKLDPVAAGWPPCLRMVAAIAVLTKDAGKLTMGQPLVILAPHAVEALVKQPPDRWLSNARMTHYQALLLDTDRVQFGPVVALNPATLLPLPEEGLQHNCLDILAEAHGTRPDLTDQPLPDADHTWYTDGSSLLQEGQRKAGAAVTTETEVIWAKALPAGTSAQRAELIALTQALKMAEGKKLNVYTDSRYAFATAHIHGEIYRRRGWLTSEGKEIKNKDEILALLKALFLPKRLSIIHCPGHQKGHSAEARGNRMADQAARKAAITETPDTSTLLIENSSPSGGSKRTADGSEFEAGKRTADGSEFEKRTADGSEFESPKKKAKVE

SEQ ID NO: 2650 - protein, 2114 aa, synthetic construct
MPAAKRVKLDGGDKKYSIGLDIGTNSVGWAVITDEYKVPSKKFKVLGNTDRHSIKKNLIGALLFDSGETAEATRLKRTARRRYTRRKNRICYLQEIFSNEMAKVDDSFFHRLEESFLVEEDKKHERHPIFGNIVDEVAYHEKYPTIYHLRKKLVDSTDKADLRLIYLALAHMIKFRGHFLIEGDLNPDNSDVDKLFIQLVQTYNQLFEENPINASGVDAKAILSARLSKSRRLENLIAQLPGEKKNGLFGNLIALSLGLTPNFKSNFDLAEDAKLQLSKDTYDDDLDNLLAQIGDQYADLFLAAKNLSDAILLSDILRVNTEITKAPLSASMIKRYDEHHQDLTLLKALVRQQLPEKYKEIFFDQSKNGYAGYIDGGASQEEFYKFIKPILEKMDGTEELLVKLNREDLLRKQRTFDNGSIPHQIHLGELHAILRRQEDFYPFLKDNREKIEKILTFRIPYYVGPLARGNSRFAWMTRKSEETITPWNFEEVVDKGASAQSFIERMTNFDKNLPNEKVLPKHSLLYEYFTVYNELTKVKYVTEGMRKPAFLSGEQKKAIVDLLFKTNRKVTVKQLKEDYFKKIECFDSVEISGVEDRFNASLGTYHDLLKIIKDKDFLDNEENEDILEDIVLTLTLFEDREMIEERLKTYAHLFDDKVMKQLKRRRYTGWGRLSRKLINGIRDKQSGKTILDFLKSDGFANRNFMQLIHDDSLTFKEDIQKAQVSGQGDSLHEHIANLAGSPAIKKGILQTVKVVDELVKVMGRHKPENIVIEMARENQTTQKGQKNSRERMKRIEEGIKELGSQILKEHPVENTQLQNEKLYLYYLQNGRDMYVDQELDINRLSDYDVDHIVPQSFLKDDSIDNKVLTRSDKARGKSDNVPSEEVVKKMKNYWRQLLNAKLITQRKFDNLTKAERGGLSELDKAGFIKRQLVETRQITKHVAQILDSRMNTKYDENDKLIREVKVITLKSKLVSDFRKDFQFYKVREINNYHHAHDAYLNAVVGTALIKKYPKLESEFVYGDYKVYDVRKMIAKSEQEIGKATAKYFFYSNIMNFFKTEITLANGEIRKRPLIETNGETGEIVWDKGRDFATVRKVLSMPQVNIVKKTEVQTGGFSKESILPKRNSDKLIARKKDWDPKKYGGFDSPTVAYSVLVVAKVEKGKSKKLKSVKELLGITIMERSSFEKNPIDFLEAKGYKEVKKDLIIKLPKYSLFELENGRKRMLASAGELQKGNELALPSKYVNFLYLASHYEKLKGSPEDNEQKQLFVEQHKHYLDEIIEQISEFSKRVILADANLDKVLSAYNKHRDKPIREQAENIIHLFTLTNLGAPAAFKYFDTTIDRKRYTSTKEVLDATLIHQSITGLYETRIDLSQLGGDGGPAPGGGGGSGGTLNIEDEYRLHETSKEPDVSLGSTWLSDFPQAWAETGGMGLAVRQAPLIIPLKATSTPVSIKQYPMSQEARLGIKPHIQRLLDQGILVPCQSPWNTPLLPVKKPGTNDYRPVQDLREVNKRVEDIHPTVPNPYNLLSGLPPSHQWYTVLDLKDAFFCLRLHPTSQPLFAFEWRDPEMGISGQLTWTRLPQGFKNSPTLFNEALHRDLADFRIQHPDLILLQYVDDLLLAATSELDCQQGTRALLQTLGNLGYRASAKKAQICQKQVKYLGYLLKEGQRWLTEARKETVMGQPTPKTPRQLREFLGKAGFCRLFIPGFAEMAAPLYPLTKPGTLFNWGPDQQKAYQEIKQALLTAPALGLPDLTKPFELFVDEKQGYAKGVLTQKLGPWRRPVAYLSKKLDPVAAGWPPCLRMVAAIAVLTKDAGKLTMGQPLVILAPHAVEALVKQPPDRWLSNARMTHYQALLLDTDRVQFGPVVALNPATLLPLPEEGLQHNCLDILAEAHGTRPDLTDQPLPDADHTWYTDGSSLLQEGQRKAGAAVTTETEVIWAKALPAGTSAQRAELIALTQALKMAEGKKLNVYTDSRYAFATAHIHGEIYRRRGWLTSEGKEIKNKDEILALLKALFLPKRLSIIHCPGHQKGHSAEARGNRMADQAARKAAITETPDTSTLLIENSSPSGGSKRTADGSEFEAGKRTADGSEFEKRTADGSEFESPKKKAKVE

SEQ ID NO: 2651 - protein, 2116 aa, synthetic construct
MPAAKRVKLDGGDKKYSIGLDIGTNSVGWAVITDEYKVPSKKFKVLGNTDRHSIKKNLIGALLFDSGETAEATRLKRTARRRYTRRKNRICYLQEIFSNEMAKVDDSFFHRLEESFLVEEDKKHERHPIFGNIVDEVAYHEKYPTIYHLRKKLVDSTDKADLRLIYLALAHMIKFRGHFLIEGDLNPDNSDVDKLFIQLVQTYNQLFEENPINASGVDAKAILSARLSKSRRLENLIAQLPGEKKNGLFGNLIALSLGLTPNFKSNFDLAEDAKLQLSKDTYDDDLDNLLAQIGDQYADLFLAAKNLSDAILLSDILRVNTEITKAPLSASMIKRYDEHHQDLTLLKALVRQQLPEKYKEIFFDQSKNGYAGYIDGGASQEEFYKFIKPILEKMDGTEELLVKLNREDLLRKQRTFDNGSIPHQIHLGELHAILRRQEDFYPFLKDNREKIEKILTFRIPYYVGPLARGNSRFAWMTRKSEETITPWNFEEVVDKGASAQSFIERMTNFDKNLPNEKVLPKHSLLYEYFTVYNELTKVKYVTEGMRKPAFLSGEQKKAIVDLLFKTNRKVTVKQLKEDYFKKIECFDSVEISGVEDRFNASLGTYHDLLKIIKDKDFLDNEENEDILEDIVLTLTLFEDREMIEERLKTYAHLFDDKVMKQLKRRRYTGWGRLSRKLINGIRDKQSGKTILDFLKSDGFANRNFMQLIHDDSLTFKEDIQKAQVSGQGDSLHEHIANLAGSPAIKKGILQTVKVVDELVKVMGRHKPENIVIEMARENQTTQKGQKNSRERMKRIEEGIKELGSQILKEHPVENTQLQNEKLYLYYLQNGRDMYVDQELDINRLSDYDVDHIVPQSFLKDDSIDNKVLTRSDKARGKSDNVPSEEVVKKMKNYWRQLLNAKLITQRKFDNLTKAERGGLSELDKAGFIKRQLVETRQITKHVAQILDSRMNTKYDENDKLIREVKVITLKSKLVSDFRKDFQFYKVREINNYHHAHDAYLNAVVGTALIKKYPKLESEFVYGDYKVYDVRKMIAKSEQEIGKATAKYFFYSNIMNFFKTEITLANGEIRKRPLIETNGETGEIVWDKGRDFATVRKVLSMPQVNIVKKTEVQTGGFSKESILPKRNSDKLIARKKDWDPKKYGGFDSPTVAYSVLVVAKVEKGKSKKLKSVKELLGITIMERSSFEKNPIDFLEAKGYKEVKKDLIIKLPKYSLFELENGRKRMLASAGELQKGNELALPSKYVNFLYLASHYEKLKGSPEDNEQKQLFVEQHKHYLDEIIEQISEFSKRVILADANLDKVLSAYNKHRDKPIREQAENIIHLFTLTNLGAPAAFKYFDTTIDRKRYTSTKEVLDATLIHQSITGLYETRIDLSQLGGDGGPAPGSSEAAAKGGTLNIEDEYRLHETSKEPDVSLGSTWLSDFPQAWAETGGMGLAVRQAPLIIPLKATSTPVSIKQYPMSQEARLGIKPHIQRLLDQGILVPCQSPWNTPLLPVKKPGTNDYRPVQDLREVNKRVEDIHPTVPNPYNLLSGLPPSHQWYTVLDLKDAFFCLRLHPTSQPLFAFEWRDPEMGISGQLTWTRLPQGFKNSPTLFNEALHRDLADFRIQHPDLILLQYVDDLLLAATSELDCQQGTRALLQTLGNLGYRASAKKAQICQKQVKYLGYLLKEGQRWLTEARKETVMGQPTPKTPRQLREFLGKAGFCRLFIPGFAEMAAPLYPLTKPGTLFNWGPDQQKAYQEIKQALLTAPALGLPDLTKPFELFVDEKQGYAKGVLTQKLGPWRRPVAYLSKKLDPVAAGWPPCLRMVAAIAVLTKDAGKLTMGQPLVILAPHAVEALVKQPPDRWLSNARMTHYQALLLDTDRVQFGPVVALNPATLLPLPEEGLQHNCLDILAEAHGTRPDLTDQPLPDADHTWYTDGSSLLQEGQRKAGAAVTTETEVIWAKALPAGTSAQRAELIALTQALKMAEGKKLNVYTDSRYAFATAHIHGEIYRRRGWLTSEGKEIKNKDEILALLKALFLPKRLSIIHCPGHQKGHSAEARGNRMADQAARKAAITETPDTSTLLIENSSPSGGSKRTADGSEFEAGKRTADGSEFEKRTADGSEFESPKKKAKVE

SEQ ID NO: 2652 - protein, 2116 aa, synthetic construct
MPAAKRVKLDGGDKKYSIGLDIGTNSVGWAVITDEYKVPSKKFKVLGNTDRHSIKKNLIGALLFDSGETAEATRLKRTARRRYTRRKNRICYLQEIFSNEMAKVDDSFFHRLEESFLVEEDKKHERHPIFGNIVDEVAYHEKYPTIYHLRKKLVDSTDKADLRLIYLALAHMIKFRGHFLIEGDLNPDNSDVDKLFIQLVQTYNQLFEENPINASGVDAKAILSARLSKSRRLENLIAQLPGEKKNGLFGNLIALSLGLTPNFKSNFDLAEDAKLQLSKDTYDDDLDNLLAQIGDQYADLFLAAKNLSDAILLSDILRVNTEITKAPLSASMIKRYDEHHQDLTLLKALVRQQLPEKYKEIFFDQSKNGYAGYIDGGASQEEFYKFIKPILEKMDGTEELLVKLNREDLLRKQRTFDNGSIPHQIHLGELHAILRRQEDFYPFLKDNREKIEKILTFRIPYYVGPLARGNSRFAWMTRKSEETITPWNFEEVVDKGASAQSFIERMTNFDKNLPNEKVLPKHSLLYEYFTVYNELTKVKYVTEGMRKPAFLSGEQKKAIVDLLFKTNRKVTVKQLKEDYFKKIECFDSVEISGVEDRFNASLGTYHDLLKIIKDKDFLDNEENEDILEDIVLTLTLFEDREMIEERLKTYAHLFDDKVMKQLKRRRYTGWGRLSRKLINGIRDKQSGKTILDFLKSDGFANRNFMQLIHDDSLTFKEDIQKAQVSGQGDSLHEHIANLAGSPAIKKGILQTVKVVDELVKVMGRHKPENIVIEMARENQTTQKGQKNSRERMKRIEEGIKELGSQILKEHPVENTQLQNEKLYLYYLQNGRDMYVDQELDINRLSDYDVDHIVPQSFLKDDSIDNKVLTRSDKARGKSDNVPSEEVVKKMKNYWRQLLNAKLITQRKFDNLTKAERGGLSELDKAGFIKRQLVETRQITKHVAQILDSRMNTKYDENDKLIREVKVITLKSKLVSDFRKDFQFYKVREINNYHHAHDAYLNAVVGTALIKKYPKLESEFVYGDYKVYDVRKMIAKSEQEIGKATAKYFFYSNIMNFFKTEITLANGEIRKRPLIETNGETGEIVWDKGRDFATVRKVLSMPQVNIVKKTEVQTGGFSKESILPKRNSDKLIARKKDWDPKKYGGFDSPTVAYSVLVVAKVEKGKSKKLKSVKELLGITIMERSSFEKNPIDFLEAKGYKEVKKDLIIKLPKYSLFELENGRKRMLASAGELQKGNELALPSKYVNFLYLASHYEKLKGSPEDNEQKQLFVEQHKHYLDEIIEQISEFSKRVILADANLDKVLSAYNKHRDKPIREQAENIIHLFTLTNLGAPAAFKYFDTTIDRKRYTSTKEVLDATLIHQSITGLYETRIDLSQLGGDGGGSSGGGEAAAKGGTLNIEDEYRLHETSKEPDVSLGSTWLSDFPQAWAETGGMGLAVRQAPLIIPLKATSTPVSIKQYPMSQEARLGIKPHIQRLLDQGILVPCQSPWNTPLLPVKKPGTNDYRPVQDLREVNKRVEDIHPTVPNPYNLLSGLPPSHQWYTVLDLKDAFFCLRLHPTSQPLFAFEWRDPEMGISGQLTWTRLPQGFKNSPTLFNEALHRDLADFRIQHPDLILLQYVDDLLLAATSELDCQQGTRALLQTLGNLGYRASAKKAQICQKQVKYLGYLLKEGQRWLTEARKETVMGQPTPKTPRQLREFLGKAGFCRLFIPGFAEMAAPLYPLTKPGTLFNWGPDQQKAYQEIKQALLTAPALGLPDLTKPFELFVDEKQGYAKGVLTQKLGPWRRPVAYLSKKLDPVAAGWPPCLRMVAAIAVLTKDAGKLTMGQPLVILAPHAVEALVKQPPDRWLSNARMTHYQALLLDTDRVQFGPVVALNPATLLPLPEEGLQHNCLDILAEAHGTRPDLTDQPLPDADHTWYTDGSSLLQEGQRKAGAAVTTETEVIWAKALPAGTSAQRAELIALTQALKMAEGKKLNVYTDSRYAFATAHIHGEIYRRRGWLTSEGKEIKNKDEILALLKALFLPKRLSIIHCPGHQKGHSAEARGNRMADQAARKAAITETPDTSTLLIENSSPSGGSKRTADGSEFEAGKRTADGSEFEKRTADGSEFESPKKKAKVE

SEQ ID NO: 2653 - protein, 2111 aa, synthetic construct
MPAAKRVKLDGGDKKYSIGLDIGTNSVGWAVITDEYKVPSKKFKVLGNTDRHSIKKNLIGALLFDSGETAEATRLKRTARRRYTRRKNRICYLQEIFSNEMAKVDDSFFHRLEESFLVEEDKKHERHPIFGNIVDEVAYHEKYPTIYHLRKKLVDSTDKADLRLIYLALAHMIKFRGHFLIEGDLNPDNSDVDKLFIQLVQTYNQLFEENPINASGVDAKAILSARLSKSRRLENLIAQLPGEKKNGLFGNLIALSLGLTPNFKSNFDLAEDAKLQLSKDTYDDDLDNLLAQIGDQYADLFLAAKNLSDAILLSDILRVNTEITKAPLSASMIKRYDEHHQDLTLLKALVRQQLPEKYKEIFFDQSKNGYAGYIDGGASQEEFYKFIKPILEKMDGTEELLVKLNREDLLRKQRTFDNGSIPHQIHLGELHAILRRQEDFYPFLKDNREKIEKILTFRIPYYVGPLARGNSRFAWMTRKSEETITPWNFEEVVDKGASAQSFIERMTNFDKNLPNEKVLPKHSLLYEYFTVYNELTKVKYVTEGMRKPAFLSGEQKKAIVDLLFKTNRKVTVKQLKEDYFKKIECFDSVEISGVEDRFNASLGTYHDLLKIIKDKDFLDNEENEDILEDIVLTLTLFEDREMIEERLKTYAHLFDDKVMKQLKRRRYTGWGRLSRKLINGIRDKQSGKTILDFLKSDGFANRNFMQLIHDDSLTFKEDIQKAQVSGQGDSLHEHIANLAGSPAIKKGILQTVKVVDELVKVMGRHKPENIVIEMARENQTTQKGQKNSRERMKRIEEGIKELGSQILKEHPVENTQLQNEKLYLYYLQNGRDMYVDQELDINRLSDYDVDHIVPQSFLKDDSIDNKVLTRSDKARGKSDNVPSEEVVKKMKNYWRQLLNAKLITQRKFDNLTKAERGGLSELDKAGFIKRQLVETRQITKHVAQILDSRMNTKYDENDKLIREVKVITLKSKLVSDFRKDFQFYKVREINNYHHAHDAYLNAVVGTALIKKYPKLESEFVYGDYKVYDVRKMIAKSEQEIGKATAKYFFYSNIMNFFKTEITLANGEIRKRPLIETNGETGEIVWDKGRDFATVRKVLSMPQVNIVKKTEVQTGGFSKESILPKRNSDKLIARKKDWDPKKYGGFDSPTVAYSVLVVAKVEKGKSKKLKSVKELLGITIMERSSFEKNPIDFLEAKGYKEVKKDLIIKLPKYSLFELENGRKRMLASAGELQKGNELALPSKYVNFLYLASHYEKLKGSPEDNEQKQLFVEQHKHYLDEIIEQISEFSKRVILADANLDKVLSAYNKHRDKPIREQAENIIHLFTLTNLGAPAAFKYFDTTIDRKRYTSTKEVLDATLIHQSITGLYETRIDLSQLGGDGGGGSGGGGGTLNIEDEYRLHETSKEPDVSLGSTWLSDFPQAWAETGGMGLAVRQAPLIIPLKATSTPVSIKQYPMSQEARLGIKPHIQRLLDQGILVPCQSPWNTPLLPVKKPGTNDYRPVQDLREVNKRVEDIHPTVPNPYNLLSGLPPSHQWYTVLDLKDAFFCLRLHPTSQPLFAFEWRDPEMGISGQLTWTRLPQGFKNSPTLFNEALHRDLADFRIQHPDLILLQYVDDLLLAATSELDCQQGTRALLQTLGNLGYRASAKKAQICQKQVKYLGYLLKEGQRWLTEARKETVMGQPTPKTPRQLREFLGKAGFCRLFIPGFAEMAAPLYPLTKPGTLFNWGPDQQKAYQEIKQALLTAPALGLPDLTKPFELFVDEKQGYAKGVLTQKLGPWRRPVAYLSKKLDPVAAGWPPCLRMVAAIAVLTKDAGKLTMGQPLVILAPHAVEALVKQPPDRWLSNARMTHYQALLLDTDRVQFGPVVALNPATLLPLPEEGLQHNCLDILAEAHGTRPDLTDQPLPDADHTWYTDGSSLLQEGQRKAGAAVTTETEVIWAKALPAGTSAQRAELIALTQALKMAEGKKLNVYTDSRYAFATAHIHGEIYRRRGWLTSEGKEIKNKDEILALLKALFLPKRLSIIHCPGHQKGHSAEARGNRMADQAARKAAITETPDTSTLLIENSSPSGGSKRTADGSEFEAGKRTADGSEFEKRTADGSEFESPKKKAKVE

SEQ ID NO: 2654 - protein, 2116 aa, synthetic construct
MPAAKRVKLDGGDKKYSIGLDIGTNSVGWAVITDEYKVPSKKFKVLGNTDRHSIKKNLIGALLFDSGETAEATRLKRTARRRYTRRKNRICYLQEIFSNEMAKVDDSFFHRLEESFLVEEDKKHERHPIFGNIVDEVAYHEKYPTIYHLRKKLVDSTDKADLRLIYLALAHMIKFRGHFLIEGDLNPDNSDVDKLFIQLVQTYNQLFEENPINASGVDAKAILSARLSKSRRLENLIAQLPGEKKNGLFGNLIALSLGLTPNFKSNFDLAEDAKLQLSKDTYDDDLDNLLAQIGDQYADLFLAAKNLSDAILLSDILRVNTEITKAPLSASMIKRYDEHHQDLTLLKALVRQQLPEKYKEIFFDQSKNGYAGYIDGGASQEEFYKFIKPILEKMDGTEELLVKLNREDLLRKQRTFDNGSIPHQIHLGELHAILRRQEDFYPFLKDNREKIEKILTFRIPYYVGPLARGNSRFAWMTRKSEETITPWNFEEVVDKGASAQSFIERMTNFDKNLPNEKVLPKHSLLYEYFTVYNELTKVKYVTEGMRKPAFLSGEQKKAIVDLLFKTNRKVTVKQLKEDYFKKIECFDSVEISGVEDRFNASLGTYHDLLKIIKDKDFLDNEENEDILEDIVLTLTLFEDREMIEERLKTYAHLFDDKVMKQLKRRRYTGWGRLSRKLINGIRDKQSGKTILDFLKSDGFANRNFMQLIHDDSLTFKEDIQKAQVSGQGDSLHEHIANLAGSPAIKKGILQTVKVVDELVKVMGRHKPENIVIEMARENQTTQKGQKNSRERMKRIEEGIKELGSQILKEHPVENTQLQNEKLYLYYLQNGRDMYVDQELDINRLSDYDVDHIVPQSFLKDDSIDNKVLTRSDKARGKSDNVPSEEVVKKMKNYWRQLLNAKLITQRKFDNLTKAERGGLSELDKAGFIKRQLVETRQITKHVAQILDSRMNTKYDENDKLIREVKVITLKSKLVSDFRKDFQFYKVREINNYHHAHDAYLNAVVGTALIKKYPKLESEFVYGDYKVYDVRKMIAKSEQEIGKATAKYFFYSNIMNFFKTEITLANGEIRKRPLIETNGETGEIVWDKGRDFATVRKVLSMPQVNIVKKTEVQTGGFSKESILPKRNSDKLIARKKDWDPKKYGGFDSPTVAYSVLVVAKVEKGKSKKLKSVKELLGITIMERSSFEKNPIDFLEAKGYKEVKKDLIIKLPKYSLFELENGRKRMLASAGELQKGNELALPSKYVNFLYLASHYEKLKGSPEDNEQKQLFVEQHKHYLDEIIEQISEFSKRVILADANLDKVLSAYNKHRDKPIREQAENIIHLFTLTNLGAPAAFKYFDTTIDRKRYTSTKEVLDATLIHQSITGLYETRIDLSQLGGDGGEAAAKGGSPAPGGTLNIEDEYRLHETSKEPDVSLGSTWLSDFPQAWAETGGMGLAVRQAPLIIPLKATSTPVSIKQYPMSQEARLGIKPHIQRLLDQGILVPCQSPWNTPLLPVKKPGTNDYRPVQDLREVNKRVEDIHPTVPNPYNLLSGLPPSHQWYTVLDLKDAFFCLRLHPTSQPLFAFEWRDPEMGISGQLTWTRLPQGFKNSPTLFNEALHRDLADFRIQHPDLILLQYVDDLLLAATSELDCQQGTRALLQTLGNLGYRASAKKAQICQKQVKYLGYLLKEGQRWLTEARKETVMGQPTPKTPRQLREFLGKAGFCRLFIPGFAEMAAPLYPLTKPGTLFNWGPDQQKAYQEIKQALLTAPALGLPDLTKPFELFVDEKQGYAKGVLTQKLGPWRRPVAYLSKKLDPVAAGWPPCLRMVAAIAVLTKDAGKLTMGQPLVILAPHAVEALVKQPPDRWLSNARMTHYQALLLDTDRVQFGPVVALNPATLLPLPEEGLQHNCLDILAEAHGTRPDLTDQPLPDADHTWYTDGSSLLQEGQRKAGAAVTTETEVIWAKALPAGTSAQRAELIALTQALKMAEGKKLNVYTDSRYAFATAHIHGEIYRRRGWLTSEGKEIKNKDEILALLKALFLPKRLSIIHCPGHQKGHSAEARGNRMADQAARKAAITETPDTSTLLIENSSPSGGSKRTADGSEFEAGKRTADGSEFEKRTADGSEFESPKKKAKVE

SEQ ID NO: 2655 - protein, 2108 aa, synthetic construct
MPAAKRVKLDGGDKKYSIGLDIGTNSVGWAVITDEYKVPSKKFKVLGNTDRHSIKKNLIGALLFDSGETAEATRLKRTARRRYTRRKNRICYLQEIFSNEMAKVDDSFFHRLEESFLVEEDKKHERHPIFGNIVDEVAYHEKYPTIYHLRKKLVDSTDKADLRLIYLALAHMIKFRGHFLIEGDLNPDNSDVDKLFIQLVQTYNQLFEENPINASGVDAKAILSARLSKSRRLENLIAQLPGEKKNGLFGNLIALSLGLTPNFKSNFDLAEDAKLQLSKDTYDDDLDNLLAQIGDQYADLFLAAKNLSDAILLSDILRVNTEITKAPLSASMIKRYDEHHQDLTLLKALVRQQLPEKYKEIFFDQSKNGYAGYIDGGASQEEFYKFIKPILEKMDGTEELLVKLNREDLLRKQRTFDNGSIPHQIHLGELHAILRRQEDFYPFLKDNREKIEKILTFRIPYYVGPLARGNSRFAWMTRKSEETITPWNFEEVVDKGASAQSFIERMTNFDKNLPNEKVLPKHSLLYEYFTVYNELTKVKYVTEGMRKPAFLSGEQKKAIVDLLFKTNRKVTVKQLKEDYFKKIECFDSVEISGVEDRFNASLGTYHDLLKIIKDKDFLDNEENEDILEDIVLTLTLFEDREMIEERLKTYAHLFDDKVMKQLKRRRYTGWGRLSRKLINGIRDKQSGKTILDFLKSDGFANRNFMQLIHDDSLTFKEDIQKAQVSGQGDSLHEHIANLAGSPAIKKGILQTVKVVDELVKVMGRHKPENIVIEMARENQTTQKGQKNSRERMKRIEEGIKELGSQILKEHPVENTQLQNEKLYLYYLQNGRDMYVDQELDINRLSDYDVDHIVPQSFLKDDSIDNKVLTRSDKARGKSDNVPSEEVVKKMKNYWRQLLNAKLITQRKFDNLTKAERGGLSELDKAGFIKRQLVETRQITKHVAQILDSRMNTKYDENDKLIREVKVITLKSKLVSDFRKDFQFYKVREINNYHHAHDAYLNAVVGTALIKKYPKLESEFVYGDYKVYDVRKMIAKSEQEIGKATAKYFFYSNIMNFFKTEITLANGEIRKRPLIETNGETGEIVWDKGRDFATVRKVLSMPQVNIVKKTEVQTGGFSKESILPKRNSDKLIARKKDWDPKKYGGFDSPTVAYSVLVVAKVEKGKSKKLKSVKELLGITIMERSSFEKNPIDFLEAKGYKEVKKDLIIKLPKYSLFELENGRKRMLASAGELQKGNELALPSKYVNFLYLASHYEKLKGSPEDNEQKQLFVEQHKHYLDEIIEQISEFSKRVILADANLDKVLSAYNKHRDKPIREQAENIIHLFTLTNLGAPAAFKYFDTTIDRKRYTSTKEVLDATLIHQSITGLYETRIDLSQLGGDGGGSSGGTLNIEDEYRLHETSKEPDVSLGSTWLSDFPQAWAETGGMGLAVRQAPLIIPLKATSTPVSIKQYPMSQEARLGIKPHIQRLLDQGILVPCQSPWNTPLLPVKKPGTNDYRPVQDLREVNKRVEDIHPTVPNPYNLLSGLPPSHQWYTVLDLKDAFFCLRLHPTSQPLFAFEWRDPEMGISGQLTWTRLPQGFKNSPTLFNEALHRDLADFRIQHPDLILLQYVDDLLLAATSELDCQQGTRALLQTLGNLGYRASAKKAQICQKQVKYLGYLLKEGQRWLTEARKETVMGQPTPKTPRQLREFLGKAGFCRLFIPGFAEMAAPLYPLTKPGTLFNWGPDQQKAYQEIKQALLTAPALGLPDLTKPFELFVDEKQGYAKGVLTQKLGPWRRPVAYLSKKLDPVAAGWPPCLRMVAAIAVLTKDAGKLTMGQPLVILAPHAVEALVKQPPDRWLSNARMTHYQALLLDTDRVQFGPVVALNPATLLPLPEEGLQHNCLDILAEAHGTRPDLTDQPLPDADHTWYTDGSSLLQEGQRKAGAAVTTETEVIWAKALPAGTSAQRAELIALTQALKMAEGKKLNVYTDSRYAFATAHIHGEIYRRRGWLTSEGKEIKNKDEILALLKALFLPKRLSIIHCPGHQKGHSAEARGNRMADQAARKAAITETPDTSTLLIENSSPSGGSKRTADGSEFEAGKRTADGSEFEKRTADGSEFESPKKKAKVE

SEQ ID NO: 2656 - protein, 2114 aa, synthetic construct
MPAAKRVKLDGGDKKYSIGLDIGTNSVGWAVITDEYKVPSKKFKVLGNTDRHSIKKNLIGALLFDSGETAEATRLKRTARRRYTRRKNRICYLQEIFSNEMAKVDDSFFHRLEESFLVEEDKKHERHPIFGNIVDEVAYHEKYPTIYHLRKKLVDSTDKADLRLIYLALAHMIKFRGHFLIEGDLNPDNSDVDKLFIQLVQTYNQLFEENPINASGVDAKAILSARLSKSRRLENLIAQLPGEKKNGLFGNLIALSLGLTPNFKSNFDLAEDAKLQLSKDTYDDDLDNLLAQIGDQYADLFLAAKNLSDAILLSDILRVNTEITKAPLSASMIKRYDEHHQDLTLLKALVRQQLPEKYKEIFFDQSKNGYAGYIDGGASQEEFYKFIKPILEKMDGTEELLVKLNREDLLRKQRTFDNGSIPHQIHLGELHAILRRQEDFYPFLKDNREKIEKILTFRIPYYVGPLARGNSRFAWMTRKSEETITPWNFEEVVDKGASAQSFIERMTNFDKNLPNEKVLPKHSLLYEYFTVYNELTKVKYVTEGMRKPAFLSGEQKKAIVDLLFKTNRKVTVKQLKEDYFKKIECFDSVEISGVEDRFNASLGTYHDLLKIIKDKDFLDNEENEDILEDIVLTLTLFEDREMIEERLKTYAHLFDDKVMKQLKRRRYTGWGRLSRKLINGIRDKQSGKTILDFLKSDGFANRNFMQLIHDDSLTFKEDIQKAQVSGQGDSLHEHIANLAGSPAIKKGILQTVKVVDELVKVMGRHKPENIVIEMARENQTTQKGQKNSRERMKRIEEGIKELGSQILKEHPVENTQLQNEKLYLYYLQNGRDMYVDQELDINRLSDYDVDHIVPQSFLKDDSIDNKVLTRSDKARGKSDNVPSEEVVKKMKNYWRQLLNAKLITQRKFDNLTKAERGGLSELDKAGFIKRQLVETRQITKHVAQILDSRMNTKYDENDKLIREVKVITLKSKLVSDFRKDFQFYKVREINNYHHAHDAYLNAVVGTALIKKYPKLESEFVYGDYKVYDVRKMIAKSEQEIGKATAKYFFYSNIMNFFKTEITLANGEIRKRPLIETNGETGEIVWDKGRDFATVRKVLSMPQVNIVKKTEVQTGGFSKESILPKRNSDKLIARKKDWDPKKYGGFDSPTVAYSVLVVAKVEKGKSKKLKSVKELLGITIMERSSFEKNPIDFLEAKGYKEVKKDLIIKLPKYSLFELENGRKRMLASAGELQKGNELALPSKYVNFLYLASHYEKLKGSPEDNEQKQLFVEQHKHYLDEIIEQISEFSKRVILADANLDKVLSAYNKHRDKPIREQAENIIHLFTLTNLGAPAAFKYFDTTIDRKRYTSTKEVLDATLIHQSITGLYETRIDLSQLGGDGGPAPAPAPAPGGTLNIEDEYRLHETSKEPDVSLGSTWLSDFPQAWAETGGMGLAVRQAPLIIPLKATSTPVSIKQYPMSQEARLGIKPHIQRLLDQGILVPCQSPWNTPLLPVKKPGTNDYRPVQDLREVNKRVEDIHPTVPNPYNLLSGLPPSHQWYTVLDLKDAFFCLRLHPTSQPLFAFEWRDPEMGISGQLTWTRLPQGFKNSPTLFNEALHRDLADFRIQHPDLILLQYVDDLLLAATSELDCQQGTRALLQTLGNLGYRASAKKAQICQKQVKYLGYLLKEGQRWLTEARKETVMGQPTPKTPRQLREFLGKAGFCRLFIPGFAEMAAPLYPLTKPGTLFNWGPDQQKAYQEIKQALLTAPALGLPDLTKPFELFVDEKQGYAKGVLTQKLGPWRRPVAYLSKKLDPVAAGWPPCLRMVAAIAVLTKDAGKLTMGQPLVILAPHAVEALVKQPPDRWLSNARMTHYQALLLDTDRVQFGPVVALNPATLLPLPEEGLQHNCLDILAEAHGTRPDLTDQPLPDADHTWYTDGSSLLQEGQRKAGAAVTTETEVIWAKALPAGTSAQRAELIALTQALKMAEGKKLNVYTDSRYAFATAHIHGEIYRRRGWLTSEGKEIKNKDEILALLKALFLPKRLSIIHCPGHQKGHSAEARGNRMADQAARKAAITETPDTSTLLIENSSPSGGSKRTADGSEFEAGKRTADGSEFEKRTADGSEFESPKKKAKVE

SEQ ID NO: 2657 - protein, 2113 aa, synthetic construct
MPAAKRVKLDGGDKKYSIGLDIGTNSVGWAVITDEYKVPSKKFKVLGNTDRHSIKKNLIGALLFDSGETAEATRLKRTARRRYTRRKNRICYLQEIFSNEMAKVDDSFFHRLEESFLVEEDKKHERHPIFGNIVDEVAYHEKYPTIYHLRKKLVDSTDKADLRLIYLALAHMIKFRGHFLIEGDLNPDNSDVDKLFIQLVQTYNQLFEENPINASGVDAKAILSARLSKSRRLENLIAQLPGEKKNGLFGNLIALSLGLTPNFKSNFDLAEDAKLQLSKDTYDDDLDNLLAQIGDQYADLFLAAKNLSDAILLSDILRVNTEITKAPLSASMIKRYDEHHQDLTLLKALVRQQLPEKYKEIFFDQSKNGYAGYIDGGASQEEFYKFIKPILEKMDGTEELLVKLNREDLLRKQRTFDNGSIPHQIHLGELHAILRRQEDFYPFLKDNREKIEKILTFRIPYYVGPLARGNSRFAWMTRKSEETITPWNFEEVVDKGASAQSFIERMTNFDKNLPNEKVLPKHSLLYEYFTVYNELTKVKYVTEGMRKPAFLSGEQKKAIVDLLFKTNRKVTVKQLKEDYFKKIECFDSVEISGVEDRFNASLGTYHDLLKIIKDKDFLDNEENEDILEDIVLTLTLFEDREMIEERLKTYAHLFDDKVMKQLKRRRYTGWGRLSRKLINGIRDKQSGKTILDFLKSDGFANRNFMQLIHDDSLTFKEDIQKAQVSGQGDSLHEHIANLAGSPAIKKGILQTVKVVDELVKVMGRHKPENIVIEMARENQTTQKGQKNSRERMKRIEEGIKELGSQILKEHPVENTQLQNEKLYLYYLQNGRDMYVDQELDINRLSDYDVDHIVPQSFLKDDSIDNKVLTRSDKARGKSDNVPSEEVVKKMKNYWRQLLNAKLITQRKFDNLTKAERGGLSELDKAGFIKRQLVETRQITKHVAQILDSRMNTKYDENDKLIREVKVITLKSKLVSDFRKDFQFYKVREINNYHHAHDAYLNAVVGTALIKKYPKLESEFVYGDYKVYDVRKMIAKSEQEIGKATAKYFFYSNIMNFFKTEITLANGEIRKRPLIETNGETGEIVWDKGRDFATVRKVLSMPQVNIVKKTEVQTGGFSKESILPKRNSDKLIARKKDWDPKKYGGFDSPTVAYSVLVVAKVEKGKSKKLKSVKELLGITIMERSSFEKNPIDFLEAKGYKEVKKDLIIKLPKYSLFELENGRKRMLASAGELQKGNELALPSKYVNFLYLASHYEKLKGSPEDNEQKQLFVEQHKHYLDEIIEQISEFSKRVILADANLDKVLSAYNKHRDKPIREQAENIIHLFTLTNLGAPAAFKYFDTTIDRKRYTSTKEVLDATLIHQSITGLYETRIDLSQLGGDGGEAAAKGGSGGTLNIEDEYRLHETSKEPDVSLGSTWLSDFPQAWAETGGMGLAVRQAPLIIPLKATSTPVSIKQYPMSQEARLGIKPHIQRLLDQGILVPCQSPWNTPLLPVKKPGTNDYRPVQDLREVNKRVEDIHPTVPNPYNLLSGLPPSHQWYTVLDLKDAFFCLRLHPTSQPLFAFEWRDPEMGISGQLTWTRLPQGFKNSPTLFNEALHRDLADFRIQHPDLILLQYVDDLLLAATSELDCQQGTRALLQTLGNLGYRASAKKAQICQKQVKYLGYLLKEGQRWLTEARKETVMGQPTPKTPRQLREFLGKAGFCRLFIPGFAEMAAPLYPLTKPGTLFNWGPDQQKAYQEIKQALLTAPALGLPDLTKPFELFVDEKQGYAKGVLTQKLGPWRRPVAYLSKKLDPVAAGWPPCLRMVAAIAVLTKDAGKLTMGQPLVILAPHAVEALVKQPPDRWLSNARMTHYQALLLDTDRVQFGPVVALNPATLLPLPEEGLQHNCLDILAEAHGTRPDLTDQPLPDADHTWYTDGSSLLQEGQRKAGAAVTTETEVIWAKALPAGTSAQRAELIALTQALKMAEGKKLNVYTDSRYAFATAHIHGEIYRRRGWLTSEGKEIKNKDEILALLKALFLPKRLSIIHCPGHQKGHSAEARGNRMADQAARKAAITETPDTSTLLIENSSPSGGSKRTADGSEFEAGKRTADGSEFEKRTADGSEFESPKKKAKVE

SEQ ID NO: 2658 - protein, 2116 aa, synthetic construct
MPAAKRVKLDGGDKKYSIGLDIGTNSVGWAVITDEYKVPSKKFKVLGNTDRHSIKKNLIGALLFDSGETAEATRLKRTARRRYTRRKNRICYLQEIFSNEMAKVDDSFFHRLEESFLVEEDKKHERHPIFGNIVDEVAYHEKYPTIYHLRKKLVDSTDKADLRLIYLALAHMIKFRGHFLIEGDLNPDNSDVDKLFIQLVQTYNQLFEENPINASGVDAKAILSARLSKSRRLENLIAQLPGEKKNGLFGNLIALSLGLTPNFKSNFDLAEDAKLQLSKDTYDDDLDNLLAQIGDQYADLFLAAKNLSDAILLSDILRVNTEITKAPLSASMIKRYDEHHQDLTLLKALVRQQLPEKYKEIFFDQSKNGYAGYIDGGASQEEFYKFIKPILEKMDGTEELLVKLNREDLLRKQRTFDNGSIPHQIHLGELHAILRRQEDFYPFLKDNREKIEKILTFRIPYYVGPLARGNSRFAWMTRKSEETITPWNFEEVVDKGASAQSFIERMTNFDKNLPNEKVLPKHSLLYEYFTVYNELTKVKYVTEGMRKPAFLSGEQKKAIVDLLFKTNRKVTVKQLKEDYFKKIECFDSVEISGVEDRFNASLGTYHDLLKIIKDKDFLDNEENEDILEDIVLTLTLFEDREMIEERLKTYAHLFDDKVMKQLKRRRYTGWGRLSRKLINGIRDKQSGKTILDFLKSDGFANRNFMQLIHDDSLTFKEDIQKAQVSGQGDSLHEHIANLAGSPAIKKGILQTVKVVDELVKVMGRHKPENIVIEMARENQTTQKGQKNSRERMKRIEEGIKELGSQILKEHPVENTQLQNEKLYLYYLQNGRDMYVDQELDINRLSDYDVDHIVPQSFLKDDSIDNKVLTRSDKARGKSDNVPSEEVVKKMKNYWRQLLNAKLITQRKFDNLTKAERGGLSELDKAGFIKRQLVETRQITKHVAQILDSRMNTKYDENDKLIREVKVITLKSKLVSDFRKDFQFYKVREINNYHHAHDAYLNAVVGTALIKKYPKLESEFVYGDYKVYDVRKMIAKSEQEIGKATAKYFFYSNIMNFFKTEITLANGEIRKRPLIETNGETGEIVWDKGRDFATVRKVLSMPQVNIVKKTEVQTGGFSKESILPKRNSDKLIARKKDWDPKKYGGFDSPTVAYSVLVVAKVEKGKSKKLKSVKELLGITIMERSSFEKNPIDFLEAKGYKEVKKDLIIKLPKYSLFELENGRKRMLASAGELQKGNELALPSKYVNFLYLASHYEKLKGSPEDNEQKQLFVEQHKHYLDEIIEQISEFSKRVILADANLDKVLSAYNKHRDKPIREQAENIIHLFTLTNLGAPAAFKYFDTTIDRKRYTSTKEVLDATLIHQSITGLYETRIDLSQLGGDGGEAAAKGSSPAPGGTLNIEDEYRLHETSKEPDVSLGSTWLSDFPQAWAETGGMGLAVRQAPLIIPLKATSTPVSIKQYPMSQEARLGIKPHIQRLLDQGILVPCQSPWNTPLLPVKKPGTNDYRPVQDLREVNKRVEDIHPTVPNPYNLLSGLPPSHQWYTVLDLKDAFFCLRLHPTSQPLFAFEWRDPEMGISGQLTWTRLPQGFKNSPTLFNEALHRDLADFRIQHPDLILLQYVDDLLLAATSELDCQQGTRALLQTLGNLGYRASAKKAQICQKQVKYLGYLLKEGQRWLTEARKETVMGQPTPKTPRQLREFLGKAGFCRLFIPGFAEMAAPLYPLTKPGTLFNWGPDQQKAYQEIKQALLTAPALGLPDLTKPFELFVDEKQGYAKGVLTQKLGPWRRPVAYLSKKLDPVAAGWPPCLRMVAAIAVLTKDAGKLTMGQPLVILAPHAVEALVKQPPDRWLSNARMTHYQALLLDTDRVQFGPVVALNPATLLPLPEEGLQHNCLDILAEAHGTRPDLTDQPLPDADHTWYTDGSSLLQEGQRKAGAAVTTETEVIWAKALPAGTSAQRAELIALTQALKMAEGKKLNVYTDSRYAFATAHIHGEIYRRRGWLTSEGKEIKNKDEILALLKALFLPKRLSIIHCPGHQKGHSAEARGNRMADQAARKAAITETPDTSTLLIENSSPSGGSKRTADGSEFEAGKRTADGSEFEKRTADGSEFESPKKKAKVE

SEQ ID NO: 2659 - protein, 2113 aa, synthetic construct
MPAAKRVKLDGGDKKYSIGLDIGTNSVGWAVITDEYKVPSKKFKVLGNTDRHSIKKNLIGALLFDSGETAEATRLKRTARRRYTRRKNRICYLQEIFSNEMAKVDDSFFHRLEESFLVEEDKKHERHPIFGNIVDEVAYHEKYPTIYHLRKKLVDSTDKADLRLIYLALAHMIKFRGHFLIEGDLNPDNSDVDKLFIQLVQTYNQLFEENPINASGVDAKAILSARLSKSRRLENLIAQLPGEKKNGLFGNLIALSLGLTPNFKSNFDLAEDAKLQLSKDTYDDDLDNLLAQIGDQYADLFLAAKNLSDAILLSDILRVNTEITKAPLSASMIKRYDEHHQDLTLLKALVRQQLPEKYKEIFFDQSKNGYAGYIDGGASQEEFYKFIKPILEKMDGTEELLVKLNREDLLRKQRTFDNGSIPHQIHLGELHAILRRQEDFYPFLKDNREKIEKILTFRIPYYVGPLARGNSRFAWMTRKSEETITPWNFEEVVDKGASAQSFIERMTNFDKNLPNEKVLPKHSLLYEYFTVYNELTKVKYVTEGMRKPAFLSGEQKKAIVDLLFKTNRKVTVKQLKEDYFKKIECFDSVEISGVEDRFNASLGTYHDLLKIIKDKDFLDNEENEDILEDIVLTLTLFEDREMIEERLKTYAHLFDDKVMKQLKRRRYTGWGRLSRKLINGIRDKQSGKTILDFLKSDGFANRNFMQLIHDDSLTFKEDIQKAQVSGQGDSLHEHIANLAGSPAIKKGILQTVKVVDELVKVMGRHKPENIVIEMARENQTTQKGQKNSRERMKRIEEGIKELGSQILKEHPVENTQLQNEKLYLYYLQNGRDMYVDQELDINRLSDYDVDHIVPQSFLKDDSIDNKVLTRSDKARGKSDNVPSEEVVKKMKNYWRQLLNAKLITQRKFDNLTKAERGGLSELDKAGFIKRQLVETRQITKHVAQILDSRMNTKYDENDKLIREVKVITLKSKLVSDFRKDFQFYKVREINNYHHAHDAYLNAVVGTALIKKYPKLESEFVYGDYKVYDVRKMIAKSEQEIGKATAKYFFYSNIMNFFKTEITLANGEIRKRPLIETNGETGEIVWDKGRDFATVRKVLSMPQVNIVKKTEVQTGGFSKESILPKRNSDKLIARKKDWDPKKYGGFDSPTVAYSVLVVAKVEKGKSKKLKSVKELLGITIMERSSFEKNPIDFLEAKGYKEVKKDLIIKLPKYSLFELENGRKRMLASAGELQKGNELALPSKYVNFLYLASHYEKLKGSPEDNEQKQLFVEQHKHYLDEIIEQISEFSKRVILADANLDKVLSAYNKHRDKPIREQAENIIHLFTLTNLGAPAAFKYFDTTIDRKRYTSTKEVLDATLIHQSITGLYETRIDLSQLGGDGGEAAAKGGGGGTLNIEDEYRLHETSKEPDVSLGSTWLSDFPQAWAETGGMGLAVRQAPLIIPLKATSTPVSIKQYPMSQEARLGIKPHIQRLLDQGILVPCQSPWNTPLLPVKKPGTNDYRPVQDLREVNKRVEDIHPTVPNPYNLLSGLPPSHQWYTVLDLKDAFFCLRLHPTSQPLFAFEWRDPEMGISGQLTWTRLPQGFKNSPTLFNEALHRDLADFRIQHPDLILLQYVDDLLLAATSELDCQQGTRALLQTLGNLGYRASAKKAQICQKQVKYLGYLLKEGQRWLTEARKETVMGQPTPKTPRQLREFLGKAGFCRLFIPGFAEMAAPLYPLTKPGTLFNWGPDQQKAYQEIKQALLTAPALGLPDLTKPFELFVDEKQGYAKGVLTQKLGPWRRPVAYLSKKLDPVAAGWPPCLRMVAAIAVLTKDAGKLTMGQPLVILAPHAVEALVKQPPDRWLSNARMTHYQALLLDTDRVQFGPVVALNPATLLPLPEEGLQHNCLDILAEAHGTRPDLTDQPLPDADHTWYTDGSSLLQEGQRKAGAAVTTETEVIWAKALPAGTSAQRAELIALTQALKMAEGKKLNVYTDSRYAFATAHIHGEIYRRRGWLTSEGKEIKNKDEILALLKALFLPKRLSIIHCPGHQKGHSAEARGNRMADQAARKAAITETPDTSTLLIENSSPSGGSKRTADGSEFEAGKRTADGSEFEKRTADGSEFESPKKKAKVE

SEQ ID NO: 2660 - protein, 2116 aa, synthetic construct
MPAAKRVKLDGGDKKYSIGLDIGTNSVGWAVITDEYKVPSKKFKVLGNTDRHSIKKNLIGALLFDSGETAEATRLKRTARRRYTRRKNRICYLQEIFSNEMAKVDDSFFHRLEESFLVEEDKKHERHPIFGNIVDEVAYHEKYPTIYHLRKKLVDSTDKADLRLIYLALAHMIKFRGHFLIEGDLNPDNSDVDKLFIQLVQTYNQLFEENPINASGVDAKAILSARLSKSRRLENLIAQLPGEKKNGLFGNLIALSLGLTPNFKSNFDLAEDAKLQLSKDTYDDDLDNLLAQIGDQYADLFLAAKNLSDAILLSDILRVNTEITKAPLSASMIKRYDEHHQDLTLLKALVRQQLPEKYKEIFFDQSKNGYAGYIDGGASQEEFYKFIKPILEKMDGTEELLVKLNREDLLRKQRTFDNGSIPHQIHLGELHAILRRQEDFYPFLKDNREKIEKILTFRIPYYVGPLARGNSRFAWMTRKSEETITPWNFEEVVDKGASAQSFIERMTNFDKNLPNEKVLPKHSLLYEYFTVYNELTKVKYVTEGMRKPAFLSGEQKKAIVDLLFKTNRKVTVKQLKEDYFKKIECFDSVEISGVEDRFNASLGTYHDLLKIIKDKDFLDNEENEDILEDIVLTLTLFEDREMIEERLKTYAHLFDDKVMKQLKRRRYTGWGRLSRKLINGIRDKQSGKTILDFLKSDGFANRNFMQLIHDDSLTFKEDIQKAQVSGQGDSLHEHIANLAGSPAIKKGILQTVKVVDELVKVMGRHKPENIVIEMARENQTTQKGQKNSRERMKRIEEGIKELGSQILKEHPVENTQLQNEKLYLYYLQNGRDMYVDQELDINRLSDYDVDHIVPQSFLKDDSIDNKVLTRSDKARGKSDNVPSEEVVKKMKNYWRQLLNAKLITQRKFDNLTKAERGGLSELDKAGFIKRQLVETRQITKHVAQILDSRMNTKYDENDKLIREVKVITLKSKLVSDFRKDFQFYKVREINNYHHAHDAYLNAVVGTALIKKYPKLESEFVYGDYKVYDVRKMIAKSEQEIGKATAKYFFYSNIMNFFKTEITLANGEIRKRPLIETNGETGEIVWDKGRDFATVRKVLSMPQVNIVKKTEVQTGGFSKESILPKRNSDKLIARKKDWDPKKYGGFDSPTVAYSVLVVAKVEKGKSKKLKSVKELLGITIMERSSFEKNPIDFLEAKGYKEVKKDLIIKLPKYSLFELENGRKRMLASAGELQKGNELALPSKYVNFLYLASHYEKLKGSPEDNEQKQLFVEQHKHYLDEIIEQISEFSKRVILADANLDKVLSAYNKHRDKPIREQAENIIHLFTLTNLGAPAAFKYFDTTIDRKRYTSTKEVLDATLIHQSITGLYETRIDLSQLGGDGGGGSGSSEAAAKGGTLNIEDEYRLHETSKEPDVSLGSTWLSDFPQAWAETGGMGLAVRQAPLIIPLKATSTPVSIKQYPMSQEARLGIKPHIQRLLDQGILVPCQSPWNTPLLPVKKPGTNDYRPVQDLREVNKRVEDIHPTVPNPYNLLSGLPPSHQWYTVLDLKDAFFCLRLHPTSQPLFAFEWRDPEMGISGQLTWTRLPQGFKNSPTLFNEALHRDLADFRIQHPDLILLQYVDDLLLAATSELDCQQGTRALLQTLGNLGYRASAKKAQICQKQVKYLGYLLKEGQRWLTEARKETVMGQPTPKTPRQLREFLGKAGFCRLFIPGFAEMAAPLYPLTKPGTLFNWGPDQQKAYQEIKQALLTAPALGLPDLTKPFELFVDEKQGYAKGVLTQKLGPWRRPVAYLSKKLDPVAAGWPPCLRMVAAIAVLTKDAGKLTMGQPLVILAPHAVEALVKQPPDRWLSNARMTHYQALLLDTDRVQFGPVVALNPATLLPLPEEGLQHNCLDILAEAHGTRPDLTDQPLPDADHTWYTDGSSLLQEGQRKAGAAVTTETEVIWAKALPAGTSAQRAELIALTQALKMAEGKKLNVYTDSRYAFATAHIHGEIYRRRGWLTSEGKEIKNKDEILALLKALFLPKRLSIIHCPGHQKGHSAEARGNRMADQAARKAAITETPDTSTLLIENSSPSGGSKRTADGSEFEAGKRTADGSEFEKRTADGSEFESPKKKAKVE

SEQ ID NO: 2661 - protein, 2116 aa, synthetic construct
MPAAKRVKLDGGDKKYSIGLDIGTNSVGWAVITDEYKVPSKKFKVLGNTDRHSIKKNLIGALLFDSGETAEATRLKRTARRRYTRRKNRICYLQEIFSNEMAKVDDSFFHRLEESFLVEEDKKHERHPIFGNIVDEVAYHEKYPTIYHLRKKLVDSTDKADLRLIYLALAHMIKFRGHFLIEGDLNPDNSDVDKLFIQLVQTYNQLFEENPINASGVDAKAILSARLSKSRRLENLIAQLPGEKKNGLFGNLIALSLGLTPNFKSNFDLAEDAKLQLSKDTYDDDLDNLLAQIGDQYADLFLAAKNLSDAILLSDILRVNTEITKAPLSASMIKRYDEHHQDLTLLKALVRQQLPEKYKEIFFDQSKNGYAGYIDGGASQEEFYKFIKPILEKMDGTEELLVKLNREDLLRKQRTFDNGSIPHQIHLGELHAILRRQEDFYPFLKDNREKIEKILTFRIPYYVGPLARGNSRFAWMTRKSEETITPWNFEEVVDKGASAQSFIERMTNFDKNLPNEKVLPKHSLLYEYFTVYNELTKVKYVTEGMRKPAFLSGEQKKAIVDLLFKTNRKVTVKQLKEDYFKKIECFDSVEISGVEDRFNASLGTYHDLLKIIKDKDFLDNEENEDILEDIVLTLTLFEDREMIEERLKTYAHLFDDKVMKQLKRRRYTGWGRLSRKLINGIRDKQSGKTILDFLKSDGFANRNFMQLIHDDSLTFKEDIQKAQVSGQGDSLHEHIANLAGSPAIKKGILQTVKVVDELVKVMGRHKPENIVIEMARENQTTQKGQKNSRERMKRIEEGIKELGSQILKEHPVENTQLQNEKLYLYYLQNGRDMYVDQELDINRLSDYDVDHIVPQSFLKDDSIDNKVLTRSDKARGKSDNVPSEEVVKKMKNYWRQLLNAKLITQRKFDNLTKAERGGLSELDKAGFIKRQLVETRQITKHVAQILDSRMNTKYDENDKLIREVKVITLKSKLVSDFRKDFQFYKVREINNYHHAHDAYLNAVVGTALIKKYPKLESEFVYGDYKVYDVRKMIAKSEQEIGKATAKYFFYSNIMNFFKTEITLANGEIRKRPLIETNGETGEIVWDKGRDFATVRKVLSMPQVNIVKKTEVQTGGFSKESILPKRNSDKLIARKKDWDPKKYGGFDSPTVAYSVLVVAKVEKGKSKKLKSVKELLGITIMERSSFEKNPIDFLEAKGYKEVKKDLIIKLPKYSLFELENGRKRMLASAGELQKGNELALPSKYVNFLYLASHYEKLKGSPEDNEQKQLFVEQHKHYLDEIIEQISEFSKRVILADANLDKVLSAYNKHRDKPIREQAENIIHLFTLTNLGAPAAFKYFDTTIDRKRYTSTKEVLDATLIHQSITGLYETRIDLSQLGGDGGGSSGGSEAAAKGGTLNIEDEYRLHETSKEPDVSLGSTWLSDFPQAWAETGGMGLAVRQAPLIIPLKATSTPVSIKQYPMSQEARLGIKPHIQRLLDQGILVPCQSPWNTPLLPVKKPGTNDYRPVQDLREVNKRVEDIHPTVPNPYNLLSGLPPSHQWYTVLDLKDAFFCLRLHPTSQPLFAFEWRDPEMGISGQLTWTRLPQGFKNSPTLFNEALHRDLADFRIQHPDLILLQYVDDLLLAATSELDCQQGTRALLQTLGNLGYRASAKKAQICQKQVKYLGYLLKEGQRWLTEARKETVMGQPTPKTPRQLREFLGKAGFCRLFIPGFAEMAAPLYPLTKPGTLFNWGPDQQKAYQEIKQALLTAPALGLPDLTKPFELFVDEKQGYAKGVLTQKLGPWRRPVAYLSKKLDPVAAGWPPCLRMVAAIAVLTKDAGKLTMGQPLVILAPHAVEALVKQPPDRWLSNARMTHYQALLLDTDRVQFGPVVALNPATLLPLPEEGLQHNCLDILAEAHGTRPDLTDQPLPDADHTWYTDGSSLLQEGQRKAGAAVTTETEVIWAKALPAGTSAQRAELIALTQALKMAEGKKLNVYTDSRYAFATAHIHGEIYRRRGWLTSEGKEIKNKDEILALLKALFLPKRLSIIHCPGHQKGHSAEARGNRMADQAARKAAITETPDTSTLLIENSSPSGGSKRTADGSEFEAGKRTADGSEFEKRTADGSEFESPKKKAKVE

SEQ ID NO: 2662 - protein, 2120 aa, synthetic construct
MPAAKRVKLDGGDKKYSIGLDIGTNSVGWAVITDEYKVPSKKFKVLGNTDRHSIKKNLIGALLFDSGETAEATRLKRTARRRYTRRKNRICYLQEIFSNEMAKVDDSFFHRLEESFLVEEDKKHERHPIFGNIVDEVAYHEKYPTIYHLRKKLVDSTDKADLRLIYLALAHMIKFRGHFLIEGDLNPDNSDVDKLFIQLVQTYNQLFEENPINASGVDAKAILSARLSKSRRLENLIAQLPGEKKNGLFGNLIALSLGLTPNFKSNFDLAEDAKLQLSKDTYDDDLDNLLAQIGDQYADLFLAAKNLSDAILLSDILRVNTEITKAPLSASMIKRYDEHHQDLTLLKALVRQQLPEKYKEIFFDQSKNGYAGYIDGGASQEEFYKFIKPILEKMDGTEELLVKLNREDLLRKQRTFDNGSIPHQIHLGELHAILRRQEDFYPFLKDNREKIEKILTFRIPYYVGPLARGNSRFAWMTRKSEETITPWNFEEVVDKGASAQSFIERMTNFDKNLPNEKVLPKHSLLYEYFTVYNELTKVKYVTEGMRKPAFLSGEQKKAIVDLLFKTNRKVTVKQLKEDYFKKIECFDSVEISGVEDRFNASLGTYHDLLKIIKDKDFLDNEENEDILEDIVLTLTLFEDREMIEERLKTYAHLFDDKVMKQLKRRRYTGWGRLSRKLINGIRDKQSGKTILDFLKSDGFANRNFMQLIHDDSLTFKEDIQKAQVSGQGDSLHEHIANLAGSPAIKKGILQTVKVVDELVKVMGRHKPENIVIEMARENQTTQKGQKNSRERMKRIEEGIKELGSQILKEHPVENTQLQNEKLYLYYLQNGRDMYVDQELDINRLSDYDVDHIVPQSFLKDDSIDNKVLTRSDKARGKSDNVPSEEVVKKMKNYWRQLLNAKLITQRKFDNLTKAERGGLSELDKAGFIKRQLVETRQITKHVAQILDSRMNTKYDENDKLIREVKVITLKSKLVSDFRKDFQFYKVREINNYHHAHDAYLNAVVGTALIKKYPKLESEFVYGDYKVYDVRKMIAKSEQEIGKATAKYFFYSNIMNFFKTEITLANGEIRKRPLIETNGETGEIVWDKGRDFATVRKVLSMPQVNIVKKTEVQTGGFSKESILPKRNSDKLIARKKDWDPKKYGGFDSPTVAYSVLVVAKVEKGKSKKLKSVKELLGITIMERSSFEKNPIDFLEAKGYKEVKKDLIIKLPKYSLFELENGRKRMLASAGELQKGNELALPSKYVNFLYLASHYEKLKGSPEDNEQKQLFVEQHKHYLDEIIEQISEFSKRVILADANLDKVLSAYNKHRDKPIREQAENIIHLFTLTNLGAPAAFKYFDTTIDRKRYTSTKEVLDATLIHQSITGLYETRIDLSQLGGDGGGGGGSGGGGSGGGGSGGTLNIEDEYRLHETSKEPDVSLGSTWLSDFPQAWAETGGMGLAVRQAPLIIPLKATSTPVSIKQYPMSQEARLGIKPHIQRLLDQGILVPCQSPWNTPLLPVKKPGTNDYRPVQDLREVNKRVEDIHPTVPNPYNLLSGLPPSHQWYTVLDLKDAFFCLRLHPTSQPLFAFEWRDPEMGISGQLTWTRLPQGFKNSPTLFNEALHRDLADFRIQHPDLILLQYVDDLLLAATSELDCQQGTRALLQTLGNLGYRASAKKAQICQKQVKYLGYLLKEGQRWLTEARKETVMGQPTPKTPRQLREFLGKAGFCRLFIPGFAEMAAPLYPLTKPGTLFNWGPDQQKAYQEIKQALLTAPALGLPDLTKPFELFVDEKQGYAKGVLTQKLGPWRRPVAYLSKKLDPVAAGWPPCLRMVAAIAVLTKDAGKLTMGQPLVILAPHAVEALVKQPPDRWLSNARMTHYQALLLDTDRVQFGPVVALNPATLLPLPEEGLQHNCLDILAEAHGTRPDLTDQPLPDADHTWYTDGSSLLQEGQRKAGAAVTTETEVIWAKALPAGTSAQRAELIALTQALKMAEGKKLNVYTDSRYAFATAHIHGEIYRRRGWLTSEGKEIKNKDEILALLKALFLPKRLSIIHCPGHQKGHSAEARGNRMADQAARKAAITETPDTSTLLIENSSPSGGSKRTADGSEFEAGKRTADGSEFEKRTADGSEFESPKKKAKVE

SEQ ID NO: 2663 - protein, 2121 aa, synthetic construct
MPAAKRVKLDGGDKKYSIGLDIGTNSVGWAVITDEYKVPSKKFKVLGNTDRHSIKKNLIGALLFDSGETAEATRLKRTARRRYTRRKNRICYLQEIFSNEMAKVDDSFFHRLEESFLVEEDKKHERHPIFGNIVDEVAYHEKYPTIYHLRKKLVDSTDKADLRLIYLALAHMIKFRGHFLIEGDLNPDNSDVDKLFIQLVQTYNQLFEENPINASGVDAKAILSARLSKSRRLENLIAQLPGEKKNGLFGNLIALSLGLTPNFKSNFDLAEDAKLQLSKDTYDDDLDNLLAQIGDQYADLFLAAKNLSDAILLSDILRVNTEITKAPLSASMIKRYDEHHQDLTLLKALVRQQLPEKYKEIFFDQSKNGYAGYIDGGASQEEFYKFIKPILEKMDGTEELLVKLNREDLLRKQRTFDNGSIPHQIHLGELHAILRRQEDFYPFLKDNREKIEKILTFRIPYYVGPLARGNSRFAWMTRKSEETITPWNFEEVVDKGASAQSFIERMTNFDKNLPNEKVLPKHSLLYEYFTVYNELTKVKYVTEGMRKPAFLSGEQKKAIVDLLFKTNRKVTVKQLKEDYFKKIECFDSVEISGVEDRFNASLGTYHDLLKIIKDKDFLDNEENEDILEDIVLTLTLFEDREMIEERLKTYAHLFDDKVMKQLKRRRYTGWGRLSRKLINGIRDKQSGKTILDFLKSDGFANRNFMQLIHDDSLTFKEDIQKAQVSGQGDSLHEHIANLAGSPAIKKGILQTVKVVDELVKVMGRHKPENIVIEMARENQTTQKGQKNSRERMKRIEEGIKELGSQILKEHPVENTQLQNEKLYLYYLQNGRDMYVDQELDINRLSDYDVDHIVPQSFLKDDSIDNKVLTRSDKARGKSDNVPSEEVVKKMKNYWRQLLNAKLITQRKFDNLTKAERGGLSELDKAGFIKRQLVETRQITKHVAQILDSRMNTKYDENDKLIREVKVITLKSKLVSDFRKDFQFYKVREINNYHHAHDAYLNAVVGTALIKKYPKLESEFVYGDYKVYDVRKMIAKSEQEIGKATAKYFFYSNIMNFFKTEITLANGEIRKRPLIETNGETGEIVWDKGRDFATVRKVLSMPQVNIVKKTEVQTGGFSKESILPKRNSDKLIARKKDWDPKKYGGFDSPTVAYSVLVVAKVEKGKSKKLKSVKELLGITIMERSSFEKNPIDFLEAKGYKEVKKDLIIKLPKYSLFELENGRKRMLASAGELQKGNELALPSKYVNFLYLASHYEKLKGSPEDNEQKQLFVEQHKHYLDEIIEQISEFSKRVILADANLDKVLSAYNKHRDKPIREQAENIIHLFTLTNLGAPAAFKYFDTTIDRKRYTSTKEVLDATLIHQSITGLYETRIDLSQLGGDGGSGSETPGTSESATPESGGTLNIEDEYRLHETSKEPDVSLGSTWLSDFPQAWAETGGMGLAVRQAPLIIPLKATSTPVSIKQYPMSQEARLGIKPHIQRLLDQGILVPCQSPWNTPLLPVKKPGTNDYRPVQDLREVNKRVEDIHPTVPNPYNLLSGLPPSHQWYTVLDLKDAFFCLRLHPTSQPLFAFEWRDPEMGISGQLTWTRLPQGFKNSPTLFNEALHRDLADFRIQHPDLILLQYVDDLLLAATSELDCQQGTRALLQTLGNLGYRASAKKAQICQKQVKYLGYLLKEGQRWLTEARKETVMGQPTPKTPRQLREFLGKAGFCRLFIPGFAEMAAPLYPLTKPGTLFNWGPDQQKAYQEIKQALLTAPALGLPDLTKPFELFVDEKQGYAKGVLTQKLGPWRRPVAYLSKKLDPVAAGWPPCLRMVAAIAVLTKDAGKLTMGQPLVILAPHAVEALVKQPPDRWLSNARMTHYQALLLDTDRVQFGPVVALNPATLLPLPEEGLQHNCLDILAEAHGTRPDLTDQPLPDADHTWYTDGSSLLQEGQRKAGAAVTTETEVIWAKALPAGTSAQRAELIALTQALKMAEGKKLNVYTDSRYAFATAHIHGEIYRRRGWLTSEGKEIKNKDEILALLKALFLPKRLSIIHCPGHQKGHSAEARGNRMADQAARKAAITETPDTSTLLIENSSPSGGSKRTADGSEFEAGKRTADGSEFEKRTADGSEFESPKKKAKVE

SEQ ID NO: 2664 - protein, 2114 aa, synthetic construct
MPAAKRVKLDGGDKKYSIGLDIGTNSVGWAVITDEYKVPSKKFKVLGNTDRHSIKKNLIGALLFDSGETAEATRLKRTARRRYTRRKNRICYLQEIFSNEMAKVDDSFFHRLEESFLVEEDKKHERHPIFGNIVDEVAYHEKYPTIYHLRKKLVDSTDKADLRLIYLALAHMIKFRGHFLIEGDLNPDNSDVDKLFIQLVQTYNQLFEENPINASGVDAKAILSARLSKSRRLENLIAQLPGEKKNGLFGNLIALSLGLTPNFKSNFDLAEDAKLQLSKDTYDDDLDNLLAQIGDQYADLFLAAKNLSDAILLSDILRVNTEITKAPLSASMIKRYDEHHQDLTLLKALVRQQLPEKYKEIFFDQSKNGYAGYIDGGASQEEFYKFIKPILEKMDGTEELLVKLNREDLLRKQRTFDNGSIPHQIHLGELHAILRRQEDFYPFLKDNREKIEKILTFRIPYYVGPLARGNSRFAWMTRKSEETITPWNFEEVVDKGASAQSFIERMTNFDKNLPNEKVLPKHSLLYEYFTVYNELTKVKYVTEGMRKPAFLSGEQKKAIVDLLFKTNRKVTVKQLKEDYFKKIECFDSVEISGVEDRFNASLGTYHDLLKIIKDKDFLDNEENEDILEDIVLTLTLFEDREMIEERLKTYAHLFDDKVMKQLKRRRYTGWGRLSRKLINGIRDKQSGKTILDFLKSDGFANRNFMQLIHDDSLTFKEDIQKAQVSGQGDSLHEHIANLAGSPAIKKGILQTVKVVDELVKVMGRHKPENIVIEMARENQTTQKGQKNSRERMKRIEEGIKELGSQILKEHPVENTQLQNEKLYLYYLQNGRDMYVDQELDINRLSDYDVDHIVPQSFLKDDSIDNKVLTRSDKARGKSDNVPSEEVVKKMKNYWRQLLNAKLITQRKFDNLTKAERGGLSELDKAGFIKRQLVETRQITKHVAQILDSRMNTKYDENDKLIREVKVITLKSKLVSDFRKDFQFYKVREINNYHHAHDAYLNAVVGTALIKKYPKLESEFVYGDYKVYDVRKMIAKSEQEIGKATAKYFFYSNIMNFFKTEITLANGEIRKRPLIETNGETGEIVWDKGRDFATVRKVLSMPQVNIVKKTEVQTGGFSKESILPKRNSDKLIARKKDWDPKKYGGFDSPTVAYSVLVVAKVEKGKSKKLKSVKELLGITIMERSSFEKNPIDFLEAKGYKEVKKDLIIKLPKYSLFELENGRKRMLASAGELQKGNELALPSKYVNFLYLASHYEKLKGSPEDNEQKQLFVEQHKHYLDEIIEQISEFSKRVILADANLDKVLSAYNKHRDKPIREQAENIIHLFTLTNLGAPAAFKYFDTTIDRKRYTSTKEVLDATLIHQSITGLYETRIDLSQLGGDGGGGGGSSPAPGGTLNIEDEYRLHETSKEPDVSLGSTWLSDFPQAWAETGGMGLAVRQAPLIIPLKATSTPVSIKQYPMSQEARLGIKPHIQRLLDQGILVPCQSPWNTPLLPVKKPGTNDYRPVQDLREVNKRVEDIHPTVPNPYNLLSGLPPSHQWYTVLDLKDAFFCLRLHPTSQPLFAFEWRDPEMGISGQLTWTRLPQGFKNSPTLFNEALHRDLADFRIQHPDLILLQYVDDLLLAATSELDCQQGTRALLQTLGNLGYRASAKKAQICQKQVKYLGYLLKEGQRWLTEARKETVMGQPTPKTPRQLREFLGKAGFCRLFIPGFAEMAAPLYPLTKPGTLFNWGPDQQKAYQEIKQALLTAPALGLPDLTKPFELFVDEKQGYAKGVLTQKLGPWRRPVAYLSKKLDPVAAGWPPCLRMVAAIAVLTKDAGKLTMGQPLVILAPHAVEALVKQPPDRWLSNARMTHYQALLLDTDRVQFGPVVALNPATLLPLPEEGLQHNCLDILAEAHGTRPDLTDQPLPDADHTWYTDGSSLLQEGQRKAGAAVTTETEVIWAKALPAGTSAQRAELIALTQALKMAEGKKLNVYTDSRYAFATAHIHGEIYRRRGWLTSEGKEIKNKDEILALLKALFLPKRLSIIHCPGHQKGHSAEARGNRMADQAARKAAITETPDTSTLLIENSSPSGGSKRTADGSEFEAGKRTADGSEFEKRTADGSEFESPKKKAKVE

SEQ ID NO: 2665 - protein, 2117 aa, synthetic construct
MPAAKRVKLDGGDKKYSIGLDIGTNSVGWAVITDEYKVPSKKFKVLGNTDRHSIKKNLIGALLFDSGETAEATRLKRTARRRYTRRKNRICYLQEIFSNEMAKVDDSFFHRLEESFLVEEDKKHERHPIFGNIVDEVAYHEKYPTIYHLRKKLVDSTDKADLRLIYLALAHMIKFRGHFLIEGDLNPDNSDVDKLFIQLVQTYNQLFEENPINASGVDAKAILSARLSKSRRLENLIAQLPGEKKNGLFGNLIALSLGLTPNFKSNFDLAEDAKLQLSKDTYDDDLDNLLAQIGDQYADLFLAAKNLSDAILLSDILRVNTEITKAPLSASMIKRYDEHHQDLTLLKALVRQQLPEKYKEIFFDQSKNGYAGYIDGGASQEEFYKFIKPILEKMDGTEELLVKLNREDLLRKQRTFDNGSIPHQIHLGELHAILRRQEDFYPFLKDNREKIEKILTFRIPYYVGPLARGNSRFAWMTRKSEETITPWNFEEVVDKGASAQSFIERMTNFDKNLPNEKVLPKHSLLYEYFTVYNELTKVKYVTEGMRKPAFLSGEQKKAIVDLLFKTNRKVTVKQLKEDYFKKIECFDSVEISGVEDRFNASLGTYHDLLKIIKDKDFLDNEENEDILEDIVLTLTLFEDREMIEERLKTYAHLFDDKVMKQLKRRRYTGWGRLSRKLINGIRDKQSGKTILDFLKSDGFANRNFMQLIHDDSLTFKEDIQKAQVSGQGDSLHEHIANLAGSPAIKKGILQTVKVVDELVKVMGRHKPENIVIEMARENQTTQKGQKNSRERMKRIEEGIKELGSQILKEHPVENTQLQNEKLYLYYLQNGRDMYVDQELDINRLSDYDVDHIVPQSFLKDDSIDNKVLTRSDKARGKSDNVPSEEVVKKMKNYWRQLLNAKLITQRKFDNLTKAERGGLSELDKAGFIKRQLVETRQITKHVAQILDSRMNTKYDENDKLIREVKVITLKSKLVSDFRKDFQFYKVREINNYHHAHDAYLNAVVGTALIKKYPKLESEFVYGDYKVYDVRKMIAKSEQEIGKATAKYFFYSNIMNFFKTEITLANGEIRKRPLIETNGETGEIVWDKGRDFATVRKVLSMPQVNIVKKTEVQTGGFSKESILPKRNSDKLIARKKDWDPKKYGGFDSPTVAYSVLVVAKVEKGKSKKLKSVKELLGITIMERSSFEKNPIDFLEAKGYKEVKKDLIIKLPKYSLFELENGRKRMLASAGELQKGNELALPSKYVNFLYLASHYEKLKGSPEDNEQKQLFVEQHKHYLDEIIEQISEFSKRVILADANLDKVLSAYNKHRDKPIREQAENIIHLFTLTNLGAPAAFKYFDTTIDRKRYTSTKEVLDATLIHQSITGLYETRIDLSQLGGDGGGSSGSSGSSGSSGGTLNIEDEYRLHETSKEPDVSLGSTWLSDFPQAWAETGGMGLAVRQAPLIIPLKATSTPVSIKQYPMSQEARLGIKPHIQRLLDQGILVPCQSPWNTPLLPVKKPGTNDYRPVQDLREVNKRVEDIHPTVPNPYNLLSGLPPSHQWYTVLDLKDAFFCLRLHPTSQPLFAFEWRDPEMGISGQLTWTRLPQGFKNSPTLFNEALHRDLADFRIQHPDLILLQYVDDLLLAATSELDCQQGTRALLQTLGNLGYRASAKKAQICQKQVKYLGYLLKEGQRWLTEARKETVMGQPTPKTPRQLREFLGKAGFCRLFIPGFAEMAAPLYPLTKPGTLFNWGPDQQKAYQEIKQALLTAPALGLPDLTKPFELFVDEKQGYAKGVLTQKLGPWRRPVAYLSKKLDPVAAGWPPCLRMVAAIAVLTKDAGKLTMGQPLVILAPHAVEALVKQPPDRWLSNARMTHYQALLLDTDRVQFGPVVALNPATLLPLPEEGLQHNCLDILAEAHGTRPDLTDQPLPDADHTWYTDGSSLLQEGQRKAGAAVTTETEVIWAKALPAGTSAQRAELIALTQALKMAEGKKLNVYTDSRYAFATAHIHGEIYRRRGWLTSEGKEIKNKDEILALLKALFLPKRLSIIHCPGHQKGHSAEARGNRMADQAARKAAITETPDTSTLLIENSSPSGGSKRTADGSEFEAGKRTADGSEFEKRTADGSEFESPKKKAKVE

SEQ ID NO: 2666 - protein, 2116 aa, synthetic construct
MPAAKRVKLDGGDKKYSIGLDIGTNSVGWAVITDEYKVPSKKFKVLGNTDRHSIKKNLIGALLFDSGETAEATRLKRTARRRYTRRKNRICYLQEIFSNEMAKVDDSFFHRLEESFLVEEDKKHERHPIFGNIVDEVAYHEKYPTIYHLRKKLVDSTDKADLRLIYLALAHMIKFRGHFLIEGDLNPDNSDVDKLFIQLVQTYNQLFEENPINASGVDAKAILSARLSKSRRLENLIAQLPGEKKNGLFGNLIALSLGLTPNFKSNFDLAEDAKLQLSKDTYDDDLDNLLAQIGDQYADLFLAAKNLSDAILLSDILRVNTEITKAPLSASMIKRYDEHHQDLTLLKALVRQQLPEKYKEIFFDQSKNGYAGYIDGGASQEEFYKFIKPILEKMDGTEELLVKLNREDLLRKQRTFDNGSIPHQIHLGELHAILRRQEDFYPFLKDNREKIEKILTFRIPYYVGPLARGNSRFAWMTRKSEETITPWNFEEVVDKGASAQSFIERMTNFDKNLPNEKVLPKHSLLYEYFTVYNELTKVKYVTEGMRKPAFLSGEQKKAIVDLLFKTNRKVTVKQLKEDYFKKIECFDSVEISGVEDRFNASLGTYHDLLKIIKDKDFLDNEENEDILEDIVLTLTLFEDREMIEERLKTYAHLFDDKVMKQLKRRRYTGWGRLSRKLINGIRDKQSGKTILDFLKSDGFANRNFMQLIHDDSLTFKEDIQKAQVSGQGDSLHEHIANLAGSPAIKKGILQTVKVVDELVKVMGRHKPENIVIEMARENQTTQKGQKNSRERMKRIEEGIKELGSQILKEHPVENTQLQNEKLYLYYLQNGRDMYVDQELDINRLSDYDVDHIVPQSFLKDDSIDNKVLTRSDKARGKSDNVPSEEVVKKMKNYWRQLLNAKLITQRKFDNLTKAERGGLSELDKAGFIKRQLVETRQITKHVAQILDSRMNTKYDENDKLIREVKVITLKSKLVSDFRKDFQFYKVREINNYHHAHDAYLNAVVGTALIKKYPKLESEFVYGDYKVYDVRKMIAKSEQEIGKATAKYFFYSNIMNFFKTEITLANGEIRKRPLIETNGETGEIVWDKGRDFATVRKVLSMPQVNIVKKTEVQTGGFSKESILPKRNSDKLIARKKDWDPKKYGGFDSPTVAYSVLVVAKVEKGKSKKLKSVKELLGITIMERSSFEKNPIDFLEAKGYKEVKKDLIIKLPKYSLFELENGRKRMLASAGELQKGNELALPSKYVNFLYLASHYEKLKGSPEDNEQKQLFVEQHKHYLDEIIEQISEFSKRVILADANLDKVLSAYNKHRDKPIREQAENIIHLFTLTNLGAPAAFKYFDTTIDRKRYTSTKEVLDATLIHQSITGLYETRIDLSQLGGDGGEAAAKGGSGSSGGTLNIEDEYRLHETSKEPDVSLGSTWLSDFPQAWAETGGMGLAVRQAPLIIPLKATSTPVSIKQYPMSQEARLGIKPHIQRLLDQGILVPCQSPWNTPLLPVKKPGTNDYRPVQDLREVNKRVEDIHPTVPNPYNLLSGLPPSHQWYTVLDLKDAFFCLRLHPTSQPLFAFEWRDPEMGISGQLTWTRLPQGFKNSPTLFNEALHRDLADFRIQHPDLILLQYVDDLLLAATSELDCQQGTRALLQTLGNLGYRASAKKAQICQKQVKYLGYLLKEGQRWLTEARKETVMGQPTPKTPRQLREFLGKAGFCRLFIPGFAEMAAPLYPLTKPGTLFNWGPDQQKAYQEIKQALLTAPALGLPDLTKPFELFVDEKQGYAKGVLTQKLGPWRRPVAYLSKKLDPVAAGWPPCLRMVAAIAVLTKDAGKLTMGQPLVILAPHAVEALVKQPPDRWLSNARMTHYQALLLDTDRVQFGPVVALNPATLLPLPEEGLQHNCLDILAEAHGTRPDLTDQPLPDADHTWYTDGSSLLQEGQRKAGAAVTTETEVIWAKALPAGTSAQRAELIALTQALKMAEGKKLNVYTDSRYAFATAHIHGEIYRRRGWLTSEGKEIKNKDEILALLKALFLPKRLSIIHCPGHQKGHSAEARGNRMADQAARKAAITETPDTSTLLIENSSPSGGSKRTADGSEFEAGKRTADGSEFEKRTADGSEFESPKKKAKVE

SEQ ID NO: 2667 - protein, 2114 aa, synthetic construct
MPAAKRVKLDGGDKKYSIGLDIGTNSVGWAVITDEYKVPSKKFKVLGNTDRHSIKKNLIGALLFDSGETAEATRLKRTARRRYTRRKNRICYLQEIFSNEMAKVDDSFFHRLEESFLVEEDKKHERHPIFGNIVDEVAYHEKYPTIYHLRKKLVDSTDKADLRLIYLALAHMIKFRGHFLIEGDLNPDNSDVDKLFIQLVQTYNQLFEENPINASGVDAKAILSARLSKSRRLENLIAQLPGEKKNGLFGNLIALSLGLTPNFKSNFDLAEDAKLQLSKDTYDDDLDNLLAQIGDQYADLFLAAKNLSDAILLSDILRVNTEITKAPLSASMIKRYDEHHQDLTLLKALVRQQLPEKYKEIFFDQSKNGYAGYIDGGASQEEFYKFIKPILEKMDGTEELLVKLNREDLLRKQRTFDNGSIPHQIHLGELHAILRRQEDFYPFLKDNREKIEKILTFRIPYYVGPLARGNSRFAWMTRKSEETITPWNFEEVVDKGASAQSFIERMTNFDKNLPNEKVLPKHSLLYEYFTVYNELTKVKYVTEGMRKPAFLSGEQKKAIVDLLFKTNRKVTVKQLKEDYFKKIECFDSVEISGVEDRFNASLGTYHDLLKIIKDKDFLDNEENEDILEDIVLTLTLFEDREMIEERLKTYAHLFDDKVMKQLKRRRYTGWGRLSRKLINGIRDKQSGKTILDFLKSDGFANRNFMQLIHDDSLTFKEDIQKAQVSGQGDSLHEHIANLAGSPAIKKGILQTVKVVDELVKVMGRHKPENIVIEMARENQTTQKGQKNSRERMKRIEEGIKELGSQILKEHPVENTQLQNEKLYLYYLQNGRDMYVDQELDINRLSDYDVDHIVPQSFLKDDSIDNKVLTRSDKARGKSDNVPSEEVVKKMKNYWRQLLNAKLITQRKFDNLTKAERGGLSELDKAGFIKRQLVETRQITKHVAQILDSRMNTKYDENDKLIREVKVITLKSKLVSDFRKDFQFYKVREINNYHHAHDAYLNAVVGTALIKKYPKLESEFVYGDYKVYDVRKMIAKSEQEIGKATAKYFFYSNIMNFFKTEITLANGEIRKRPLIETNGETGEIVWDKGRDFATVRKVLSMPQVNIVKKTEVQTGGFSKESILPKRNSDKLIARKKDWDPKKYGGFDSPTVAYSVLVVAKVEKGKSKKLKSVKELLGITIMERSSFEKNPIDFLEAKGYKEVKKDLIIKLPKYSLFELENGRKRMLASAGELQKGNELALPSKYVNFLYLASHYEKLKGSPEDNEQKQLFVEQHKHYLDEIIEQISEFSKRVILADANLDKVLSAYNKHRDKPIREQAENIIHLFTLTNLGAPAAFKYFDTTIDRKRYTSTKEVLDATLIHQSITGLYETRIDLSQLGGDGGGGSPAPGGGGGTLNIEDEYRLHETSKEPDVSLGSTWLSDFPQAWAETGGMGLAVRQAPLIIPLKATSTPVSIKQYPMSQEARLGIKPHIQRLLDQGILVPCQSPWNTPLLPVKKPGTNDYRPVQDLREVNKRVEDIHPTVPNPYNLLSGLPPSHQWYTVLDLKDAFFCLRLHPTSQPLFAFEWRDPEMGISGQLTWTRLPQGFKNSPTLFNEALHRDLADFRIQHPDLILLQYVDDLLLAATSELDCQQGTRALLQTLGNLGYRASAKKAQICQKQVKYLGYLLKEGQRWLTEARKETVMGQPTPKTPRQLREFLGKAGFCRLFIPGFAEMAAPLYPLTKPGTLFNWGPDQQKAYQEIKQALLTAPALGLPDLTKPFELFVDEKQGYAKGVLTQKLGPWRRPVAYLSKKLDPVAAGWPPCLRMVAAIAVLTKDAGKLTMGQPLVILAPHAVEALVKQPPDRWLSNARMTHYQALLLDTDRVQFGPVVALNPATLLPLPEEGLQHNCLDILAEAHGTRPDLTDQPLPDADHTWYTDGSSLLQEGQRKAGAAVTTETEVIWAKALPAGTSAQRAELIALTQALKMAEGKKLNVYTDSRYAFATAHIHGEIYRRRGWLTSEGKEIKNKDEILALLKALFLPKRLSIIHCPGHQKGHSAEARGNRMADQAARKAAITETPDTSTLLIENSSPSGGSKRTADGSEFEAGKRTADGSEFEKRTADGSEFESPKKKAKVE

SEQ ID NO: 2668 - protein, 2116 aa, synthetic construct
MPAAKRVKLDGGDKKYSIGLDIGTNSVGWAVITDEYKVPSKKFKVLGNTDRHSIKKNLIGALLFDSGETAEATRLKRTARRRYTRRKNRICYLQEIFSNEMAKVDDSFFHRLEESFLVEEDKKHERHPIFGNIVDEVAYHEKYPTIYHLRKKLVDSTDKADLRLIYLALAHMIKFRGHFLIEGDLNPDNSDVDKLFIQLVQTYNQLFEENPINASGVDAKAILSARLSKSRRLENLIAQLPGEKKNGLFGNLIALSLGLTPNFKSNFDLAEDAKLQLSKDTYDDDLDNLLAQIGDQYADLFLAAKNLSDAILLSDILRVNTEITKAPLSASMIKRYDEHHQDLTLLKALVRQQLPEKYKEIFFDQSKNGYAGYIDGGASQEEFYKFIKPILEKMDGTEELLVKLNREDLLRKQRTFDNGSIPHQIHLGELHAILRRQEDFYPFLKDNREKIEKILTFRIPYYVGPLARGNSRFAWMTRKSEETITPWNFEEVVDKGASAQSFIERMTNFDKNLPNEKVLPKHSLLYEYFTVYNELTKVKYVTEGMRKPAFLSGEQKKAIVDLLFKTNRKVTVKQLKEDYFKKIECFDSVEISGVEDRFNASLGTYHDLLKIIKDKDFLDNEENEDILEDIVLTLTLFEDREMIEERLKTYAHLFDDKVMKQLKRRRYTGWGRLSRKLINGIRDKQSGKTILDFLKSDGFANRNFMQLIHDDSLTFKEDIQKAQVSGQGDSLHEHIANLAGSPAIKKGILQTVKVVDELVKVMGRHKPENIVIEMARENQTTQKGQKNSRERMKRIEEGIKELGSQILKEHPVENTQLQNEKLYLYYLQNGRDMYVDQELDINRLSDYDVDHIVPQSFLKDDSIDNKVLTRSDKARGKSDNVPSEEVVKKMKNYWRQLLNAKLITQRKFDNLTKAERGGLSELDKAGFIKRQLVETRQITKHVAQILDSRMNTKYDENDKLIREVKVITLKSKLVSDFRKDFQFYKVREINNYHHAHDAYLNAVVGTALIKKYPKLESEFVYGDYKVYDVRKMIAKSEQEIGKATAKYFFYSNIMNFFKTEITLANGEIRKRPLIETNGETGEIVWDKGRDFATVRKVLSMPQVNIVKKTEVQTGGFSKESILPKRNSDKLIARKKDWDPKKYGGFDSPTVAYSVLVVAKVEKGKSKKLKSVKELLGITIMERSSFEKNPIDFLEAKGYKEVKKDLIIKLPKYSLFELENGRKRMLASAGELQKGNELALPSKYVNFLYLASHYEKLKGSPEDNEQKQLFVEQHKHYLDEIIEQISEFSKRVILADANLDKVLSAYNKHRDKPIREQAENIIHLFTLTNLGAPAAFKYFDTTIDRKRYTSTKEVLDATLIHQSITGLYETRIDLSQLGGDGGPAPEAAAKGGGGGTLNIEDEYRLHETSKEPDVSLGSTWLSDFPQAWAETGGMGLAVRQAPLIIPLKATSTPVSIKQYPMSQEARLGIKPHIQRLLDQGILVPCQSPWNTPLLPVKKPGTNDYRPVQDLREVNKRVEDIHPTVPNPYNLLSGLPPSHQWYTVLDLKDAFFCLRLHPTSQPLFAFEWRDPEMGISGQLTWTRLPQGFKNSPTLFNEALHRDLADFRIQHPDLILLQYVDDLLLAATSELDCQQGTRALLQTLGNLGYRASAKKAQICQKQVKYLGYLLKEGQRWLTEARKETVMGQPTPKTPRQLREFLGKAGFCRLFIPGFAEMAAPLYPLTKPGTLFNWGPDQQKAYQEIKQALLTAPALGLPDLTKPFELFVDEKQGYAKGVLTQKLGPWRRPVAYLSKKLDPVAAGWPPCLRMVAAIAVLTKDAGKLTMGQPLVILAPHAVEALVKQPPDRWLSNARMTHYQALLLDTDRVQFGPVVALNPATLLPLPEEGLQHNCLDILAEAHGTRPDLTDQPLPDADHTWYTDGSSLLQEGQRKAGAAVTTETEVIWAKALPAGTSAQRAELIALTQALKMAEGKKLNVYTDSRYAFATAHIHGEIYRRRGWLTSEGKEIKNKDEILALLKALFLPKRLSIIHCPGHQKGHSAEARGNRMADQAARKAAITETPDTSTLLIENSSPSGGSKRTADGSEFEAGKRTADGSEFEKRTADGSEFESPKKKAKVE

SEQ ID NO: 2669 - protein, 2120 aa, synthetic construct
MPAAKRVKLDGGDKKYSIGLDIGTNSVGWAVITDEYKVPSKKFKVLGNTDRHSIKKNLIGALLFDSGETAEATRLKRTARRRYTRRKNRICYLQEIFSNEMAKVDDSFFHRLEESFLVEEDKKHERHPIFGNIVDEVAYHEKYPTIYHLRKKLVDSTDKADLRLIYLALAHMIKFRGHFLIEGDLNPDNSDVDKLFIQLVQTYNQLFEENPINASGVDAKAILSARLSKSRRLENLIAQLPGEKKNGLFGNLIALSLGLTPNFKSNFDLAEDAKLQLSKDTYDDDLDNLLAQIGDQYADLFLAAKNLSDAILLSDILRVNTEITKAPLSASMIKRYDEHHQDLTLLKALVRQQLPEKYKEIFFDQSKNGYAGYIDGGASQEEFYKFIKPILEKMDGTEELLVKLNREDLLRKQRTFDNGSIPHQIHLGELHAILRRQEDFYPFLKDNREKIEKILTFRIPYYVGPLARGNSRFAWMTRKSEETITPWNFEEVVDKGASAQSFIERMTNFDKNLPNEKVLPKHSLLYEYFTVYNELTKVKYVTEGMRKPAFLSGEQKKAIVDLLFKTNRKVTVKQLKEDYFKKIECFDSVEISGVEDRFNASLGTYHDLLKIIKDKDFLDNEENEDILEDIVLTLTLFEDREMIEERLKTYAHLFDDKVMKQLKRRRYTGWGRLSRKLINGIRDKQSGKTILDFLKSDGFANRNFMQLIHDDSLTFKEDIQKAQVSGQGDSLHEHIANLAGSPAIKKGILQTVKVVDELVKVMGRHKPENIVIEMARENQTTQKGQKNSRERMKRIEEGIKELGSQILKEHPVENTQLQNEKLYLYYLQNGRDMYVDQELDINRLSDYDVDHIVPQSFLKDDSIDNKVLTRSDKARGKSDNVPSEEVVKKMKNYWRQLLNAKLITQRKFDNLTKAERGGLSELDKAGFIKRQLVETRQITKHVAQILDSRMNTKYDENDKLIREVKVITLKSKLVSDFRKDFQFYKVREINNYHHAHDAYLNAVVGTALIKKYPKLESEFVYGDYKVYDVRKMIAKSEQEIGKATAKYFFYSNIMNFFKTEITLANGEIRKRPLIETNGETGEIVWDKGRDFATVRKVLSMPQVNIVKKTEVQTGGFSKESILPKRNSDKLIARKKDWDPKKYGGFDSPTVAYSVLVVAKVEKGKSKKLKSVKELLGITIMERSSFEKNPIDFLEAKGYKEVKKDLIIKLPKYSLFELENGRKRMLASAGELQKGNELALPSKYVNFLYLASHYEKLKGSPEDNEQKQLFVEQHKHYLDEIIEQISEFSKRVILADANLDKVLSAYNKHRDKPIREQAENIIHLFTLTNLGAPAAFKYFDTTIDRKRYTSTKEVLDATLIHQSITGLYETRIDLSQLGGDGGGSSGSSGSSGSSGSSGGTLNIEDEYRLHETSKEPDVSLGSTWLSDFPQAWAETGGMGLAVRQAPLIIPLKATSTPVSIKQYPMSQEARLGIKPHIQRLLDQGILVPCQSPWNTPLLPVKKPGTNDYRPVQDLREVNKRVEDIHPTVPNPYNLLSGLPPSHQWYTVLDLKDAFFCLRLHPTSQPLFAFEWRDPEMGISGQLTWTRLPQGFKNSPTLFNEALHRDLADFRIQHPDLILLQYVDDLLLAATSELDCQQGTRALLQTLGNLGYRASAKKAQICQKQVKYLGYLLKEGQRWLTEARKETVMGQPTPKTPRQLREFLGKAGFCRLFIPGFAEMAAPLYPLTKPGTLFNWGPDQQKAYQEIKQALLTAPALGLPDLTKPFELFVDEKQGYAKGVLTQKLGPWRRPVAYLSKKLDPVAAGWPPCLRMVAAIAVLTKDAGKLTMGQPLVILAPHAVEALVKQPPDRWLSNARMTHYQALLLDTDRVQFGPVVALNPATLLPLPEEGLQHNCLDILAEAHGTRPDLTDQPLPDADHTWYTDGSSLLQEGQRKAGAAVTTETEVIWAKALPAGTSAQRAELIALTQALKMAEGKKLNVYTDSRYAFATAHIHGEIYRRRGWLTSEGKEIKNKDEILALLKALFLPKRLSIIHCPGHQKGHSAEARGNRMADQAARKAAITETPDTSTLLIENSSPSGGSKRTADGSEFEAGKRTADGSEFEKRTADGSEFESPKKKAKVE

SEQ ID NO: 2670 - protein, 2114 aa, synthetic construct
MPAAKRVKLDGGDKKYSIGLDIGTNSVGWAVITDEYKVPSKKFKVLGNTDRHSIKKNLIGALLFDSGETAEATRLKRTARRRYTRRKNRICYLQEIFSNEMAKVDDSFFHRLEESFLVEEDKKHERHPIFGNIVDEVAYHEKYPTIYHLRKKLVDSTDKADLRLIYLALAHMIKFRGHFLIEGDLNPDNSDVDKLFIQLVQTYNQLFEENPINASGVDAKAILSARLSKSRRLENLIAQLPGEKKNGLFGNLIALSLGLTPNFKSNFDLAEDAKLQLSKDTYDDDLDNLLAQIGDQYADLFLAAKNLSDAILLSDILRVNTEITKAPLSASMIKRYDEHHQDLTLLKALVRQQLPEKYKEIFFDQSKNGYAGYIDGGASQEEFYKFIKPILEKMDGTEELLVKLNREDLLRKQRTFDNGSIPHQIHLGELHAILRRQEDFYPFLKDNREKIEKILTFRIPYYVGPLARGNSRFAWMTRKSEETITPWNFEEVVDKGASAQSFIERMTNFDKNLPNEKVLPKHSLLYEYFTVYNELTKVKYVTEGMRKPAFLSGEQKKAIVDLLFKTNRKVTVKQLKEDYFKKIECFDSVEISGVEDRFNASLGTYHDLLKIIKDKDFLDNEENEDILEDIVLTLTLFEDREMIEERLKTYAHLFDDKVMKQLKRRRYTGWGRLSRKLINGIRDKQSGKTILDFLKSDGFANRNFMQLIHDDSLTFKEDIQKAQVSGQGDSLHEHIANLAGSPAIKKGILQTVKVVDELVKVMGRHKPENIVIEMARENQTTQKGQKNSRERMKRIEEGIKELGSQILKEHPVENTQLQNEKLYLYYLQNGRDMYVDQELDINRLSDYDVDHIVPQSFLKDDSIDNKVLTRSDKARGKSDNVPSEEVVKKMKNYWRQLLNAKLITQRKFDNLTKAERGGLSELDKAGFIKRQLVETRQITKHVAQILDSRMNTKYDENDKLIREVKVITLKSKLVSDFRKDFQFYKVREINNYHHAHDAYLNAVVGTALIKKYPKLESEFVYGDYKVYDVRKMIAKSEQEIGKATAKYFFYSNIMNFFKTEITLANGEIRKRPLIETNGETGEIVWDKGRDFATVRKVLSMPQVNIVKKTEVQTGGFSKESILPKRNSDKLIARKKDWDPKKYGGFDSPTVAYSVLVVAKVEKGKSKKLKSVKELLGITIMERSSFEKNPIDFLEAKGYKEVKKDLIIKLPKYSLFELENGRKRMLASAGELQKGNELALPSKYVNFLYLASHYEKLKGSPEDNEQKQLFVEQHKHYLDEIIEQISEFSKRVILADANLDKVLSAYNKHRDKPIREQAENIIHLFTLTNLGAPAAFKYFDTTIDRKRYTSTKEVLDATLIHQSITGLYETRIDLSQLGGDGGGGGGGSGSSGGTLNIEDEYRLHETSKEPDVSLGSTWLSDFPQAWAETGGMGLAVRQAPLIIPLKATSTPVSIKQYPMSQEARLGIKPHIQRLLDQGILVPCQSPWNTPLLPVKKPGTNDYRPVQDLREVNKRVEDIHPTVPNPYNLLSGLPPSHQWYTVLDLKDAFFCLRLHPTSQPLFAFEWRDPEMGISGQLTWTRLPQGFKNSPTLFNEALHRDLADFRIQHPDLILLQYVDDLLLAATSELDCQQGTRALLQTLGNLGYRASAKKAQICQKQVKYLGYLLKEGQRWLTEARKETVMGQPTPKTPRQLREFLGKAGFCRLFIPGFAEMAAPLYPLTKPGTLFNWGPDQQKAYQEIKQALLTAPALGLPDLTKPFELFVDEKQGYAKGVLTQKLGPWRRPVAYLSKKLDPVAAGWPPCLRMVAAIAVLTKDAGKLTMGQPLVILAPHAVEALVKQPPDRWLSNARMTHYQALLLDTDRVQFGPVVALNPATLLPLPEEGLQHNCLDILAEAHGTRPDLTDQPLPDADHTWYTDGSSLLQEGQRKAGAAVTTETEVIWAKALPAGTSAQRAELIALTQALKMAEGKKLNVYTDSRYAFATAHIHGEIYRRRGWLTSEGKEIKNKDEILALLKALFLPKRLSIIHCPGHQKGHSAEARGNRMADQAARKAAITETPDTSTLLIENSSPSGGSKRTADGSEFEAGKRTADGSEFEKRTADGSEFESPKKKAKVE

SEQ ID NO: 2671 - protein, 2111 aa, synthetic construct
MPAAKRVKLDGGDKKYSIGLDIGTNSVGWAVITDEYKVPSKKFKVLGNTDRHSIKKNLIGALLFDSGETAEATRLKRTARRRYTRRKNRICYLQEIFSNEMAKVDDSFFHRLEESFLVEEDKKHERHPIFGNIVDEVAYHEKYPTIYHLRKKLVDSTDKADLRLIYLALAHMIKFRGHFLIEGDLNPDNSDVDKLFIQLVQTYNQLFEENPINASGVDAKAILSARLSKSRRLENLIAQLPGEKKNGLFGNLIALSLGLTPNFKSNFDLAEDAKLQLSKDTYDDDLDNLLAQIGDQYADLFLAAKNLSDAILLSDILRVNTEITKAPLSASMIKRYDEHHQDLTLLKALVRQQLPEKYKEIFFDQSKNGYAGYIDGGASQEEFYKFIKPILEKMDGTEELLVKLNREDLLRKQRTFDNGSIPHQIHLGELHAILRRQEDFYPFLKDNREKIEKILTFRIPYYVGPLARGNSRFAWMTRKSEETITPWNFEEVVDKGASAQSFIERMTNFDKNLPNEKVLPKHSLLYEYFTVYNELTKVKYVTEGMRKPAFLSGEQKKAIVDLLFKTNRKVTVKQLKEDYFKKIECFDSVEISGVEDRFNASLGTYHDLLKIIKDKDFLDNEENEDILEDIVLTLTLFEDREMIEERLKTYAHLFDDKVMKQLKRRRYTGWGRLSRKLINGIRDKQSGKTILDFLKSDGFANRNFMQLIHDDSLTFKEDIQKAQVSGQGDSLHEHIANLAGSPAIKKGILQTVKVVDELVKVMGRHKPENIVIEMARENQTTQKGQKNSRERMKRIEEGIKELGSQILKEHPVENTQLQNEKLYLYYLQNGRDMYVDQELDINRLSDYDVDHIVPQSFLKDDSIDNKVLTRSDKARGKSDNVPSEEVVKKMKNYWRQLLNAKLITQRKFDNLTKAERGGLSELDKAGFIKRQLVETRQITKHVAQILDSRMNTKYDENDKLIREVKVITLKSKLVSDFRKDFQFYKVREINNYHHAHDAYLNAVVGTALIKKYPKLESEFVYGDYKVYDVRKMIAKSEQEIGKATAKYFFYSNIMNFFKTEITLANGEIRKRPLIETNGETGEIVWDKGRDFATVRKVLSMPQVNIVKKTEVQTGGFSKESILPKRNSDKLIARKKDWDPKKYGGFDSPTVAYSVLVVAKVEKGKSKKLKSVKELLGITIMERSSFEKNPIDFLEAKGYKEVKKDLIIKLPKYSLFELENGRKRMLASAGELQKGNELALPSKYVNFLYLASHYEKLKGSPEDNEQKQLFVEQHKHYLDEIIEQISEFSKRVILADANLDKVLSAYNKHRDKPIREQAENIIHLFTLTNLGAPAAFKYFDTTIDRKRYTSTKEVLDATLIHQSITGLYETRIDLSQLGGDGGGGSPAPGGTLNIEDEYRLHETSKEPDVSLGSTWLSDFPQAWAETGGMGLAVRQAPLIIPLKATSTPVSIKQYPMSQEARLGIKPHIQRLLDQGILVPCQSPWNTPLLPVKKPGTNDYRPVQDLREVNKRVEDIHPTVPNPYNLLSGLPPSHQWYTVLDLKDAFFCLRLHPTSQPLFAFEWRDPEMGISGQLTWTRLPQGFKNSPTLFNEALHRDLADFRIQHPDLILLQYVDDLLLAATSELDCQQGTRALLQTLGNLGYRASAKKAQICQKQVKYLGYLLKEGQRWLTEARKETVMGQPTPKTPRQLREFLGKAGFCRLFIPGFAEMAAPLYPLTKPGTLFNWGPDQQKAYQEIKQALLTAPALGLPDLTKPFELFVDEKQGYAKGVLTQKLGPWRRPVAYLSKKLDPVAAGWPPCLRMVAAIAVLTKDAGKLTMGQPLVILAPHAVEALVKQPPDRWLSNARMTHYQALLLDTDRVQFGPVVALNPATLLPLPEEGLQHNCLDILAEAHGTRPDLTDQPLPDADHTWYTDGSSLLQEGQRKAGAAVTTETEVIWAKALPAGTSAQRAELIALTQALKMAEGKKLNVYTDSRYAFATAHIHGEIYRRRGWLTSEGKEIKNKDEILALLKALFLPKRLSIIHCPGHQKGHSAEARGNRMADQAARKAAITETPDTSTLLIENSSPSGGSKRTADGSEFEAGKRTADGSEFEKRTADGSEFESPKKKAKVE

SEQ ID NO: 2672 - protein, 2111 aa, synthetic construct
MPAAKRVKLDGGDKKYSIGLDIGTNSVGWAVITDEYKVPSKKFKVLGNTDRHSIKKNLIGALLFDSGETAEATRLKRTARRRYTRRKNRICYLQEIFSNEMAKVDDSFFHRLEESFLVEEDKKHERHPIFGNIVDEVAYHEKYPTIYHLRKKLVDSTDKADLRLIYLALAHMIKFRGHFLIEGDLNPDNSDVDKLFIQLVQTYNQLFEENPINASGVDAKAILSARLSKSRRLENLIAQLPGEKKNGLFGNLIALSLGLTPNFKSNFDLAEDAKLQLSKDTYDDDLDNLLAQIGDQYADLFLAAKNLSDAILLSDILRVNTEITKAPLSASMIKRYDEHHQDLTLLKALVRQQLPEKYKEIFFDQSKNGYAGYIDGGASQEEFYKFIKPILEKMDGTEELLVKLNREDLLRKQRTFDNGSIPHQIHLGELHAILRRQEDFYPFLKDNREKIEKILTFRIPYYVGPLARGNSRFAWMTRKSEETITPWNFEEVVDKGASAQSFIERMTNFDKNLPNEKVLPKHSLLYEYFTVYNELTKVKYVTEGMRKPAFLSGEQKKAIVDLLFKTNRKVTVKQLKEDYFKKIECFDSVEISGVEDRFNASLGTYHDLLKIIKDKDFLDNEENEDILEDIVLTLTLFEDREMIEERLKTYAHLFDDKVMKQLKRRRYTGWGRLSRKLINGIRDKQSGKTILDFLKSDGFANRNFMQLIHDDSLTFKEDIQKAQVSGQGDSLHEHIANLAGSPAIKKGILQTVKVVDELVKVMGRHKPENIVIEMARENQTTQKGQKNSRERMKRIEEGIKELGSQILKEHPVENTQLQNEKLYLYYLQNGRDMYVDQELDINRLSDYDVDHIVPQSFLKDDSIDNKVLTRSDKARGKSDNVPSEEVVKKMKNYWRQLLNAKLITQRKFDNLTKAERGGLSELDKAGFIKRQLVETRQITKHVAQILDSRMNTKYDENDKLIREVKVITLKSKLVSDFRKDFQFYKVREINNYHHAHDAYLNAVVGTALIKKYPKLESEFVYGDYKVYDVRKMIAKSEQEIGKATAKYFFYSNIMNFFKTEITLANGEIRKRPLIETNGETGEIVWDKGRDFATVRKVLSMPQVNIVKKTEVQTGGFSKESILPKRNSDKLIARKKDWDPKKYGGFDSPTVAYSVLVVAKVEKGKSKKLKSVKELLGITIMERSSFEKNPIDFLEAKGYKEVKKDLIIKLPKYSLFELENGRKRMLASAGELQKGNELALPSKYVNFLYLASHYEKLKGSPEDNEQKQLFVEQHKHYLDEIIEQISEFSKRVILADANLDKVLSAYNKHRDKPIREQAENIIHLFTLTNLGAPAAFKYFDTTIDRKRYTSTKEVLDATLIHQSITGLYETRIDLSQLGGDGGGGGPAPGGTLNIEDEYRLHETSKEPDVSLGSTWLSDFPQAWAETGGMGLAVRQAPLIIPLKATSTPVSIKQYPMSQEARLGIKPHIQRLLDQGILVPCQSPWNTPLLPVKKPGTNDYRPVQDLREVNKRVEDIHPTVPNPYNLLSGLPPSHQWYTVLDLKDAFFCLRLHPTSQPLFAFEWRDPEMGISGQLTWTRLPQGFKNSPTLFNEALHRDLADFRIQHPDLILLQYVDDLLLAATSELDCQQGTRALLQTLGNLGYRASAKKAQICQKQVKYLGYLLKEGQRWLTEARKETVMGQPTPKTPRQLREFLGKAGFCRLFIPGFAEMAAPLYPLTKPGTLFNWGPDQQKAYQEIKQALLTAPALGLPDLTKPFELFVDEKQGYAKGVLTQKLGPWRRPVAYLSKKLDPVAAGWPPCLRMVAAIAVLTKDAGKLTMGQPLVILAPHAVEALVKQPPDRWLSNARMTHYQALLLDTDRVQFGPVVALNPATLLPLPEEGLQHNCLDILAEAHGTRPDLTDQPLPDADHTWYTDGSSLLQEGQRKAGAAVTTETEVIWAKALPAGTSAQRAELIALTQALKMAEGKKLNVYTDSRYAFATAHIHGEIYRRRGWLTSEGKEIKNKDEILALLKALFLPKRLSIIHCPGHQKGHSAEARGNRMADQAARKAAITETPDTSTLLIENSSPSGGSKRTADGSEFEAGKRTADGSEFEKRTADGSEFESPKKKAKVE

SEQ ID NO: 2673 - protein, 2116 aa, synthetic construct
MPAAKRVKLDGGDKKYSIGLDIGTNSVGWAVITDEYKVPSKKFKVLGNTDRHSIKKNLIGALLFDSGETAEATRLKRTARRRYTRRKNRICYLQEIFSNEMAKVDDSFFHRLEESFLVEEDKKHERHPIFGNIVDEVAYHEKYPTIYHLRKKLVDSTDKADLRLIYLALAHMIKFRGHFLIEGDLNPDNSDVDKLFIQLVQTYNQLFEENPINASGVDAKAILSARLSKSRRLENLIAQLPGEKKNGLFGNLIALSLGLTPNFKSNFDLAEDAKLQLSKDTYDDDLDNLLAQIGDQYADLFLAAKNLSDAILLSDILRVNTEITKAPLSASMIKRYDEHHQDLTLLKALVRQQLPEKYKEIFFDQSKNGYAGYIDGGASQEEFYKFIKPILEKMDGTEELLVKLNREDLLRKQRTFDNGSIPHQIHLGELHAILRRQEDFYPFLKDNREKIEKILTFRIPYYVGPLARGNSRFAWMTRKSEETITPWNFEEVVDKGASAQSFIERMTNFDKNLPNEKVLPKHSLLYEYFTVYNELTKVKYVTEGMRKPAFLSGEQKKAIVDLLFKTNRKVTVKQLKEDYFKKIECFDSVEISGVEDRFNASLGTYHDLLKIIKDKDFLDNEENEDILEDIVLTLTLFEDREMIEERLKTYAHLFDDKVMKQLKRRRYTGWGRLSRKLINGIRDKQSGKTILDFLKSDGFANRNFMQLIHDDSLTFKEDIQKAQVSGQGDSLHEHIANLAGSPAIKKGILQTVKVVDELVKVMGRHKPENIVIEMARENQTTQKGQKNSRERMKRIEEGIKELGSQILKEHPVENTQLQNEKLYLYYLQNGRDMYVDQELDINRLSDYDVDHIVPQSFLKDDSIDNKVLTRSDKARGKSDNVPSEEVVKKMKNYWRQLLNAKLITQRKFDNLTKAERGGLSELDKAGFIKRQLVETRQITKHVAQILDSRMNTKYDENDKLIREVKVITLKSKLVSDFRKDFQFYKVREINNYHHAHDAYLNAVVGTALIKKYPKLESEFVYGDYKVYDVRKMIAKSEQEIGKATAKYFFYSNIMNFFKTEITLANGEIRKRPLIETNGETGEIVWDKGRDFATVRKVLSMPQVNIVKKTEVQTGGFSKESILPKRNSDKLIARKKDWDPKKYGGFDSPTVAYSVLVVAKVEKGKSKKLKSVKELLGITIMERSSFEKNPIDFLEAKGYKEVKKDLIIKLPKYSLFELENGRKRMLASAGELQKGNELALPSKYVNFLYLASHYEKLKGSPEDNEQKQLFVEQHKHYLDEIIEQISEFSKRVILADANLDKVLSAYNKHRDKPIREQAENIIHLFTLTNLGAPAAFKYFDTTIDRKRYTSTKEVLDATLIHQSITGLYETRIDLSQLGGDGGGGSEAAAKGSSGGTLNIEDEYRLHETSKEPDVSLGSTWLSDFPQAWAETGGMGLAVRQAPLIIPLKATSTPVSIKQYPMSQEARLGIKPHIQRLLDQGILVPCQSPWNTPLLPVKKPGTNDYRPVQDLREVNKRVEDIHPTVPNPYNLLSGLPPSHQWYTVLDLKDAFFCLRLHPTSQPLFAFEWRDPEMGISGQLTWTRLPQGFKNSPTLFNEALHRDLADFRIQHPDLILLQYVDDLLLAATSELDCQQGTRALLQTLGNLGYRASAKKAQICQKQVKYLGYLLKEGQRWLTEARKETVMGQPTPKTPRQLREFLGKAGFCRLFIPGFAEMAAPLYPLTKPGTLFNWGPDQQKAYQEIKQALLTAPALGLPDLTKPFELFVDEKQGYAKGVLTQKLGPWRRPVAYLSKKLDPVAAGWPPCLRMVAAIAVLTKDAGKLTMGQPLVILAPHAVEALVKQPPDRWLSNARMTHYQALLLDTDRVQFGPVVALNPATLLPLPEEGLQHNCLDILAEAHGTRPDLTDQPLPDADHTWYTDGSSLLQEGQRKAGAAVTTETEVIWAKALPAGTSAQRAELIALTQALKMAEGKKLNVYTDSRYAFATAHIHGEIYRRRGWLTSEGKEIKNKDEILALLKALFLPKRLSIIHCPGHQKGHSAEARGNRMADQAARKAAITETPDTSTLLIENSSPSGGSKRTADGSEFEAGKRTADGSEFEKRTADGSEFESPKKKAKVE

SEQ ID NO: 2674 - protein, 2116 aa, synthetic construct
MPAAKRVKLDGGDKKYSIGLDIGTNSVGWAVITDEYKVPSKKFKVLGNTDRHSIKKNLIGALLFDSGETAEATRLKRTARRRYTRRKNRICYLQEIFSNEMAKVDDSFFHRLEESFLVEEDKKHERHPIFGNIVDEVAYHEKYPTIYHLRKKLVDSTDKADLRLIYLALAHMIKFRGHFLIEGDLNPDNSDVDKLFIQLVQTYNQLFEENPINASGVDAKAILSARLSKSRRLENLIAQLPGEKKNGLFGNLIALSLGLTPNFKSNFDLAEDAKLQLSKDTYDDDLDNLLAQIGDQYADLFLAAKNLSDAILLSDILRVNTEITKAPLSASMIKRYDEHHQDLTLLKALVRQQLPEKYKEIFFDQSKNGYAGYIDGGASQEEFYKFIKPILEKMDGTEELLVKLNREDLLRKQRTFDNGSIPHQIHLGELHAILRRQEDFYPFLKDNREKIEKILTFRIPYYVGPLARGNSRFAWMTRKSEETITPWNFEEVVDKGASAQSFIERMTNFDKNLPNEKVLPKHSLLYEYFTVYNELTKVKYVTEGMRKPAFLSGEQKKAIVDLLFKTNRKVTVKQLKEDYFKKIECFDSVEISGVEDRFNASLGTYHDLLKIIKDKDFLDNEENEDILEDIVLTLTLFEDREMIEERLKTYAHLFDDKVMKQLKRRRYTGWGRLSRKLINGIRDKQSGKTILDFLKSDGFANRNFMQLIHDDSLTFKEDIQKAQVSGQGDSLHEHIANLAGSPAIKKGILQTVKVVDELVKVMGRHKPENIVIEMARENQTTQKGQKNSRERMKRIEEGIKELGSQILKEHPVENTQLQNEKLYLYYLQNGRDMYVDQELDINRLSDYDVDHIVPQSFLKDDSIDNKVLTRSDKARGKSDNVPSEEVVKKMKNYWRQLLNAKLITQRKFDNLTKAERGGLSELDKAGFIKRQLVETRQITKHVAQILDSRMNTKYDENDKLIREVKVITLKSKLVSDFRKDFQFYKVREINNYHHAHDAYLNAVVGTALIKKYPKLESEFVYGDYKVYDVRKMIAKSEQEIGKATAKYFFYSNIMNFFKTEITLANGEIRKRPLIETNGETGEIVWDKGRDFATVRKVLSMPQVNIVKKTEVQTGGFSKESILPKRNSDKLIARKKDWDPKKYGGFDSPTVAYSVLVVAKVEKGKSKKLKSVKELLGITIMERSSFEKNPIDFLEAKGYKEVKKDLIIKLPKYSLFELENGRKRMLASAGELQKGNELALPSKYVNFLYLASHYEKLKGSPEDNEQKQLFVEQHKHYLDEIIEQISEFSKRVILADANLDKVLSAYNKHRDKPIREQAENIIHLFTLTNLGAPAAFKYFDTTIDRKRYTSTKEVLDATLIHQSITGLYETRIDLSQLGGDGGEAAAKPAPGGSGGTLNIEDEYRLHETSKEPDVSLGSTWLSDFPQAWAETGGMGLAVRQAPLIIPLKATSTPVSIKQYPMSQEARLGIKPHIQRLLDQGILVPCQSPWNTPLLPVKKPGTNDYRPVQDLREVNKRVEDIHPTVPNPYNLLSGLPPSHQWYTVLDLKDAFFCLRLHPTSQPLFAFEWRDPEMGISGQLTWTRLPQGFKNSPTLFNEALHRDLADFRIQHPDLILLQYVDDLLLAATSELDCQQGTRALLQTLGNLGYRASAKKAQICQKQVKYLGYLLKEGQRWLTEARKETVMGQPTPKTPRQLREFLGKAGFCRLFIPGFAEMAAPLYPLTKPGTLFNWGPDQQKAYQEIKQALLTAPALGLPDLTKPFELFVDEKQGYAKGVLTQKLGPWRRPVAYLSKKLDPVAAGWPPCLRMVAAIAVLTKDAGKLTMGQPLVILAPHAVEALVKQPPDRWLSNARMTHYQALLLDTDRVQFGPVVALNPATLLPLPEEGLQHNCLDILAEAHGTRPDLTDQPLPDADHTWYTDGSSLLQEGQRKAGAAVTTETEVIWAKALPAGTSAQRAELIALTQALKMAEGKKLNVYTDSRYAFATAHIHGEIYRRRGWLTSEGKEIKNKDEILALLKALFLPKRLSIIHCPGHQKGHSAEARGNRMADQAARKAAITETPDTSTLLIENSSPSGGSKRTADGSEFEAGKRTADGSEFEKRTADGSEFESPKKKAKVE

SEQ ID NO: 2675 - protein, 2114 aa, synthetic construct
MPAAKRVKLDGGDKKYSIGLDIGTNSVGWAVITDEYKVPSKKFKVLGNTDRHSIKKNLIGALLFDSGETAEATRLKRTARRRYTRRKNRICYLQEIFSNEMAKVDDSFFHRLEESFLVEEDKKHERHPIFGNIVDEVAYHEKYPTIYHLRKKLVDSTDKADLRLIYLALAHMIKFRGHFLIEGDLNPDNSDVDKLFIQLVQTYNQLFEENPINASGVDAKAILSARLSKSRRLENLIAQLPGEKKNGLFGNLIALSLGLTPNFKSNFDLAEDAKLQLSKDTYDDDLDNLLAQIGDQYADLFLAAKNLSDAILLSDILRVNTEITKAPLSASMIKRYDEHHQDLTLLKALVRQQLPEKYKEIFFDQSKNGYAGYIDGGASQEEFYKFIKPILEKMDGTEELLVKLNREDLLRKQRTFDNGSIPHQIHLGELHAILRRQEDFYPFLKDNREKIEKILTFRIPYYVGPLARGNSRFAWMTRKSEETITPWNFEEVVDKGASAQSFIERMTNFDKNLPNEKVLPKHSLLYEYFTVYNELTKVKYVTEGMRKPAFLSGEQKKAIVDLLFKTNRKVTVKQLKEDYFKKIECFDSVEISGVEDRFNASLGTYHDLLKIIKDKDFLDNEENEDILEDIVLTLTLFEDREMIEERLKTYAHLFDDKVMKQLKRRRYTGWGRLSRKLINGIRDKQSGKTILDFLKSDGFANRNFMQLIHDDSLTFKEDIQKAQVSGQGDSLHEHIANLAGSPAIKKGILQTVKVVDELVKVMGRHKPENIVIEMARENQTTQKGQKNSRERMKRIEEGIKELGSQILKEHPVENTQLQNEKLYLYYLQNGRDMYVDQELDINRLSDYDVDHIVPQSFLKDDSIDNKVLTRSDKARGKSDNVPSEEVVKKMKNYWRQLLNAKLITQRKFDNLTKAERGGLSELDKAGFIKRQLVETRQITKHVAQILDSRMNTKYDENDKLIREVKVITLKSKLVSDFRKDFQFYKVREINNYHHAHDAYLNAVVGTALIKKYPKLESEFVYGDYKVYDVRKMIAKSEQEIGKATAKYFFYSNIMNFFKTEITLANGEIRKRPLIETNGETGEIVWDKGRDFATVRKVLSMPQVNIVKKTEVQTGGFSKESILPKRNSDKLIARKKDWDPKKYGGFDSPTVAYSVLVVAKVEKGKSKKLKSVKELLGITIMERSSFEKNPIDFLEAKGYKEVKKDLIIKLPKYSLFELENGRKRMLASAGELQKGNELALPSKYVNFLYLASHYEKLKGSPEDNEQKQLFVEQHKHYLDEIIEQISEFSKRVILADANLDKVLSAYNKHRDKPIREQAENIIHLFTLTNLGAPAAFKYFDTTIDRKRYTSTKEVLDATLIHQSITGLYETRIDLSQLGGDGGGGSGSSGGGGGTLNIEDEYRLHETSKEPDVSLGSTWLSDFPQAWAETGGMGLAVRQAPLIIPLKATSTPVSIKQYPMSQEARLGIKPHIQRLLDQGILVPCQSPWNTPLLPVKKPGTNDYRPVQDLREVNKRVEDIHPTVPNPYNLLSGLPPSHQWYTVLDLKDAFFCLRLHPTSQPLFAFEWRDPEMGISGQLTWTRLPQGFKNSPTLFNEALHRDLADFRIQHPDLILLQYVDDLLLAATSELDCQQGTRALLQTLGNLGYRASAKKAQICQKQVKYLGYLLKEGQRWLTEARKETVMGQPTPKTPRQLREFLGKAGFCRLFIPGFAEMAAPLYPLTKPGTLFNWGPDQQKAYQEIKQALLTAPALGLPDLTKPFELFVDEKQGYAKGVLTQKLGPWRRPVAYLSKKLDPVAAGWPPCLRMVAAIAVLTKDAGKLTMGQPLVILAPHAVEALVKQPPDRWLSNARMTHYQALLLDTDRVQFGPVVALNPATLLPLPEEGLQHNCLDILAEAHGTRPDLTDQPLPDADHTWYTDGSSLLQEGQRKAGAAVTTETEVIWAKALPAGTSAQRAELIALTQALKMAEGKKLNVYTDSRYAFATAHIHGEIYRRRGWLTSEGKEIKNKDEILALLKALFLPKRLSIIHCPGHQKGHSAEARGNRMADQAARKAAITETPDTSTLLIENSSPSGGSKRTADGSEFEAGKRTADGSEFEKRTADGSEFESPKKKAKVE

SEQ ID NO: 2676 - protein, 2111 aa, synthetic construct
MPAAKRVKLDGGDKKYSIGLDIGTNSVGWAVITDEYKVPSKKFKVLGNTDRHSIKKNLIGALLFDSGETAEATRLKRTARRRYTRRKNRICYLQEIFSNEMAKVDDSFFHRLEESFLVEEDKKHERHPIFGNIVDEVAYHEKYPTIYHLRKKLVDSTDKADLRLIYLALAHMIKFRGHFLIEGDLNPDNSDVDKLFIQLVQTYNQLFEENPINASGVDAKAILSARLSKSRRLENLIAQLPGEKKNGLFGNLIALSLGLTPNFKSNFDLAEDAKLQLSKDTYDDDLDNLLAQIGDQYADLFLAAKNLSDAILLSDILRVNTEITKAPLSASMIKRYDEHHQDLTLLKALVRQQLPEKYKEIFFDQSKNGYAGYIDGGASQEEFYKFIKPILEKMDGTEELLVKLNREDLLRKQRTFDNGSIPHQIHLGELHAILRRQEDFYPFLKDNREKIEKILTFRIPYYVGPLARGNSRFAWMTRKSEETITPWNFEEVVDKGASAQSFIERMTNFDKNLPNEKVLPKHSLLYEYFTVYNELTKVKYVTEGMRKPAFLSGEQKKAIVDLLFKTNRKVTVKQLKEDYFKKIECFDSVEISGVEDRFNASLGTYHDLLKIIKDKDFLDNEENEDILEDIVLTLTLFEDREMIEERLKTYAHLFDDKVMKQLKRRRYTGWGRLSRKLINGIRDKQSGKTILDFLKSDGFANRNFMQLIHDDSLTFKEDIQKAQVSGQGDSLHEHIANLAGSPAIKKGILQTVKVVDELVKVMGRHKPENIVIEMARENQTTQKGQKNSRERMKRIEEGIKELGSQILKEHPVENTQLQNEKLYLYYLQNGRDMYVDQELDINRLSDYDVDHIVPQSFLKDDSIDNKVLTRSDKARGKSDNVPSEEVVKKMKNYWRQLLNAKLITQRKFDNLTKAERGGLSELDKAGFIKRQLVETRQITKHVAQILDSRMNTKYDENDKLIREVKVITLKSKLVSDFRKDFQFYKVREINNYHHAHDAYLNAVVGTALIKKYPKLESEFVYGDYKVYDVRKMIAKSEQEIGKATAKYFFYSNIMNFFKTEITLANGEIRKRPLIETNGETGEIVWDKGRDFATVRKVLSMPQVNIVKKTEVQTGGFSKESILPKRNSDKLIARKKDWDPKKYGGFDSPTVAYSVLVVAKVEKGKSKKLKSVKELLGITIMERSSFEKNPIDFLEAKGYKEVKKDLIIKLPKYSLFELENGRKRMLASAGELQKGNELALPSKYVNFLYLASHYEKLKGSPEDNEQKQLFVEQHKHYLDEIIEQISEFSKRVILADANLDKVLSAYNKHRDKPIREQAENIIHLFTLTNLGAPAAFKYFDTTIDRKRYTSTKEVLDATLIHQSITGLYETRIDLSQLGGDGGGSSGGGGGTLNIEDEYRLHETSKEPDVSLGSTWLSDFPQAWAETGGMGLAVRQAPLIIPLKATSTPVSIKQYPMSQEARLGIKPHIQRLLDQGILVPCQSPWNTPLLPVKKPGTNDYRPVQDLREVNKRVEDIHPTVPNPYNLLSGLPPSHQWYTVLDLKDAFFCLRLHPTSQPLFAFEWRDPEMGISGQLTWTRLPQGFKNSPTLFNEALHRDLADFRIQHPDLILLQYVDDLLLAATSELDCQQGTRALLQTLGNLGYRASAKKAQICQKQVKYLGYLLKEGQRWLTEARKETVMGQPTPKTPRQLREFLGKAGFCRLFIPGFAEMAAPLYPLTKPGTLFNWGPDQQKAYQEIKQALLTAPALGLPDLTKPFELFVDEKQGYAKGVLTQKLGPWRRPVAYLSKKLDPVAAGWPPCLRMVAAIAVLTKDAGKLTMGQPLVILAPHAVEALVKQPPDRWLSNARMTHYQALLLDTDRVQFGPVVALNPATLLPLPEEGLQHNCLDILAEAHGTRPDLTDQPLPDADHTWYTDGSSLLQEGQRKAGAAVTTETEVIWAKALPAGTSAQRAELIALTQALKMAEGKKLNVYTDSRYAFATAHIHGEIYRRRGWLTSEGKEIKNKDEILALLKALFLPKRLSIIHCPGHQKGHSAEARGNRMADQAARKAAITETPDTSTLLIENSSPSGGSKRTADGSEFEAGKRTADGSEFEKRTADGSEFESPKKKAKVE

SEQ ID NO: 2677 - protein, 2116 aa, synthetic construct
MPAAKRVKLDGGDKKYSIGLDIGTNSVGWAVITDEYKVPSKKFKVLGNTDRHSIKKNLIGALLFDSGETAEATRLKRTARRRYTRRKNRICYLQEIFSNEMAKVDDSFFHRLEESFLVEEDKKHERHPIFGNIVDEVAYHEKYPTIYHLRKKLVDSTDKADLRLIYLALAHMIKFRGHFLIEGDLNPDNSDVDKLFIQLVQTYNQLFEENPINASGVDAKAILSARLSKSRRLENLIAQLPGEKKNGLFGNLIALSLGLTPNFKSNFDLAEDAKLQLSKDTYDDDLDNLLAQIGDQYADLFLAAKNLSDAILLSDILRVNTEITKAPLSASMIKRYDEHHQDLTLLKALVRQQLPEKYKEIFFDQSKNGYAGYIDGGASQEEFYKFIKPILEKMDGTEELLVKLNREDLLRKQRTFDNGSIPHQIHLGELHAILRRQEDFYPFLKDNREKIEKILTFRIPYYVGPLARGNSRFAWMTRKSEETITPWNFEEVVDKGASAQSFIERMTNFDKNLPNEKVLPKHSLLYEYFTVYNELTKVKYVTEGMRKPAFLSGEQKKAIVDLLFKTNRKVTVKQLKEDYFKKIECFDSVEISGVEDRFNASLGTYHDLLKIIKDKDFLDNEENEDILEDIVLTLTLFEDREMIEERLKTYAHLFDDKVMKQLKRRRYTGWGRLSRKLINGIRDKQSGKTILDFLKSDGFANRNFMQLIHDDSLTFKEDIQKAQVSGQGDSLHEHIANLAGSPAIKKGILQTVKVVDELVKVMGRHKPENIVIEMARENQTTQKGQKNSRERMKRIEEGIKELGSQILKEHPVENTQLQNEKLYLYYLQNGRDMYVDQELDINRLSDYDVDHIVPQSFLKDDSIDNKVLTRSDKARGKSDNVPSEEVVKKMKNYWRQLLNAKLITQRKFDNLTKAERGGLSELDKAGFIKRQLVETRQITKHVAQILDSRMNTKYDENDKLIREVKVITLKSKLVSDFRKDFQFYKVREINNYHHAHDAYLNAVVGTALIKKYPKLESEFVYGDYKVYDVRKMIAKSEQEIGKATAKYFFYSNIMNFFKTEITLANGEIRKRPLIETNGETGEIVWDKGRDFATVRKVLSMPQVNIVKKTEVQTGGFSKESILPKRNSDKLIARKKDWDPKKYGGFDSPTVAYSVLVVAKVEKGKSKKLKSVKELLGITIMERSSFEKNPIDFLEAKGYKEVKKDLIIKLPKYSLFELENGRKRMLASAGELQKGNELALPSKYVNFLYLASHYEKLKGSPEDNEQKQLFVEQHKHYLDEIIEQISEFSKRVILADANLDKVLSAYNKHRDKPIREQAENIIHLFTLTNLGAPAAFKYFDTTIDRKRYTSTKEVLDATLIHQSITGLYETRIDLSQLGGDGGGGGEAAAKGSSGGTLNIEDEYRLHETSKEPDVSLGSTWLSDFPQAWAETGGMGLAVRQAPLIIPLKATSTPVSIKQYPMSQEARLGIKPHIQRLLDQGILVPCQSPWNTPLLPVKKPGTNDYRPVQDLREVNKRVEDIHPTVPNPYNLLSGLPPSHQWYTVLDLKDAFFCLRLHPTSQPLFAFEWRDPEMGISGQLTWTRLPQGFKNSPTLFNEALHRDLADFRIQHPDLILLQYVDDLLLAATSELDCQQGTRALLQTLGNLGYRASAKKAQICQKQVKYLGYLLKEGQRWLTEARKETVMGQPTPKTPRQLREFLGKAGFCRLFIPGFAEMAAPLYPLTKPGTLFNWGPDQQKAYQEIKQALLTAPALGLPDLTKPFELFVDEKQGYAKGVLTQKLGPWRRPVAYLSKKLDPVAAGWPPCLRMVAAIAVLTKDAGKLTMGQPLVILAPHAVEALVKQPPDRWLSNARMTHYQALLLDTDRVQFGPVVALNPATLLPLPEEGLQHNCLDILAEAHGTRPDLTDQPLPDADHTWYTDGSSLLQEGQRKAGAAVTTETEVIWAKALPAGTSAQRAELIALTQALKMAEGKKLNVYTDSRYAFATAHIHGEIYRRRGWLTSEGKEIKNKDEILALLKALFLPKRLSIIHCPGHQKGHSAEARGNRMADQAARKAAITETPDTSTLLIENSSPSGGSKRTADGSEFEAGKRTADGSEFEKRTADGSEFESPKKKAKVE

SEQ ID NO: 2678 - protein, 2130 aa, synthetic construct
MPAAKRVKLDGGDKKYSIGLDIGTNSVGWAVITDEYKVPSKKFKVLGNTDRHSIKKNLIGALLFDSGETAEATRLKRTARRRYTRRKNRICYLQEIFSNEMAKVDDSFFHRLEESFLVEEDKKHERHPIFGNIVDEVAYHEKYPTIYHLRKKLVDSTDKADLRLIYLALAHMIKFRGHFLIEGDLNPDNSDVDKLFIQLVQTYNQLFEENPINASGVDAKAILSARLSKSRRLENLIAQLPGEKKNGLFGNLIALSLGLTPNFKSNFDLAEDAKLQLSKDTYDDDLDNLLAQIGDQYADLFLAAKNLSDAILLSDILRVNTEITKAPLSASMIKRYDEHHQDLTLLKALVRQQLPEKYKEIFFDQSKNGYAGYIDGGASQEEFYKFIKPILEKMDGTEELLVKLNREDLLRKQRTFDNGSIPHQIHLGELHAILRRQEDFYPFLKDNREKIEKILTFRIPYYVGPLARGNSRFAWMTRKSEETITPWNFEEVVDKGASAQSFIERMTNFDKNLPNEKVLPKHSLLYEYFTVYNELTKVKYVTEGMRKPAFLSGEQKKAIVDLLFKTNRKVTVKQLKEDYFKKIECFDSVEISGVEDRFNASLGTYHDLLKIIKDKDFLDNEENEDILEDIVLTLTLFEDREMIEERLKTYAHLFDDKVMKQLKRRRYTGWGRLSRKLINGIRDKQSGKTILDFLKSDGFANRNFMQLIHDDSLTFKEDIQKAQVSGQGDSLHEHIANLAGSPAIKKGILQTVKVVDELVKVMGRHKPENIVIEMARENQTTQKGQKNSRERMKRIEEGIKELGSQILKEHPVENTQLQNEKLYLYYLQNGRDMYVDQELDINRLSDYDVDHIVPQSFLKDDSIDNKVLTRSDKARGKSDNVPSEEVVKKMKNYWRQLLNAKLITQRKFDNLTKAERGGLSELDKAGFIKRQLVETRQITKHVAQILDSRMNTKYDENDKLIREVKVITLKSKLVSDFRKDFQFYKVREINNYHHAHDAYLNAVVGTALIKKYPKLESEFVYGDYKVYDVRKMIAKSEQEIGKATAKYFFYSNIMNFFKTEITLANGEIRKRPLIETNGETGEIVWDKGRDFATVRKVLSMPQVNIVKKTEVQTGGFSKESILPKRNSDKLIARKKDWDPKKYGGFDSPTVAYSVLVVAKVEKGKSKKLKSVKELLGITIMERSSFEKNPIDFLEAKGYKEVKKDLIIKLPKYSLFELENGRKRMLASAGELQKGNELALPSKYVNFLYLASHYEKLKGSPEDNEQKQLFVEQHKHYLDEIIEQISEFSKRVILADANLDKVLSAYNKHRDKPIREQAENIIHLFTLTNLGAPAAFKYFDTTIDRKRYTSTKEVLDATLIHQSITGLYETRIDLSQLGGDGGEAAAKEAAAKEAAAKEAAAKEAAAKGGTLNIEDEYRLHETSKEPDVSLGSTWLSDFPQAWAETGGMGLAVRQAPLIIPLKATSTPVSIKQYPMSQEARLGIKPHIQRLLDQGILVPCQSPWNTPLLPVKKPGTNDYRPVQDLREVNKRVEDIHPTVPNPYNLLSGLPPSHQWYTVLDLKDAFFCLRLHPTSQPLFAFEWRDPEMGISGQLTWTRLPQGFKNSPTLFNEALHRDLADFRIQHPDLILLQYVDDLLLAATSELDCQQGTRALLQTLGNLGYRASAKKAQICQKQVKYLGYLLKEGQRWLTEARKETVMGQPTPKTPRQLREFLGKAGFCRLFIPGFAEMAAPLYPLTKPGTLFNWGPDQQKAYQEIKQALLTAPALGLPDLTKPFELFVDEKQGYAKGVLTQKLGPWRRPVAYLSKKLDPVAAGWPPCLRMVAAIAVLTKDAGKLTMGQPLVILAPHAVEALVKQPPDRWLSNARMTHYQALLLDTDRVQFGPVVALNPATLLPLPEEGLQHNCLDILAEAHGTRPDLTDQPLPDADHTWYTDGSSLLQEGQRKAGAAVTTETEVIWAKALPAGTSAQRAELIALTQALKMAEGKKLNVYTDSRYAFATAHIHGEIYRRRGWLTSEGKEIKNKDEILALLKALFLPKRLSIIHCPGHQKGHSAEARGNRMADQAARKAAITETPDTSTLLIENSSPSGGSKRTADGSEFEAGKRTADGSEFEKRTADGSEFESPKKKAKVE

SEQ ID NO: 2679 - protein, 2114 aa, synthetic construct
MPAAKRVKLDGGDKKYSIGLDIGTNSVGWAVITDEYKVPSKKFKVLGNTDRHSIKKNLIGALLFDSGETAEATRLKRTARRRYTRRKNRICYLQEIFSNEMAKVDDSFFHRLEESFLVEEDKKHERHPIFGNIVDEVAYHEKYPTIYHLRKKLVDSTDKADLRLIYLALAHMIKFRGHFLIEGDLNPDNSDVDKLFIQLVQTYNQLFEENPINASGVDAKAILSARLSKSRRLENLIAQLPGEKKNGLFGNLIALSLGLTPNFKSNFDLAEDAKLQLSKDTYDDDLDNLLAQIGDQYADLFLAAKNLSDAILLSDILRVNTEITKAPLSASMIKRYDEHHQDLTLLKALVRQQLPEKYKEIFFDQSKNGYAGYIDGGASQEEFYKFIKPILEKMDGTEELLVKLNREDLLRKQRTFDNGSIPHQIHLGELHAILRRQEDFYPFLKDNREKIEKILTFRIPYYVGPLARGNSRFAWMTRKSEETITPWNFEEVVDKGASAQSFIERMTNFDKNLPNEKVLPKHSLLYEYFTVYNELTKVKYVTEGMRKPAFLSGEQKKAIVDLLFKTNRKVTVKQLKEDYFKKIECFDSVEISGVEDRFNASLGTYHDLLKIIKDKDFLDNEENEDILEDIVLTLTLFEDREMIEERLKTYAHLFDDKVMKQLKRRRYTGWGRLSRKLINGIRDKQSGKTILDFLKSDGFANRNFMQLIHDDSLTFKEDIQKAQVSGQGDSLHEHIANLAGSPAIKKGILQTVKVVDELVKVMGRHKPENIVIEMARENQTTQKGQKNSRERMKRIEEGIKELGSQILKEHPVENTQLQNEKLYLYYLQNGRDMYVDQELDINRLSDYDVDHIVPQSFLKDDSIDNKVLTRSDKARGKSDNVPSEEVVKKMKNYWRQLLNAKLITQRKFDNLTKAERGGLSELDKAGFIKRQLVETRQITKHVAQILDSRMNTKYDENDKLIREVKVITLKSKLVSDFRKDFQFYKVREINNYHHAHDAYLNAVVGTALIKKYPKLESEFVYGDYKVYDVRKMIAKSEQEIGKATAKYFFYSNIMNFFKTEITLANGEIRKRPLIETNGETGEIVWDKGRDFATVRKVLSMPQVNIVKKTEVQTGGFSKESILPKRNSDKLIARKKDWDPKKYGGFDSPTVAYSVLVVAKVEKGKSKKLKSVKELLGITIMERSSFEKNPIDFLEAKGYKEVKKDLIIKLPKYSLFELENGRKRMLASAGELQKGNELALPSKYVNFLYLASHYEKLKGSPEDNEQKQLFVEQHKHYLDEIIEQISEFSKRVILADANLDKVLSAYNKHRDKPIREQAENIIHLFTLTNLGAPAAFKYFDTTIDRKRYTSTKEVLDATLIHQSITGLYETRIDLSQLGGDGGGGSGSSPAPGGTLNIEDEYRLHETSKEPDVSLGSTWLSDFPQAWAETGGMGLAVRQAPLIIPLKATSTPVSIKQYPMSQEARLGIKPHIQRLLDQGILVPCQSPWNTPLLPVKKPGTNDYRPVQDLREVNKRVEDIHPTVPNPYNLLSGLPPSHQWYTVLDLKDAFFCLRLHPTSQPLFAFEWRDPEMGISGQLTWTRLPQGFKNSPTLFNEALHRDLADFRIQHPDLILLQYVDDLLLAATSELDCQQGTRALLQTLGNLGYRASAKKAQICQKQVKYLGYLLKEGQRWLTEARKETVMGQPTPKTPRQLREFLGKAGFCRLFIPGFAEMAAPLYPLTKPGTLFNWGPDQQKAYQEIKQALLTAPALGLPDLTKPFELFVDEKQGYAKGVLTQKLGPWRRPVAYLSKKLDPVAAGWPPCLRMVAAIAVLTKDAGKLTMGQPLVILAPHAVEALVKQPPDRWLSNARMTHYQALLLDTDRVQFGPVVALNPATLLPLPEEGLQHNCLDILAEAHGTRPDLTDQPLPDADHTWYTDGSSLLQEGQRKAGAAVTTETEVIWAKALPAGTSAQRAELIALTQALKMAEGKKLNVYTDSRYAFATAHIHGEIYRRRGWLTSEGKEIKNKDEILALLKALFLPKRLSIIHCPGHQKGHSAEARGNRMADQAARKAAITETPDTSTLLIENSSPSGGSKRTADGSEFEAGKRTADGSEFEKRTADGSEFESPKKKAKVE

SEQ ID NO: 2680 - protein, 2120 aa, synthetic construct
MPAAKRVKLDGGDKKYSIGLDIGTNSVGWAVITDEYKVPSKKFKVLGNTDRHSIKKNLIGALLFDSGETAEATRLKRTARRRYTRRKNRICYLQEIFSNEMAKVDDSFFHRLEESFLVEEDKKHERHPIFGNIVDEVAYHEKYPTIYHLRKKLVDSTDKADLRLIYLALAHMIKFRGHFLIEGDLNPDNSDVDKLFIQLVQTYNQLFEENPINASGVDAKAILSARLSKSRRLENLIAQLPGEKKNGLFGNLIALSLGLTPNFKSNFDLAEDAKLQLSKDTYDDDLDNLLAQIGDQYADLFLAAKNLSDAILLSDILRVNTEITKAPLSASMIKRYDEHHQDLTLLKALVRQQLPEKYKEIFFDQSKNGYAGYIDGGASQEEFYKFIKPILEKMDGTEELLVKLNREDLLRKQRTFDNGSIPHQIHLGELHAILRRQEDFYPFLKDNREKIEKILTFRIPYYVGPLARGNSRFAWMTRKSEETITPWNFEEVVDKGASAQSFIERMTNFDKNLPNEKVLPKHSLLYEYFTVYNELTKVKYVTEGMRKPAFLSGEQKKAIVDLLFKTNRKVTVKQLKEDYFKKIECFDSVEISGVEDRFNASLGTYHDLLKIIKDKDFLDNEENEDILEDIVLTLTLFEDREMIEERLKTYAHLFDDKVMKQLKRRRYTGWGRLSRKLINGIRDKQSGKTILDFLKSDGFANRNFMQLIHDDSLTFKEDIQKAQVSGQGDSLHEHIANLAGSPAIKKGILQTVKVVDELVKVMGRHKPENIVIEMARENQTTQKGQKNSRERMKRIEEGIKELGSQILKEHPVENTQLQNEKLYLYYLQNGRDMYVDQELDINRLSDYDVDHIVPQSFLKDDSIDNKVLTRSDKARGKSDNVPSEEVVKKMKNYWRQLLNAKLITQRKFDNLTKAERGGLSELDKAGFIKRQLVETRQITKHVAQILDSRMNTKYDENDKLIREVKVITLKSKLVSDFRKDFQFYKVREINNYHHAHDAYLNAVVGTALIKKYPKLESEFVYGDYKVYDVRKMIAKSEQEIGKATAKYFFYSNIMNFFKTEITLANGEIRKRPLIETNGETGEIVWDKGRDFATVRKVLSMPQVNIVKKTEVQTGGFSKESILPKRNSDKLIARKKDWDPKKYGGFDSPTVAYSVLVVAKVEKGKSKKLKSVKELLGITIMERSSFEKNPIDFLEAKGYKEVKKDLIIKLPKYSLFELENGRKRMLASAGELQKGNELALPSKYVNFLYLASHYEKLKGSPEDNEQKQLFVEQHKHYLDEIIEQISEFSKRVILADANLDKVLSAYNKHRDKPIREQAENIIHLFTLTNLGAPAAFKYFDTTIDRKRYTSTKEVLDATLIHQSITGLYETRIDLSQLGGDGGGGSGGSGGSGGSGGSGGTLNIEDEYRLHETSKEPDVSLGSTWLSDFPQAWAETGGMGLAVRQAPLIIPLKATSTPVSIKQYPMSQEARLGIKPHIQRLLDQGILVPCQSPWNTPLLPVKKPGTNDYRPVQDLREVNKRVEDIHPTVPNPYNLLSGLPPSHQWYTVLDLKDAFFCLRLHPTSQPLFAFEWRDPEMGISGQLTWTRLPQGFKNSPTLFNEALHRDLADFRIQHPDLILLQYVDDLLLAATSELDCQQGTRALLQTLGNLGYRASAKKAQICQKQVKYLGYLLKEGQRWLTEARKETVMGQPTPKTPRQLREFLGKAGFCRLFIPGFAEMAAPLYPLTKPGTLFNWGPDQQKAYQEIKQALLTAPALGLPDLTKPFELFVDEKQGYAKGVLTQKLGPWRRPVAYLSKKLDPVAAGWPPCLRMVAAIAVLTKDAGKLTMGQPLVILAPHAVEALVKQPPDRWLSNARMTHYQALLLDTDRVQFGPVVALNPATLLPLPEEGLQHNCLDILAEAHGTRPDLTDQPLPDADHTWYTDGSSLLQEGQRKAGAAVTTETEVIWAKALPAGTSAQRAELIALTQALKMAEGKKLNVYTDSRYAFATAHIHGEIYRRRGWLTSEGKEIKNKDEILALLKALFLPKRLSIIHCPGHQKGHSAEARGNRMADQAARKAAITETPDTSTLLIENSSPSGGSKRTADGSEFEAGKRTADGSEFEKRTADGSEFESPKKKAKVE

SEQ ID NO: 2681 - protein, 2116 aa, synthetic construct
MPAAKRVKLDGGDKKYSIGLDIGTNSVGWAVITDEYKVPSKKFKVLGNTDRHSIKKNLIGALLFDSGETAEATRLKRTARRRYTRRKNRICYLQEIFSNEMAKVDDSFFHRLEESFLVEEDKKHERHPIFGNIVDEVAYHEKYPTIYHLRKKLVDSTDKADLRLIYLALAHMIKFRGHFLIEGDLNPDNSDVDKLFIQLVQTYNQLFEENPINASGVDAKAILSARLSKSRRLENLIAQLPGEKKNGLFGNLIALSLGLTPNFKSNFDLAEDAKLQLSKDTYDDDLDNLLAQIGDQYADLFLAAKNLSDAILLSDILRVNTEITKAPLSASMIKRYDEHHQDLTLLKALVRQQLPEKYKEIFFDQSKNGYAGYIDGGASQEEFYKFIKPILEKMDGTEELLVKLNREDLLRKQRTFDNGSIPHQIHLGELHAILRRQEDFYPFLKDNREKIEKILTFRIPYYVGPLARGNSRFAWMTRKSEETITPWNFEEVVDKGASAQSFIERMTNFDKNLPNEKVLPKHSLLYEYFTVYNELTKVKYVTEGMRKPAFLSGEQKKAIVDLLFKTNRKVTVKQLKEDYFKKIECFDSVEISGVEDRFNASLGTYHDLLKIIKDKDFLDNEENEDILEDIVLTLTLFEDREMIEERLKTYAHLFDDKVMKQLKRRRYTGWGRLSRKLINGIRDKQSGKTILDFLKSDGFANRNFMQLIHDDSLTFKEDIQKAQVSGQGDSLHEHIANLAGSPAIKKGILQTVKVVDELVKVMGRHKPENIVIEMARENQTTQKGQKNSRERMKRIEEGIKELGSQILKEHPVENTQLQNEKLYLYYLQNGRDMYVDQELDINRLSDYDVDHIVPQSFLKDDSIDNKVLTRSDKARGKSDNVPSEEVVKKMKNYWRQLLNAKLITQRKFDNLTKAERGGLSELDKAGFIKRQLVETRQITKHVAQILDSRMNTKYDENDKLIREVKVITLKSKLVSDFRKDFQFYKVREINNYHHAHDAYLNAVVGTALIKKYPKLESEFVYGDYKVYDVRKMIAKSEQEIGKATAKYFFYSNIMNFFKTEITLANGEIRKRPLIETNGETGEIVWDKGRDFATVRKVLSMPQVNIVKKTEVQTGGFSKESILPKRNSDKLIARKKDWDPKKYGGFDSPTVAYSVLVVAKVEKGKSKKLKSVKELLGITIMERSSFEKNPIDFLEAKGYKEVKKDLIIKLPKYSLFELENGRKRMLASAGELQKGNELALPSKYVNFLYLASHYEKLKGSPEDNEQKQLFVEQHKHYLDEIIEQISEFSKRVILADANLDKVLSAYNKHRDKPIREQAENIIHLFTLTNLGAPAAFKYFDTTIDRKRYTSTKEVLDATLIHQSITGLYETRIDLSQLGGDGGEAAAKPAPGGGGGTLNIEDEYRLHETSKEPDVSLGSTWLSDFPQAWAETGGMGLAVRQAPLIIPLKATSTPVSIKQYPMSQEARLGIKPHIQRLLDQGILVPCQSPWNTPLLPVKKPGTNDYRPVQDLREVNKRVEDIHPTVPNPYNLLSGLPPSHQWYTVLDLKDAFFCLRLHPTSQPLFAFEWRDPEMGISGQLTWTRLPQGFKNSPTLFNEALHRDLADFRIQHPDLILLQYVDDLLLAATSELDCQQGTRALLQTLGNLGYRASAKKAQICQKQVKYLGYLLKEGQRWLTEARKETVMGQPTPKTPRQLREFLGKAGFCRLFIPGFAEMAAPLYPLTKPGTLFNWGPDQQKAYQEIKQALLTAPALGLPDLTKPFELFVDEKQGYAKGVLTQKLGPWRRPVAYLSKKLDPVAAGWPPCLRMVAAIAVLTKDAGKLTMGQPLVILAPHAVEALVKQPPDRWLSNARMTHYQALLLDTDRVQFGPVVALNPATLLPLPEEGLQHNCLDILAEAHGTRPDLTDQPLPDADHTWYTDGSSLLQEGQRKAGAAVTTETEVIWAKALPAGTSAQRAELIALTQALKMAEGKKLNVYTDSRYAFATAHIHGEIYRRRGWLTSEGKEIKNKDEILALLKALFLPKRLSIIHCPGHQKGHSAEARGNRMADQAARKAAITETPDTSTLLIENSSPSGGSKRTADGSEFEAGKRTADGSEFEKRTADGSEFESPKKKAKVE

SEQ ID NO: 2682 - protein, 2111 aa, synthetic construct
MPAAKRVKLDGGDKKYSIGLDIGTNSVGWAVITDEYKVPSKKFKVLGNTDRHSIKKNLIGALLFDSGETAEATRLKRTARRRYTRRKNRICYLQEIFSNEMAKVDDSFFHRLEESFLVEEDKKHERHPIFGNIVDEVAYHEKYPTIYHLRKKLVDSTDKADLRLIYLALAHMIKFRGHFLIEGDLNPDNSDVDKLFIQLVQTYNQLFEENPINASGVDAKAILSARLSKSRRLENLIAQLPGEKKNGLFGNLIALSLGLTPNFKSNFDLAEDAKLQLSKDTYDDDLDNLLAQIGDQYADLFLAAKNLSDAILLSDILRVNTEITKAPLSASMIKRYDEHHQDLTLLKALVRQQLPEKYKEIFFDQSKNGYAGYIDGGASQEEFYKFIKPILEKMDGTEELLVKLNREDLLRKQRTFDNGSIPHQIHLGELHAILRRQEDFYPFLKDNREKIEKILTFRIPYYVGPLARGNSRFAWMTRKSEETITPWNFEEVVDKGASAQSFIERMTNFDKNLPNEKVLPKHSLLYEYFTVYNELTKVKYVTEGMRKPAFLSGEQKKAIVDLLFKTNRKVTVKQLKEDYFKKIECFDSVEISGVEDRFNASLGTYHDLLKIIKDKDFLDNEENEDILEDIVLTLTLFEDREMIEERLKTYAHLFDDKVMKQLKRRRYTGWGRLSRKLINGIRDKQSGKTILDFLKSDGFANRNFMQLIHDDSLTFKEDIQKAQVSGQGDSLHEHIANLAGSPAIKKGILQTVKVVDELVKVMGRHKPENIVIEMARENQTTQKGQKNSRERMKRIEEGIKELGSQILKEHPVENTQLQNEKLYLYYLQNGRDMYVDQELDINRLSDYDVDHIVPQSFLKDDSIDNKVLTRSDKARGKSDNVPSEEVVKKMKNYWRQLLNAKLITQRKFDNLTKAERGGLSELDKAGFIKRQLVETRQITKHVAQILDSRMNTKYDENDKLIREVKVITLKSKLVSDFRKDFQFYKVREINNYHHAHDAYLNAVVGTALIKKYPKLESEFVYGDYKVYDVRKMIAKSEQEIGKATAKYFFYSNIMNFFKTEITLANGEIRKRPLIETNGETGEIVWDKGRDFATVRKVLSMPQVNIVKKTEVQTGGFSKESILPKRNSDKLIARKKDWDPKKYGGFDSPTVAYSVLVVAKVEKGKSKKLKSVKELLGITIMERSSFEKNPIDFLEAKGYKEVKKDLIIKLPKYSLFELENGRKRMLASAGELQKGNELALPSKYVNFLYLASHYEKLKGSPEDNEQKQLFVEQHKHYLDEIIEQISEFSKRVILADANLDKVLSAYNKHRDKPIREQAENIIHLFTLTNLGAPAAFKYFDTTIDRKRYTSTKEVLDATLIHQSITGLYETRIDLSQLGGDGGGSSGGSGGTLNIEDEYRLHETSKEPDVSLGSTWLSDFPQAWAETGGMGLAVRQAPLIIPLKATSTPVSIKQYPMSQEARLGIKPHIQRLLDQGILVPCQSPWNTPLLPVKKPGTNDYRPVQDLREVNKRVEDIHPTVPNPYNLLSGLPPSHQWYTVLDLKDAFFCLRLHPTSQPLFAFEWRDPEMGISGQLTWTRLPQGFKNSPTLFNEALHRDLADFRIQHPDLILLQYVDDLLLAATSELDCQQGTRALLQTLGNLGYRASAKKAQICQKQVKYLGYLLKEGQRWLTEARKETVMGQPTPKTPRQLREFLGKAGFCRLFIPGFAEMAAPLYPLTKPGTLFNWGPDQQKAYQEIKQALLTAPALGLPDLTKPFELFVDEKQGYAKGVLTQKLGPWRRPVAYLSKKLDPVAAGWPPCLRMVAAIAVLTKDAGKLTMGQPLVILAPHAVEALVKQPPDRWLSNARMTHYQALLLDTDRVQFGPVVALNPATLLPLPEEGLQHNCLDILAEAHGTRPDLTDQPLPDADHTWYTDGSSLLQEGQRKAGAAVTTETEVIWAKALPAGTSAQRAELIALTQALKMAEGKKLNVYTDSRYAFATAHIHGEIYRRRGWLTSEGKEIKNKDEILALLKALFLPKRLSIIHCPGHQKGHSAEARGNRMADQAARKAAITETPDTSTLLIENSSPSGGSKRTADGSEFEAGKRTADGSEFEKRTADGSEFESPKKKAKVE

SEQ ID NO: 2683 - protein, 2116 aa, synthetic construct
MPAAKRVKLDGGDKKYSIGLDIGTNSVGWAVITDEYKVPSKKFKVLGNTDRHSIKKNLIGALLFDSGETAEATRLKRTARRRYTRRKNRICYLQEIFSNEMAKVDDSFFHRLEESFLVEEDKKHERHPIFGNIVDEVAYHEKYPTIYHLRKKLVDSTDKADLRLIYLALAHMIKFRGHFLIEGDLNPDNSDVDKLFIQLVQTYNQLFEENPINASGVDAKAILSARLSKSRRLENLIAQLPGEKKNGLFGNLIALSLGLTPNFKSNFDLAEDAKLQLSKDTYDDDLDNLLAQIGDQYADLFLAAKNLSDAILLSDILRVNTEITKAPLSASMIKRYDEHHQDLTLLKALVRQQLPEKYKEIFFDQSKNGYAGYIDGGASQEEFYKFIKPILEKMDGTEELLVKLNREDLLRKQRTFDNGSIPHQIHLGELHAILRRQEDFYPFLKDNREKIEKILTFRIPYYVGPLARGNSRFAWMTRKSEETITPWNFEEVVDKGASAQSFIERMTNFDKNLPNEKVLPKHSLLYEYFTVYNELTKVKYVTEGMRKPAFLSGEQKKAIVDLLFKTNRKVTVKQLKEDYFKKIECFDSVEISGVEDRFNASLGTYHDLLKIIKDKDFLDNEENEDILEDIVLTLTLFEDREMIEERLKTYAHLFDDKVMKQLKRRRYTGWGRLSRKLINGIRDKQSGKTILDFLKSDGFANRNFMQLIHDDSLTFKEDIQKAQVSGQGDSLHEHIANLAGSPAIKKGILQTVKVVDELVKVMGRHKPENIVIEMARENQTTQKGQKNSRERMKRIEEGIKELGSQILKEHPVENTQLQNEKLYLYYLQNGRDMYVDQELDINRLSDYDVDHIVPQSFLKDDSIDNKVLTRSDKARGKSDNVPSEEVVKKMKNYWRQLLNAKLITQRKFDNLTKAERGGLSELDKAGFIKRQLVETRQITKHVAQILDSRMNTKYDENDKLIREVKVITLKSKLVSDFRKDFQFYKVREINNYHHAHDAYLNAVVGTALIKKYPKLESEFVYGDYKVYDVRKMIAKSEQEIGKATAKYFFYSNIMNFFKTEITLANGEIRKRPLIETNGETGEIVWDKGRDFATVRKVLSMPQVNIVKKTEVQTGGFSKESILPKRNSDKLIARKKDWDPKKYGGFDSPTVAYSVLVVAKVEKGKSKKLKSVKELLGITIMERSSFEKNPIDFLEAKGYKEVKKDLIIKLPKYSLFELENGRKRMLASAGELQKGNELALPSKYVNFLYLASHYEKLKGSPEDNEQKQLFVEQHKHYLDEIIEQISEFSKRVILADANLDKVLSAYNKHRDKPIREQAENIIHLFTLTNLGAPAAFKYFDTTIDRKRYTSTKEVLDATLIHQSITGLYETRIDLSQLGGDGGEAAAKGSSGGSGGTLNIEDEYRLHETSKEPDVSLGSTWLSDFPQAWAETGGMGLAVRQAPLIIPLKATSTPVSIKQYPMSQEARLGIKPHIQRLLDQGILVPCQSPWNTPLLPVKKPGTNDYRPVQDLREVNKRVEDIHPTVPNPYNLLSGLPPSHQWYTVLDLKDAFFCLRLHPTSQPLFAFEWRDPEMGISGQLTWTRLPQGFKNSPTLFNEALHRDLADFRIQHPDLILLQYVDDLLLAATSELDCQQGTRALLQTLGNLGYRASAKKAQICQKQVKYLGYLLKEGQRWLTEARKETVMGQPTPKTPRQLREFLGKAGFCRLFIPGFAEMAAPLYPLTKPGTLFNWGPDQQKAYQEIKQALLTAPALGLPDLTKPFELFVDEKQGYAKGVLTQKLGPWRRPVAYLSKKLDPVAAGWPPCLRMVAAIAVLTKDAGKLTMGQPLVILAPHAVEALVKQPPDRWLSNARMTHYQALLLDTDRVQFGPVVALNPATLLPLPEEGLQHNCLDILAEAHGTRPDLTDQPLPDADHTWYTDGSSLLQEGQRKAGAAVTTETEVIWAKALPAGTSAQRAELIALTQALKMAEGKKLNVYTDSRYAFATAHIHGEIYRRRGWLTSEGKEIKNKDEILALLKALFLPKRLSIIHCPGHQKGHSAEARGNRMADQAARKAAITETPDTSTLLIENSSPSGGSKRTADGSEFEAGKRTADGSEFEKRTADGSEFESPKKKAKVE

SEQ ID NO: 2684 - protein, 2114 aa, synthetic construct
MPAAKRVKLDGGDKKYSIGLDIGTNSVGWAVITDEYKVPSKKFKVLGNTDRHSIKKNLIGALLFDSGETAEATRLKRTARRRYTRRKNRICYLQEIFSNEMAKVDDSFFHRLEESFLVEEDKKHERHPIFGNIVDEVAYHEKYPTIYHLRKKLVDSTDKADLRLIYLALAHMIKFRGHFLIEGDLNPDNSDVDKLFIQLVQTYNQLFEENPINASGVDAKAILSARLSKSRRLENLIAQLPGEKKNGLFGNLIALSLGLTPNFKSNFDLAEDAKLQLSKDTYDDDLDNLLAQIGDQYADLFLAAKNLSDAILLSDILRVNTEITKAPLSASMIKRYDEHHQDLTLLKALVRQQLPEKYKEIFFDQSKNGYAGYIDGGASQEEFYKFIKPILEKMDGTEELLVKLNREDLLRKQRTFDNGSIPHQIHLGELHAILRRQEDFYPFLKDNREKIEKILTFRIPYYVGPLARGNSRFAWMTRKSEETITPWNFEEVVDKGASAQSFIERMTNFDKNLPNEKVLPKHSLLYEYFTVYNELTKVKYVTEGMRKPAFLSGEQKKAIVDLLFKTNRKVTVKQLKEDYFKKIECFDSVEISGVEDRFNASLGTYHDLLKIIKDKDFLDNEENEDILEDIVLTLTLFEDREMIEERLKTYAHLFDDKVMKQLKRRRYTGWGRLSRKLINGIRDKQSGKTILDFLKSDGFANRNFMQLIHDDSLTFKEDIQKAQVSGQGDSLHEHIANLAGSPAIKKGILQTVKVVDELVKVMGRHKPENIVIEMARENQTTQKGQKNSRERMKRIEEGIKELGSQILKEHPVENTQLQNEKLYLYYLQNGRDMYVDQELDINRLSDYDVDHIVPQSFLKDDSIDNKVLTRSDKARGKSDNVPSEEVVKKMKNYWRQLLNAKLITQRKFDNLTKAERGGLSELDKAGFIKRQLVETRQITKHVAQILDSRMNTKYDENDKLIREVKVITLKSKLVSDFRKDFQFYKVREINNYHHAHDAYLNAVVGTALIKKYPKLESEFVYGDYKVYDVRKMIAKSEQEIGKATAKYFFYSNIMNFFKTEITLANGEIRKRPLIETNGETGEIVWDKGRDFATVRKVLSMPQVNIVKKTEVQTGGFSKESILPKRNSDKLIARKKDWDPKKYGGFDSPTVAYSVLVVAKVEKGKSKKLKSVKELLGITIMERSSFEKNPIDFLEAKGYKEVKKDLIIKLPKYSLFELENGRKRMLASAGELQKGNELALPSKYVNFLYLASHYEKLKGSPEDNEQKQLFVEQHKHYLDEIIEQISEFSKRVILADANLDKVLSAYNKHRDKPIREQAENIIHLFTLTNLGAPAAFKYFDTTIDRKRYTSTKEVLDATLIHQSITGLYETRIDLSQLGGDGGGGSPAPGSSGGTLNIEDEYRLHETSKEPDVSLGSTWLSDFPQAWAETGGMGLAVRQAPLIIPLKATSTPVSIKQYPMSQEARLGIKPHIQRLLDQGILVPCQSPWNTPLLPVKKPGTNDYRPVQDLREVNKRVEDIHPTVPNPYNLLSGLPPSHQWYTVLDLKDAFFCLRLHPTSQPLFAFEWRDPEMGISGQLTWTRLPQGFKNSPTLFNEALHRDLADFRIQHPDLILLQYVDDLLLAATSELDCQQGTRALLQTLGNLGYRASAKKAQICQKQVKYLGYLLKEGQRWLTEARKETVMGQPTPKTPRQLREFLGKAGFCRLFIPGFAEMAAPLYPLTKPGTLFNWGPDQQKAYQEIKQALLTAPALGLPDLTKPFELFVDEKQGYAKGVLTQKLGPWRRPVAYLSKKLDPVAAGWPPCLRMVAAIAVLTKDAGKLTMGQPLVILAPHAVEALVKQPPDRWLSNARMTHYQALLLDTDRVQFGPVVALNPATLLPLPEEGLQHNCLDILAEAHGTRPDLTDQPLPDADHTWYTDGSSLLQEGQRKAGAAVTTETEVIWAKALPAGTSAQRAELIALTQALKMAEGKKLNVYTDSRYAFATAHIHGEIYRRRGWLTSEGKEIKNKDEILALLKALFLPKRLSIIHCPGHQKGHSAEARGNRMADQAARKAAITETPDTSTLLIENSSPSGGSKRTADGSEFEAGKRTADGSEFEKRTADGSEFESPKKKAKVE

SEQ ID NO: 2685 - protein, 2114 aa, synthetic construct
MPAAKRVKLDGGDKKYSIGLDIGTNSVGWAVITDEYKVPSKKFKVLGNTDRHSIKKNLIGALLFDSGETAEATRLKRTARRRYTRRKNRICYLQEIFSNEMAKVDDSFFHRLEESFLVEEDKKHERHPIFGNIVDEVAYHEKYPTIYHLRKKLVDSTDKADLRLIYLALAHMIKFRGHFLIEGDLNPDNSDVDKLFIQLVQTYNQLFEENPINASGVDAKAILSARLSKSRRLENLIAQLPGEKKNGLFGNLIALSLGLTPNFKSNFDLAEDAKLQLSKDTYDDDLDNLLAQIGDQYADLFLAAKNLSDAILLSDILRVNTEITKAPLSASMIKRYDEHHQDLTLLKALVRQQLPEKYKEIFFDQSKNGYAGYIDGGASQEEFYKFIKPILEKMDGTEELLVKLNREDLLRKQRTFDNGSIPHQIHLGELHAILRRQEDFYPFLKDNREKIEKILTFRIPYYVGPLARGNSRFAWMTRKSEETITPWNFEEVVDKGASAQSFIERMTNFDKNLPNEKVLPKHSLLYEYFTVYNELTKVKYVTEGMRKPAFLSGEQKKAIVDLLFKTNRKVTVKQLKEDYFKKIECFDSVEISGVEDRFNASLGTYHDLLKIIKDKDFLDNEENEDILEDIVLTLTLFEDREMIEERLKTYAHLFDDKVMKQLKRRRYTGWGRLSRKLINGIRDKQSGKTILDFLKSDGFANRNFMQLIHDDSLTFKEDIQKAQVSGQGDSLHEHIANLAGSPAIKKGILQTVKVVDELVKVMGRHKPENIVIEMARENQTTQKGQKNSRERMKRIEEGIKELGSQILKEHPVENTQLQNEKLYLYYLQNGRDMYVDQELDINRLSDYDVDHIVPQSFLKDDSIDNKVLTRSDKARGKSDNVPSEEVVKKMKNYWRQLLNAKLITQRKFDNLTKAERGGLSELDKAGFIKRQLVETRQITKHVAQILDSRMNTKYDENDKLIREVKVITLKSKLVSDFRKDFQFYKVREINNYHHAHDAYLNAVVGTALIKKYPKLESEFVYGDYKVYDVRKMIAKSEQEIGKATAKYFFYSNIMNFFKTEITLANGEIRKRPLIETNGETGEIVWDKGRDFATVRKVLSMPQVNIVKKTEVQTGGFSKESILPKRNSDKLIARKKDWDPKKYGGFDSPTVAYSVLVVAKVEKGKSKKLKSVKELLGITIMERSSFEKNPIDFLEAKGYKEVKKDLIIKLPKYSLFELENGRKRMLASAGELQKGNELALPSKYVNFLYLASHYEKLKGSPEDNEQKQLFVEQHKHYLDEIIEQISEFSKRVILADANLDKVLSAYNKHRDKPIREQAENIIHLFTLTNLGAPAAFKYFDTTIDRKRYTSTKEVLDATLIHQSITGLYETRIDLSQLGGDGGPAPGSSGGSGGTLNIEDEYRLHETSKEPDVSLGSTWLSDFPQAWAETGGMGLAVRQAPLIIPLKATSTPVSIKQYPMSQEARLGIKPHIQRLLDQGILVPCQSPWNTPLLPVKKPGTNDYRPVQDLREVNKRVEDIHPTVPNPYNLLSGLPPSHQWYTVLDLKDAFFCLRLHPTSQPLFAFEWRDPEMGISGQLTWTRLPQGFKNSPTLFNEALHRDLADFRIQHPDLILLQYVDDLLLAATSELDCQQGTRALLQTLGNLGYRASAKKAQICQKQVKYLGYLLKEGQRWLTEARKETVMGQPTPKTPRQLREFLGKAGFCRLFIPGFAEMAAPLYPLTKPGTLFNWGPDQQKAYQEIKQALLTAPALGLPDLTKPFELFVDEKQGYAKGVLTQKLGPWRRPVAYLSKKLDPVAAGWPPCLRMVAAIAVLTKDAGKLTMGQPLVILAPHAVEALVKQPPDRWLSNARMTHYQALLLDTDRVQFGPVVALNPATLLPLPEEGLQHNCLDILAEAHGTRPDLTDQPLPDADHTWYTDGSSLLQEGQRKAGAAVTTETEVIWAKALPAGTSAQRAELIALTQALKMAEGKKLNVYTDSRYAFATAHIHGEIYRRRGWLTSEGKEIKNKDEILALLKALFLPKRLSIIHCPGHQKGHSAEARGNRMADQAARKAAITETPDTSTLLIENSSPSGGSKRTADGSEFEAGKRTADGSEFEKRTADGSEFESPKKKAKVE

SEQ ID NO: 2686 - protein, 2116 aa, synthetic construct
MPAAKRVKLDGGDKKYSIGLDIGTNSVGWAVITDEYKVPSKKFKVLGNTDRHSIKKNLIGALLFDSGETAEATRLKRTARRRYTRRKNRICYLQEIFSNEMAKVDDSFFHRLEESFLVEEDKKHERHPIFGNIVDEVAYHEKYPTIYHLRKKLVDSTDKADLRLIYLALAHMIKFRGHFLIEGDLNPDNSDVDKLFIQLVQTYNQLFEENPINASGVDAKAILSARLSKSRRLENLIAQLPGEKKNGLFGNLIALSLGLTPNFKSNFDLAEDAKLQLSKDTYDDDLDNLLAQIGDQYADLFLAAKNLSDAILLSDILRVNTEITKAPLSASMIKRYDEHHQDLTLLKALVRQQLPEKYKEIFFDQSKNGYAGYIDGGASQEEFYKFIKPILEKMDGTEELLVKLNREDLLRKQRTFDNGSIPHQIHLGELHAILRRQEDFYPFLKDNREKIEKILTFRIPYYVGPLARGNSRFAWMTRKSEETITPWNFEEVVDKGASAQSFIERMTNFDKNLPNEKVLPKHSLLYEYFTVYNELTKVKYVTEGMRKPAFLSGEQKKAIVDLLFKTNRKVTVKQLKEDYFKKIECFDSVEISGVEDRFNASLGTYHDLLKIIKDKDFLDNEENEDILEDIVLTLTLFEDREMIEERLKTYAHLFDDKVMKQLKRRRYTGWGRLSRKLINGIRDKQSGKTILDFLKSDGFANRNFMQLIHDDSLTFKEDIQKAQVSGQGDSLHEHIANLAGSPAIKKGILQTVKVVDELVKVMGRHKPENIVIEMARENQTTQKGQKNSRERMKRIEEGIKELGSQILKEHPVENTQLQNEKLYLYYLQNGRDMYVDQELDINRLSDYDVDHIVPQSFLKDDSIDNKVLTRSDKARGKSDNVPSEEVVKKMKNYWRQLLNAKLITQRKFDNLTKAERGGLSELDKAGFIKRQLVETRQITKHVAQILDSRMNTKYDENDKLIREVKVITLKSKLVSDFRKDFQFYKVREINNYHHAHDAYLNAVVGTALIKKYPKLESEFVYGDYKVYDVRKMIAKSEQEIGKATAKYFFYSNIMNFFKTEITLANGEIRKRPLIETNGETGEIVWDKGRDFATVRKVLSMPQVNIVKKTEVQTGGFSKESILPKRNSDKLIARKKDWDPKKYGGFDSPTVAYSVLVVAKVEKGKSKKLKSVKELLGITIMERSSFEKNPIDFLEAKGYKEVKKDLIIKLPKYSLFELENGRKRMLASAGELQKGNELALPSKYVNFLYLASHYEKLKGSPEDNEQKQLFVEQHKHYLDEIIEQISEFSKRVILADANLDKVLSAYNKHRDKPIREQAENIIHLFTLTNLGAPAAFKYFDTTIDRKRYTSTKEVLDATLIHQSITGLYETRIDLSQLGGDGGEAAAKGSSGGGGGTLNIEDEYRLHETSKEPDVSLGSTWLSDFPQAWAETGGMGLAVRQAPLIIPLKATSTPVSIKQYPMSQEARLGIKPHIQRLLDQGILVPCQSPWNTPLLPVKKPGTNDYRPVQDLREVNKRVEDIHPTVPNPYNLLSGLPPSHQWYTVLDLKDAFFCLRLHPTSQPLFAFEWRDPEMGISGQLTWTRLPQGFKNSPTLFNEALHRDLADFRIQHPDLILLQYVDDLLLAATSELDCQQGTRALLQTLGNLGYRASAKKAQICQKQVKYLGYLLKEGQRWLTEARKETVMGQPTPKTPRQLREFLGKAGFCRLFIPGFAEMAAPLYPLTKPGTLFNWGPDQQKAYQEIKQALLTAPALGLPDLTKPFELFVDEKQGYAKGVLTQKLGPWRRPVAYLSKKLDPVAAGWPPCLRMVAAIAVLTKDAGKLTMGQPLVILAPHAVEALVKQPPDRWLSNARMTHYQALLLDTDRVQFGPVVALNPATLLPLPEEGLQHNCLDILAEAHGTRPDLTDQPLPDADHTWYTDGSSLLQEGQRKAGAAVTTETEVIWAKALPAGTSAQRAELIALTQALKMAEGKKLNVYTDSRYAFATAHIHGEIYRRRGWLTSEGKEIKNKDEILALLKALFLPKRLSIIHCPGHQKGHSAEARGNRMADQAARKAAITETPDTSTLLIENSSPSGGSKRTADGSEFEAGKRTADGSEFEKRTADGSEFESPKKKAKVE

SEQ ID NO: 2687 - protein, 2117 aa, synthetic construct
MPAAKRVKLDGGDKKYSIGLDIGTNSVGWAVITDEYKVPSKKFKVLGNTDRHSIKKNLIGALLFDSGETAEATRLKRTARRRYTRRKNRICYLQEIFSNEMAKVDDSFFHRLEESFLVEEDKKHERHPIFGNIVDEVAYHEKYPTIYHLRKKLVDSTDKADLRLIYLALAHMIKFRGHFLIEGDLNPDNSDVDKLFIQLVQTYNQLFEENPINASGVDAKAILSARLSKSRRLENLIAQLPGEKKNGLFGNLIALSLGLTPNFKSNFDLAEDAKLQLSKDTYDDDLDNLLAQIGDQYADLFLAAKNLSDAILLSDILRVNTEITKAPLSASMIKRYDEHHQDLTLLKALVRQQLPEKYKEIFFDQSKNGYAGYIDGGASQEEFYKFIKPILEKMDGTEELLVKLNREDLLRKQRTFDNGSIPHQIHLGELHAILRRQEDFYPFLKDNREKIEKILTFRIPYYVGPLARGNSRFAWMTRKSEETITPWNFEEVVDKGASAQSFIERMTNFDKNLPNEKVLPKHSLLYEYFTVYNELTKVKYVTEGMRKPAFLSGEQKKAIVDLLFKTNRKVTVKQLKEDYFKKIECFDSVEISGVEDRFNASLGTYHDLLKIIKDKDFLDNEENEDILEDIVLTLTLFEDREMIEERLKTYAHLFDDKVMKQLKRRRYTGWGRLSRKLINGIRDKQSGKTILDFLKSDGFANRNFMQLIHDDSLTFKEDIQKAQVSGQGDSLHEHIANLAGSPAIKKGILQTVKVVDELVKVMGRHKPENIVIEMARENQTTQKGQKNSRERMKRIEEGIKELGSQILKEHPVENTQLQNEKLYLYYLQNGRDMYVDQELDINRLSDYDVDHIVPQSFLKDDSIDNKVLTRSDKARGKSDNVPSEEVVKKMKNYWRQLLNAKLITQRKFDNLTKAERGGLSELDKAGFIKRQLVETRQITKHVAQILDSRMNTKYDENDKLIREVKVITLKSKLVSDFRKDFQFYKVREINNYHHAHDAYLNAVVGTALIKKYPKLESEFVYGDYKVYDVRKMIAKSEQEIGKATAKYFFYSNIMNFFKTEITLANGEIRKRPLIETNGETGEIVWDKGRDFATVRKVLSMPQVNIVKKTEVQTGGFSKESILPKRNSDKLIARKKDWDPKKYGGFDSPTVAYSVLVVAKVEKGKSKKLKSVKELLGITIMERSSFEKNPIDFLEAKGYKEVKKDLIIKLPKYSLFELENGRKRMLASAGELQKGNELALPSKYVNFLYLASHYEKLKGSPEDNEQKQLFVEQHKHYLDEIIEQISEFSKRVILADANLDKVLSAYNKHRDKPIREQAENIIHLFTLTNLGAPAAFKYFDTTIDRKRYTSTKEVLDATLIHQSITGLYETRIDLSQLGGDGGGGSGGSGGSGGSGGTLNIEDEYRLHETSKEPDVSLGSTWLSDFPQAWAETGGMGLAVRQAPLIIPLKATSTPVSIKQYPMSQEARLGIKPHIQRLLDQGILVPCQSPWNTPLLPVKKPGTNDYRPVQDLREVNKRVEDIHPTVPNPYNLLSGLPPSHQWYTVLDLKDAFFCLRLHPTSQPLFAFEWRDPEMGISGQLTWTRLPQGFKNSPTLFNEALHRDLADFRIQHPDLILLQYVDDLLLAATSELDCQQGTRALLQTLGNLGYRASAKKAQICQKQVKYLGYLLKEGQRWLTEARKETVMGQPTPKTPRQLREFLGKAGFCRLFIPGFAEMAAPLYPLTKPGTLFNWGPDQQKAYQEIKQALLTAPALGLPDLTKPFELFVDEKQGYAKGVLTQKLGPWRRPVAYLSKKLDPVAAGWPPCLRMVAAIAVLTKDAGKLTMGQPLVILAPHAVEALVKQPPDRWLSNARMTHYQALLLDTDRVQFGPVVALNPATLLPLPEEGLQHNCLDILAEAHGTRPDLTDQPLPDADHTWYTDGSSLLQEGQRKAGAAVTTETEVIWAKALPAGTSAQRAELIALTQALKMAEGKKLNVYTDSRYAFATAHIHGEIYRRRGWLTSEGKEIKNKDEILALLKALFLPKRLSIIHCPGHQKGHSAEARGNRMADQAARKAAITETPDTSTLLIENSSPSGGSKRTADGSEFEAGKRTADGSEFEKRTADGSEFESPKKKAKVE

SEQ ID NO: 2688 - protein, 2116 aa, synthetic construct
MPAAKRVKLDGGDKKYSIGLDIGTNSVGWAVITDEYKVPSKKFKVLGNTDRHSIKKNLIGALLFDSGETAEATRLKRTARRRYTRRKNRICYLQEIFSNEMAKVDDSFFHRLEESFLVEEDKKHERHPIFGNIVDEVAYHEKYPTIYHLRKKLVDSTDKADLRLIYLALAHMIKFRGHFLIEGDLNPDNSDVDKLFIQLVQTYNQLFEENPINASGVDAKAILSARLSKSRRLENLIAQLPGEKKNGLFGNLIALSLGLTPNFKSNFDLAEDAKLQLSKDTYDDDLDNLLAQIGDQYADLFLAAKNLSDAILLSDILRVNTEITKAPLSASMIKRYDEHHQDLTLLKALVRQQLPEKYKEIFFDQSKNGYAGYIDGGASQEEFYKFIKPILEKMDGTEELLVKLNREDLLRKQRTFDNGSIPHQIHLGELHAILRRQEDFYPFLKDNREKIEKILTFRIPYYVGPLARGNSRFAWMTRKSEETITPWNFEEVVDKGASAQSFIERMTNFDKNLPNEKVLPKHSLLYEYFTVYNELTKVKYVTEGMRKPAFLSGEQKKAIVDLLFKTNRKVTVKQLKEDYFKKIECFDSVEISGVEDRFNASLGTYHDLLKIIKDKDFLDNEENEDILEDIVLTLTLFEDREMIEERLKTYAHLFDDKVMKQLKRRRYTGWGRLSRKLINGIRDKQSGKTILDFLKSDGFANRNFMQLIHDDSLTFKEDIQKAQVSGQGDSLHEHIANLAGSPAIKKGILQTVKVVDELVKVMGRHKPENIVIEMARENQTTQKGQKNSRERMKRIEEGIKELGSQILKEHPVENTQLQNEKLYLYYLQNGRDMYVDQELDINRLSDYDVDHIVPQSFLKDDSIDNKVLTRSDKARGKSDNVPSEEVVKKMKNYWRQLLNAKLITQRKFDNLTKAERGGLSELDKAGFIKRQLVETRQITKHVAQILDSRMNTKYDENDKLIREVKVITLKSKLVSDFRKDFQFYKVREINNYHHAHDAYLNAVVGTALIKKYPKLESEFVYGDYKVYDVRKMIAKSEQEIGKATAKYFFYSNIMNFFKTEITLANGEIRKRPLIETNGETGEIVWDKGRDFATVRKVLSMPQVNIVKKTEVQTGGFSKESILPKRNSDKLIARKKDWDPKKYGGFDSPTVAYSVLVVAKVEKGKSKKLKSVKELLGITIMERSSFEKNPIDFLEAKGYKEVKKDLIIKLPKYSLFELENGRKRMLASAGELQKGNELALPSKYVNFLYLASHYEKLKGSPEDNEQKQLFVEQHKHYLDEIIEQISEFSKRVILADANLDKVLSAYNKHRDKPIREQAENIIHLFTLTNLGAPAAFKYFDTTIDRKRYTSTKEVLDATLIHQSITGLYETRIDLSQLGGDGGGGGGSSEAAAKGGTLNIEDEYRLHETSKEPDVSLGSTWLSDFPQAWAETGGMGLAVRQAPLIIPLKATSTPVSIKQYPMSQEARLGIKPHIQRLLDQGILVPCQSPWNTPLLPVKKPGTNDYRPVQDLREVNKRVEDIHPTVPNPYNLLSGLPPSHQWYTVLDLKDAFFCLRLHPTSQPLFAFEWRDPEMGISGQLTWTRLPQGFKNSPTLFNEALHRDLADFRIQHPDLILLQYVDDLLLAATSELDCQQGTRALLQTLGNLGYRASAKKAQICQKQVKYLGYLLKEGQRWLTEARKETVMGQPTPKTPRQLREFLGKAGFCRLFIPGFAEMAAPLYPLTKPGTLFNWGPDQQKAYQEIKQALLTAPALGLPDLTKPFELFVDEKQGYAKGVLTQKLGPWRRPVAYLSKKLDPVAAGWPPCLRMVAAIAVLTKDAGKLTMGQPLVILAPHAVEALVKQPPDRWLSNARMTHYQALLLDTDRVQFGPVVALNPATLLPLPEEGLQHNCLDILAEAHGTRPDLTDQPLPDADHTWYTDGSSLLQEGQRKAGAAVTTETEVIWAKALPAGTSAQRAELIALTQALKMAEGKKLNVYTDSRYAFATAHIHGEIYRRRGWLTSEGKEIKNKDEILALLKALFLPKRLSIIHCPGHQKGHSAEARGNRMADQAARKAAITETPDTSTLLIENSSPSGGSKRTADGSEFEAGKRTADGSEFEKRTADGSEFESPKKKAKVE

SEQ ID NO: 2689 - protein, 2114 aa, synthetic construct
MPAAKRVKLDGGDKKYSIGLDIGTNSVGWAVITDEYKVPSKKFKVLGNTDRHSIKKNLIGALLFDSGETAEATRLKRTARRRYTRRKNRICYLQEIFSNEMAKVDDSFFHRLEESFLVEEDKKHERHPIFGNIVDEVAYHEKYPTIYHLRKKLVDSTDKADLRLIYLALAHMIKFRGHFLIEGDLNPDNSDVDKLFIQLVQTYNQLFEENPINASGVDAKAILSARLSKSRRLENLIAQLPGEKKNGLFGNLIALSLGLTPNFKSNFDLAEDAKLQLSKDTYDDDLDNLLAQIGDQYADLFLAAKNLSDAILLSDILRVNTEITKAPLSASMIKRYDEHHQDLTLLKALVRQQLPEKYKEIFFDQSKNGYAGYIDGGASQEEFYKFIKPILEKMDGTEELLVKLNREDLLRKQRTFDNGSIPHQIHLGELHAILRRQEDFYPFLKDNREKIEKILTFRIPYYVGPLARGNSRFAWMTRKSEETITPWNFEEVVDKGASAQSFIERMTNFDKNLPNEKVLPKHSLLYEYFTVYNELTKVKYVTEGMRKPAFLSGEQKKAIVDLLFKTNRKVTVKQLKEDYFKKIECFDSVEISGVEDRFNASLGTYHDLLKIIKDKDFLDNEENEDILEDIVLTLTLFEDREMIEERLKTYAHLFDDKVMKQLKRRRYTGWGRLSRKLINGIRDKQSGKTILDFLKSDGFANRNFMQLIHDDSLTFKEDIQKAQVSGQGDSLHEHIANLAGSPAIKKGILQTVKVVDELVKVMGRHKPENIVIEMARENQTTQKGQKNSRERMKRIEEGIKELGSQILKEHPVENTQLQNEKLYLYYLQNGRDMYVDQELDINRLSDYDVDHIVPQSFLKDDSIDNKVLTRSDKARGKSDNVPSEEVVKKMKNYWRQLLNAKLITQRKFDNLTKAERGGLSELDKAGFIKRQLVETRQITKHVAQILDSRMNTKYDENDKLIREVKVITLKSKLVSDFRKDFQFYKVREINNYHHAHDAYLNAVVGTALIKKYPKLESEFVYGDYKVYDVRKMIAKSEQEIGKATAKYFFYSNIMNFFKTEITLANGEIRKRPLIETNGETGEIVWDKGRDFATVRKVLSMPQVNIVKKTEVQTGGFSKESILPKRNSDKLIARKKDWDPKKYGGFDSPTVAYSVLVVAKVEKGKSKKLKSVKELLGITIMERSSFEKNPIDFLEAKGYKEVKKDLIIKLPKYSLFELENGRKRMLASAGELQKGNELALPSKYVNFLYLASHYEKLKGSPEDNEQKQLFVEQHKHYLDEIIEQISEFSKRVILADANLDKVLSAYNKHRDKPIREQAENIIHLFTLTNLGAPAAFKYFDTTIDRKRYTSTKEVLDATLIHQSITGLYETRIDLSQLGGDGGGSSPAPGGSGGTLNIEDEYRLHETSKEPDVSLGSTWLSDFPQAWAETGGMGLAVRQAPLIIPLKATSTPVSIKQYPMSQEARLGIKPHIQRLLDQGILVPCQSPWNTPLLPVKKPGTNDYRPVQDLREVNKRVEDIHPTVPNPYNLLSGLPPSHQWYTVLDLKDAFFCLRLHPTSQPLFAFEWRDPEMGISGQLTWTRLPQGFKNSPTLFNEALHRDLADFRIQHPDLILLQYVDDLLLAATSELDCQQGTRALLQTLGNLGYRASAKKAQICQKQVKYLGYLLKEGQRWLTEARKETVMGQPTPKTPRQLREFLGKAGFCRLFIPGFAEMAAPLYPLTKPGTLFNWGPDQQKAYQEIKQALLTAPALGLPDLTKPFELFVDEKQGYAKGVLTQKLGPWRRPVAYLSKKLDPVAAGWPPCLRMVAAIAVLTKDAGKLTMGQPLVILAPHAVEALVKQPPDRWLSNARMTHYQALLLDTDRVQFGPVVALNPATLLPLPEEGLQHNCLDILAEAHGTRPDLTDQPLPDADHTWYTDGSSLLQEGQRKAGAAVTTETEVIWAKALPAGTSAQRAELIALTQALKMAEGKKLNVYTDSRYAFATAHIHGEIYRRRGWLTSEGKEIKNKDEILALLKALFLPKRLSIIHCPGHQKGHSAEARGNRMADQAARKAAITETPDTSTLLIENSSPSGGSKRTADGSEFEAGKRTADGSEFEKRTADGSEFESPKKKAKVE

SEQ ID NO: 2690 - protein, 2116 aa, synthetic construct
MPAAKRVKLDGGDKKYSIGLDIGTNSVGWAVITDEYKVPSKKFKVLGNTDRHSIKKNLIGALLFDSGETAEATRLKRTARRRYTRRKNRICYLQEIFSNEMAKVDDSFFHRLEESFLVEEDKKHERHPIFGNIVDEVAYHEKYPTIYHLRKKLVDSTDKADLRLIYLALAHMIKFRGHFLIEGDLNPDNSDVDKLFIQLVQTYNQLFEENPINASGVDAKAILSARLSKSRRLENLIAQLPGEKKNGLFGNLIALSLGLTPNFKSNFDLAEDAKLQLSKDTYDDDLDNLLAQIGDQYADLFLAAKNLSDAILLSDILRVNTEITKAPLSASMIKRYDEHHQDLTLLKALVRQQLPEKYKEIFFDQSKNGYAGYIDGGASQEEFYKFIKPILEKMDGTEELLVKLNREDLLRKQRTFDNGSIPHQIHLGELHAILRRQEDFYPFLKDNREKIEKILTFRIPYYVGPLARGNSRFAWMTRKSEETITPWNFEEVVDKGASAQSFIERMTNFDKNLPNEKVLPKHSLLYEYFTVYNELTKVKYVTEGMRKPAFLSGEQKKAIVDLLFKTNRKVTVKQLKEDYFKKIECFDSVEISGVEDRFNASLGTYHDLLKIIKDKDFLDNEENEDILEDIVLTLTLFEDREMIEERLKTYAHLFDDKVMKQLKRRRYTGWGRLSRKLINGIRDKQSGKTILDFLKSDGFANRNFMQLIHDDSLTFKEDIQKAQVSGQGDSLHEHIANLAGSPAIKKGILQTVKVVDELVKVMGRHKPENIVIEMARENQTTQKGQKNSRERMKRIEEGIKELGSQILKEHPVENTQLQNEKLYLYYLQNGRDMYVDQELDINRLSDYDVDHIVPQSFLKDDSIDNKVLTRSDKARGKSDNVPSEEVVKKMKNYWRQLLNAKLITQRKFDNLTKAERGGLSELDKAGFIKRQLVETRQITKHVAQILDSRMNTKYDENDKLIREVKVITLKSKLVSDFRKDFQFYKVREINNYHHAHDAYLNAVVGTALIKKYPKLESEFVYGDYKVYDVRKMIAKSEQEIGKATAKYFFYSNIMNFFKTEITLANGEIRKRPLIETNGETGEIVWDKGRDFATVRKVLSMPQVNIVKKTEVQTGGFSKESILPKRNSDKLIARKKDWDPKKYGGFDSPTVAYSVLVVAKVEKGKSKKLKSVKELLGITIMERSSFEKNPIDFLEAKGYKEVKKDLIIKLPKYSLFELENGRKRMLASAGELQKGNELALPSKYVNFLYLASHYEKLKGSPEDNEQKQLFVEQHKHYLDEIIEQISEFSKRVILADANLDKVLSAYNKHRDKPIREQAENIIHLFTLTNLGAPAAFKYFDTTIDRKRYTSTKEVLDATLIHQSITGLYETRIDLSQLGGDGGGGSEAAAKPAPGGTLNIEDEYRLHETSKEPDVSLGSTWLSDFPQAWAETGGMGLAVRQAPLIIPLKATSTPVSIKQYPMSQEARLGIKPHIQRLLDQGILVPCQSPWNTPLLPVKKPGTNDYRPVQDLREVNKRVEDIHPTVPNPYNLLSGLPPSHQWYTVLDLKDAFFCLRLHPTSQPLFAFEWRDPEMGISGQLTWTRLPQGFKNSPTLFNEALHRDLADFRIQHPDLILLQYVDDLLLAATSELDCQQGTRALLQTLGNLGYRASAKKAQICQKQVKYLGYLLKEGQRWLTEARKETVMGQPTPKTPRQLREFLGKAGFCRLFIPGFAEMAAPLYPLTKPGTLFNWGPDQQKAYQEIKQALLTAPALGLPDLTKPFELFVDEKQGYAKGVLTQKLGPWRRPVAYLSKKLDPVAAGWPPCLRMVAAIAVLTKDAGKLTMGQPLVILAPHAVEALVKQPPDRWLSNARMTHYQALLLDTDRVQFGPVVALNPATLLPLPEEGLQHNCLDILAEAHGTRPDLTDQPLPDADHTWYTDGSSLLQEGQRKAGAAVTTETEVIWAKALPAGTSAQRAELIALTQALKMAEGKKLNVYTDSRYAFATAHIHGEIYRRRGWLTSEGKEIKNKDEILALLKALFLPKRLSIIHCPGHQKGHSAEARGNRMADQAARKAAITETPDTSTLLIENSSPSGGSKRTADGSEFEAGKRTADGSEFEKRTADGSEFESPKKKAKVE

SEQ ID NO: 2691 - protein, 2110 aa, synthetic construct
MPAAKRVKLDGGDKKYSIGLDIGTNSVGWAVITDEYKVPSKKFKVLGNTDRHSIKKNLIGALLFDSGETAEATRLKRTARRRYTRRKNRICYLQEIFSNEMAKVDDSFFHRLEESFLVEEDKKHERHPIFGNIVDEVAYHEKYPTIYHLRKKLVDSTDKADLRLIYLALAHMIKFRGHFLIEGDLNPDNSDVDKLFIQLVQTYNQLFEENPINASGVDAKAILSARLSKSRRLENLIAQLPGEKKNGLFGNLIALSLGLTPNFKSNFDLAEDAKLQLSKDTYDDDLDNLLAQIGDQYADLFLAAKNLSDAILLSDILRVNTEITKAPLSASMIKRYDEHHQDLTLLKALVRQQLPEKYKEIFFDQSKNGYAGYIDGGASQEEFYKFIKPILEKMDGTEELLVKLNREDLLRKQRTFDNGSIPHQIHLGELHAILRRQEDFYPFLKDNREKIEKILTFRIPYYVGPLARGNSRFAWMTRKSEETITPWNFEEVVDKGASAQSFIERMTNFDKNLPNEKVLPKHSLLYEYFTVYNELTKVKYVTEGMRKPAFLSGEQKKAIVDLLFKTNRKVTVKQLKEDYFKKIECFDSVEISGVEDRFNASLGTYHDLLKIIKDKDFLDNEENEDILEDIVLTLTLFEDREMIEERLKTYAHLFDDKVMKQLKRRRYTGWGRLSRKLINGIRDKQSGKTILDFLKSDGFANRNFMQLIHDDSLTFKEDIQKAQVSGQGDSLHEHIANLAGSPAIKKGILQTVKVVDELVKVMGRHKPENIVIEMARENQTTQKGQKNSRERMKRIEEGIKELGSQILKEHPVENTQLQNEKLYLYYLQNGRDMYVDQELDINRLSDYDVDHIVPQSFLKDDSIDNKVLTRSDKARGKSDNVPSEEVVKKMKNYWRQLLNAKLITQRKFDNLTKAERGGLSELDKAGFIKRQLVETRQITKHVAQILDSRMNTKYDENDKLIREVKVITLKSKLVSDFRKDFQFYKVREINNYHHAHDAYLNAVVGTALIKKYPKLESEFVYGDYKVYDVRKMIAKSEQEIGKATAKYFFYSNIMNFFKTEITLANGEIRKRPLIETNGETGEIVWDKGRDFATVRKVLSMPQVNIVKKTEVQTGGFSKESILPKRNSDKLIARKKDWDPKKYGGFDSPTVAYSVLVVAKVEKGKSKKLKSVKELLGITIMERSSFEKNPIDFLEAKGYKEVKKDLIIKLPKYSLFELENGRKRMLASAGELQKGNELALPSKYVNFLYLASHYEKLKGSPEDNEQKQLFVEQHKHYLDEIIEQISEFSKRVILADANLDKVLSAYNKHRDKPIREQAENIIHLFTLTNLGAPAAFKYFDTTIDRKRYTSTKEVLDATLIHQSITGLYETRIDLSQLGGDGGGGGGSGGTLNIEDEYRLHETSKEPDVSLGSTWLSDFPQAWAETGGMGLAVRQAPLIIPLKATSTPVSIKQYPMSQEARLGIKPHIQRLLDQGILVPCQSPWNTPLLPVKKPGTNDYRPVQDLREVNKRVEDIHPTVPNPYNLLSGLPPSHQWYTVLDLKDAFFCLRLHPTSQPLFAFEWRDPEMGISGQLTWTRLPQGFKNSPTLFNEALHRDLADFRIQHPDLILLQYVDDLLLAATSELDCQQGTRALLQTLGNLGYRASAKKAQICQKQVKYLGYLLKEGQRWLTEARKETVMGQPTPKTPRQLREFLGKAGFCRLFIPGFAEMAAPLYPLTKPGTLFNWGPDQQKAYQEIKQALLTAPALGLPDLTKPFELFVDEKQGYAKGVLTQKLGPWRRPVAYLSKKLDPVAAGWPPCLRMVAAIAVLTKDAGKLTMGQPLVILAPHAVEALVKQPPDRWLSNARMTHYQALLLDTDRVQFGPVVALNPATLLPLPEEGLQHNCLDILAEAHGTRPDLTDQPLPDADHTWYTDGSSLLQEGQRKAGAAVTTETEVIWAKALPAGTSAQRAELIALTQALKMAEGKKLNVYTDSRYAFATAHIHGEIYRRRGWLTSEGKEIKNKDEILALLKALFLPKRLSIIHCPGHQKGHSAEARGNRMADQAARKAAITETPDTSTLLIENSSPSGGSKRTADGSEFEAGKRTADGSEFEKRTADGSEFESPKKKAKVE

SEQ ID NO: 2692 - protein, 2116 aa, synthetic construct
MPAAKRVKLDGGDKKYSIGLDIGTNSVGWAVITDEYKVPSKKFKVLGNTDRHSIKKNLIGALLFDSGETAEATRLKRTARRRYTRRKNRICYLQEIFSNEMAKVDDSFFHRLEESFLVEEDKKHERHPIFGNIVDEVAYHEKYPTIYHLRKKLVDSTDKADLRLIYLALAHMIKFRGHFLIEGDLNPDNSDVDKLFIQLVQTYNQLFEENPINASGVDAKAILSARLSKSRRLENLIAQLPGEKKNGLFGNLIALSLGLTPNFKSNFDLAEDAKLQLSKDTYDDDLDNLLAQIGDQYADLFLAAKNLSDAILLSDILRVNTEITKAPLSASMIKRYDEHHQDLTLLKALVRQQLPEKYKEIFFDQSKNGYAGYIDGGASQEEFYKFIKPILEKMDGTEELLVKLNREDLLRKQRTFDNGSIPHQIHLGELHAILRRQEDFYPFLKDNREKIEKILTFRIPYYVGPLARGNSRFAWMTRKSEETITPWNFEEVVDKGASAQSFIERMTNFDKNLPNEKVLPKHSLLYEYFTVYNELTKVKYVTEGMRKPAFLSGEQKKAIVDLLFKTNRKVTVKQLKEDYFKKIECFDSVEISGVEDRFNASLGTYHDLLKIIKDKDFLDNEENEDILEDIVLTLTLFEDREMIEERLKTYAHLFDDKVMKQLKRRRYTGWGRLSRKLINGIRDKQSGKTILDFLKSDGFANRNFMQLIHDDSLTFKEDIQKAQVSGQGDSLHEHIANLAGSPAIKKGILQTVKVVDELVKVMGRHKPENIVIEMARENQTTQKGQKNSRERMKRIEEGIKELGSQILKEHPVENTQLQNEKLYLYYLQNGRDMYVDQELDINRLSDYDVDHIVPQSFLKDDSIDNKVLTRSDKARGKSDNVPSEEVVKKMKNYWRQLLNAKLITQRKFDNLTKAERGGLSELDKAGFIKRQLVETRQITKHVAQILDSRMNTKYDENDKLIREVKVITLKSKLVSDFRKDFQFYKVREINNYHHAHDAYLNAVVGTALIKKYPKLESEFVYGDYKVYDVRKMIAKSEQEIGKATAKYFFYSNIMNFFKTEITLANGEIRKRPLIETNGETGEIVWDKGRDFATVRKVLSMPQVNIVKKTEVQTGGFSKESILPKRNSDKLIARKKDWDPKKYGGFDSPTVAYSVLVVAKVEKGKSKKLKSVKELLGITIMERSSFEKNPIDFLEAKGYKEVKKDLIIKLPKYSLFELENGRKRMLASAGELQKGNELALPSKYVNFLYLASHYEKLKGSPEDNEQKQLFVEQHKHYLDEIIEQISEFSKRVILADANLDKVLSAYNKHRDKPIREQAENIIHLFTLTNLGAPAAFKYFDTTIDRKRYTSTKEVLDATLIHQSITGLYETRIDLSQLGGDGGGGSGGGEAAAKGGTLNIEDEYRLHETSKEPDVSLGSTWLSDFPQAWAETGGMGLAVRQAPLIIPLKATSTPVSIKQYPMSQEARLGIKPHIQRLLDQGILVPCQSPWNTPLLPVKKPGTNDYRPVQDLREVNKRVEDIHPTVPNPYNLLSGLPPSHQWYTVLDLKDAFFCLRLHPTSQPLFAFEWRDPEMGISGQLTWTRLPQGFKNSPTLFNEALHRDLADFRIQHPDLILLQYVDDLLLAATSELDCQQGTRALLQTLGNLGYRASAKKAQICQKQVKYLGYLLKEGQRWLTEARKETVMGQPTPKTPRQLREFLGKAGFCRLFIPGFAEMAAPLYPLTKPGTLFNWGPDQQKAYQEIKQALLTAPALGLPDLTKPFELFVDEKQGYAKGVLTQKLGPWRRPVAYLSKKLDPVAAGWPPCLRMVAAIAVLTKDAGKLTMGQPLVILAPHAVEALVKQPPDRWLSNARMTHYQALLLDTDRVQFGPVVALNPATLLPLPEEGLQHNCLDILAEAHGTRPDLTDQPLPDADHTWYTDGSSLLQEGQRKAGAAVTTETEVIWAKALPAGTSAQRAELIALTQALKMAEGKKLNVYTDSRYAFATAHIHGEIYRRRGWLTSEGKEIKNKDEILALLKALFLPKRLSIIHCPGHQKGHSAEARGNRMADQAARKAAITETPDTSTLLIENSSPSGGSKRTADGSEFEAGKRTADGSEFEKRTADGSEFESPKKKAKVE

SEQ ID NO: 2693 - protein, 2111 aa, synthetic construct
MPAAKRVKLDGGDKKYSIGLDIGTNSVGWAVITDEYKVPSKKFKVLGNTDRHSIKKNLIGALLFDSGETAEATRLKRTARRRYTRRKNRICYLQEIFSNEMAKVDDSFFHRLEESFLVEEDKKHERHPIFGNIVDEVAYHEKYPTIYHLRKKLVDSTDKADLRLIYLALAHMIKFRGHFLIEGDLNPDNSDVDKLFIQLVQTYNQLFEENPINASGVDAKAILSARLSKSRRLENLIAQLPGEKKNGLFGNLIALSLGLTPNFKSNFDLAEDAKLQLSKDTYDDDLDNLLAQIGDQYADLFLAAKNLSDAILLSDILRVNTEITKAPLSASMIKRYDEHHQDLTLLKALVRQQLPEKYKEIFFDQSKNGYAGYIDGGASQEEFYKFIKPILEKMDGTEELLVKLNREDLLRKQRTFDNGSIPHQIHLGELHAILRRQEDFYPFLKDNREKIEKILTFRIPYYVGPLARGNSRFAWMTRKSEETITPWNFEEVVDKGASAQSFIERMTNFDKNLPNEKVLPKHSLLYEYFTVYNELTKVKYVTEGMRKPAFLSGEQKKAIVDLLFKTNRKVTVKQLKEDYFKKIECFDSVEISGVEDRFNASLGTYHDLLKIIKDKDFLDNEENEDILEDIVLTLTLFEDREMIEERLKTYAHLFDDKVMKQLKRRRYTGWGRLSRKLINGIRDKQSGKTILDFLKSDGFANRNFMQLIHDDSLTFKEDIQKAQVSGQGDSLHEHIANLAGSPAIKKGILQTVKVVDELVKVMGRHKPENIVIEMARENQTTQKGQKNSRERMKRIEEGIKELGSQILKEHPVENTQLQNEKLYLYYLQNGRDMYVDQELDINRLSDYDVDHIVPQSFLKDDSIDNKVLTRSDKARGKSDNVPSEEVVKKMKNYWRQLLNAKLITQRKFDNLTKAERGGLSELDKAGFIKRQLVETRQITKHVAQILDSRMNTKYDENDKLIREVKVITLKSKLVSDFRKDFQFYKVREINNYHHAHDAYLNAVVGTALIKKYPKLESEFVYGDYKVYDVRKMIAKSEQEIGKATAKYFFYSNIMNFFKTEITLANGEIRKRPLIETNGETGEIVWDKGRDFATVRKVLSMPQVNIVKKTEVQTGGFSKESILPKRNSDKLIARKKDWDPKKYGGFDSPTVAYSVLVVAKVEKGKSKKLKSVKELLGITIMERSSFEKNPIDFLEAKGYKEVKKDLIIKLPKYSLFELENGRKRMLASAGELQKGNELALPSKYVNFLYLASHYEKLKGSPEDNEQKQLFVEQHKHYLDEIIEQISEFSKRVILADANLDKVLSAYNKHRDKPIREQAENIIHLFTLTNLGAPAAFKYFDTTIDRKRYTSTKEVLDATLIHQSITGLYETRIDLSQLGGDGGGGSGGSGGTLNIEDEYRLHETSKEPDVSLGSTWLSDFPQAWAETGGMGLAVRQAPLIIPLKATSTPVSIKQYPMSQEARLGIKPHIQRLLDQGILVPCQSPWNTPLLPVKKPGTNDYRPVQDLREVNKRVEDIHPTVPNPYNLLSGLPPSHQWYTVLDLKDAFFCLRLHPTSQPLFAFEWRDPEMGISGQLTWTRLPQGFKNSPTLFNEALHRDLADFRIQHPDLILLQYVDDLLLAATSELDCQQGTRALLQTLGNLGYRASAKKAQICQKQVKYLGYLLKEGQRWLTEARKETVMGQPTPKTPRQLREFLGKAGFCRLFIPGFAEMAAPLYPLTKPGTLFNWGPDQQKAYQEIKQALLTAPALGLPDLTKPFELFVDEKQGYAKGVLTQKLGPWRRPVAYLSKKLDPVAAGWPPCLRMVAAIAVLTKDAGKLTMGQPLVILAPHAVEALVKQPPDRWLSNARMTHYQALLLDTDRVQFGPVVALNPATLLPLPEEGLQHNCLDILAEAHGTRPDLTDQPLPDADHTWYTDGSSLLQEGQRKAGAAVTTETEVIWAKALPAGTSAQRAELIALTQALKMAEGKKLNVYTDSRYAFATAHIHGEIYRRRGWLTSEGKEIKNKDEILALLKALFLPKRLSIIHCPGHQKGHSAEARGNRMADQAARKAAITETPDTSTLLIENSSPSGGSKRTADGSEFEAGKRTADGSEFEKRTADGSEFESPKKKAKVE

SEQ ID NO: 2694 - protein, 2114 aa, synthetic construct
MPAAKRVKLDGGDKKYSIGLDIGTNSVGWAVITDEYKVPSKKFKVLGNTDRHSIKKNLIGALLFDSGETAEATRLKRTARRRYTRRKNRICYLQEIFSNEMAKVDDSFFHRLEESFLVEEDKKHERHPIFGNIVDEVAYHEKYPTIYHLRKKLVDSTDKADLRLIYLALAHMIKFRGHFLIEGDLNPDNSDVDKLFIQLVQTYNQLFEENPINASGVDAKAILSARLSKSRRLENLIAQLPGEKKNGLFGNLIALSLGLTPNFKSNFDLAEDAKLQLSKDTYDDDLDNLLAQIGDQYADLFLAAKNLSDAILLSDILRVNTEITKAPLSASMIKRYDEHHQDLTLLKALVRQQLPEKYKEIFFDQSKNGYAGYIDGGASQEEFYKFIKPILEKMDGTEELLVKLNREDLLRKQRTFDNGSIPHQIHLGELHAILRRQEDFYPFLKDNREKIEKILTFRIPYYVGPLARGNSRFAWMTRKSEETITPWNFEEVVDKGASAQSFIERMTNFDKNLPNEKVLPKHSLLYEYFTVYNELTKVKYVTEGMRKPAFLSGEQKKAIVDLLFKTNRKVTVKQLKEDYFKKIECFDSVEISGVEDRFNASLGTYHDLLKIIKDKDFLDNEENEDILEDIVLTLTLFEDREMIEERLKTYAHLFDDKVMKQLKRRRYTGWGRLSRKLINGIRDKQSGKTILDFLKSDGFANRNFMQLIHDDSLTFKEDIQKAQVSGQGDSLHEHIANLAGSPAIKKGILQTVKVVDELVKVMGRHKPENIVIEMARENQTTQKGQKNSRERMKRIEEGIKELGSQILKEHPVENTQLQNEKLYLYYLQNGRDMYVDQELDINRLSDYDVDHIVPQSFLKDDSIDNKVLTRSDKARGKSDNVPSEEVVKKMKNYWRQLLNAKLITQRKFDNLTKAERGGLSELDKAGFIKRQLVETRQITKHVAQILDSRMNTKYDENDKLIREVKVITLKSKLVSDFRKDFQFYKVREINNYHHAHDAYLNAVVGTALIKKYPKLESEFVYGDYKVYDVRKMIAKSEQEIGKATAKYFFYSNIMNFFKTEITLANGEIRKRPLIETNGETGEIVWDKGRDFATVRKVLSMPQVNIVKKTEVQTGGFSKESILPKRNSDKLIARKKDWDPKKYGGFDSPTVAYSVLVVAKVEKGKSKKLKSVKELLGITIMERSSFEKNPIDFLEAKGYKEVKKDLIIKLPKYSLFELENGRKRMLASAGELQKGNELALPSKYVNFLYLASHYEKLKGSPEDNEQKQLFVEQHKHYLDEIIEQISEFSKRVILADANLDKVLSAYNKHRDKPIREQAENIIHLFTLTNLGAPAAFKYFDTTIDRKRYTSTKEVLDATLIHQSITGLYETRIDLSQLGGDGGGSSGGSGGGGGTLNIEDEYRLHETSKEPDVSLGSTWLSDFPQAWAETGGMGLAVRQAPLIIPLKATSTPVSIKQYPMSQEARLGIKPHIQRLLDQGILVPCQSPWNTPLLPVKKPGTNDYRPVQDLREVNKRVEDIHPTVPNPYNLLSGLPPSHQWYTVLDLKDAFFCLRLHPTSQPLFAFEWRDPEMGISGQLTWTRLPQGFKNSPTLFNEALHRDLADFRIQHPDLILLQYVDDLLLAATSELDCQQGTRALLQTLGNLGYRASAKKAQICQKQVKYLGYLLKEGQRWLTEARKETVMGQPTPKTPRQLREFLGKAGFCRLFIPGFAEMAAPLYPLTKPGTLFNWGPDQQKAYQEIKQALLTAPALGLPDLTKPFELFVDEKQGYAKGVLTQKLGPWRRPVAYLSKKLDPVAAGWPPCLRMVAAIAVLTKDAGKLTMGQPLVILAPHAVEALVKQPPDRWLSNARMTHYQALLLDTDRVQFGPVVALNPATLLPLPEEGLQHNCLDILAEAHGTRPDLTDQPLPDADHTWYTDGSSLLQEGQRKAGAAVTTETEVIWAKALPAGTSAQRAELIALTQALKMAEGKKLNVYTDSRYAFATAHIHGEIYRRRGWLTSEGKEIKNKDEILALLKALFLPKRLSIIHCPGHQKGHSAEARGNRMADQAARKAAITETPDTSTLLIENSSPSGGSKRTADGSEFEAGKRTADGSEFEKRTADGSEFESPKKKAKVE

SEQ ID NO: 2695 - protein, 2116 aa, synthetic construct
MPAAKRVKLDGGDKKYSIGLDIGTNSVGWAVITDEYKVPSKKFKVLGNTDRHSIKKNLIGALLFDSGETAEATRLKRTARRRYTRRKNRICYLQEIFSNEMAKVDDSFFHRLEESFLVEEDKKHERHPIFGNIVDEVAYHEKYPTIYHLRKKLVDSTDKADLRLIYLALAHMIKFRGHFLIEGDLNPDNSDVDKLFIQLVQTYNQLFEENPINASGVDAKAILSARLSKSRRLENLIAQLPGEKKNGLFGNLIALSLGLTPNFKSNFDLAEDAKLQLSKDTYDDDLDNLLAQIGDQYADLFLAAKNLSDAILLSDILRVNTEITKAPLSASMIKRYDEHHQDLTLLKALVRQQLPEKYKEIFFDQSKNGYAGYIDGGASQEEFYKFIKPILEKMDGTEELLVKLNREDLLRKQRTFDNGSIPHQIHLGELHAILRRQEDFYPFLKDNREKIEKILTFRIPYYVGPLARGNSRFAWMTRKSEETITPWNFEEVVDKGASAQSFIERMTNFDKNLPNEKVLPKHSLLYEYFTVYNELTKVKYVTEGMRKPAFLSGEQKKAIVDLLFKTNRKVTVKQLKEDYFKKIECFDSVEISGVEDRFNASLGTYHDLLKIIKDKDFLDNEENEDILEDIVLTLTLFEDREMIEERLKTYAHLFDDKVMKQLKRRRYTGWGRLSRKLINGIRDKQSGKTILDFLKSDGFANRNFMQLIHDDSLTFKEDIQKAQVSGQGDSLHEHIANLAGSPAIKKGILQTVKVVDELVKVMGRHKPENIVIEMARENQTTQKGQKNSRERMKRIEEGIKELGSQILKEHPVENTQLQNEKLYLYYLQNGRDMYVDQELDINRLSDYDVDHIVPQSFLKDDSIDNKVLTRSDKARGKSDNVPSEEVVKKMKNYWRQLLNAKLITQRKFDNLTKAERGGLSELDKAGFIKRQLVETRQITKHVAQILDSRMNTKYDENDKLIREVKVITLKSKLVSDFRKDFQFYKVREINNYHHAHDAYLNAVVGTALIKKYPKLESEFVYGDYKVYDVRKMIAKSEQEIGKATAKYFFYSNIMNFFKTEITLANGEIRKRPLIETNGETGEIVWDKGRDFATVRKVLSMPQVNIVKKTEVQTGGFSKESILPKRNSDKLIARKKDWDPKKYGGFDSPTVAYSVLVVAKVEKGKSKKLKSVKELLGITIMERSSFEKNPIDFLEAKGYKEVKKDLIIKLPKYSLFELENGRKRMLASAGELQKGNELALPSKYVNFLYLASHYEKLKGSPEDNEQKQLFVEQHKHYLDEIIEQISEFSKRVILADANLDKVLSAYNKHRDKPIREQAENIIHLFTLTNLGAPAAFKYFDTTIDRKRYTSTKEVLDATLIHQSITGLYETRIDLSQLGGDGGEAAAKGGGGSSGGTLNIEDEYRLHETSKEPDVSLGSTWLSDFPQAWAETGGMGLAVRQAPLIIPLKATSTPVSIKQYPMSQEARLGIKPHIQRLLDQGILVPCQSPWNTPLLPVKKPGTNDYRPVQDLREVNKRVEDIHPTVPNPYNLLSGLPPSHQWYTVLDLKDAFFCLRLHPTSQPLFAFEWRDPEMGISGQLTWTRLPQGFKNSPTLFNEALHRDLADFRIQHPDLILLQYVDDLLLAATSELDCQQGTRALLQTLGNLGYRASAKKAQICQKQVKYLGYLLKEGQRWLTEARKETVMGQPTPKTPRQLREFLGKAGFCRLFIPGFAEMAAPLYPLTKPGTLFNWGPDQQKAYQEIKQALLTAPALGLPDLTKPFELFVDEKQGYAKGVLTQKLGPWRRPVAYLSKKLDPVAAGWPPCLRMVAAIAVLTKDAGKLTMGQPLVILAPHAVEALVKQPPDRWLSNARMTHYQALLLDTDRVQFGPVVALNPATLLPLPEEGLQHNCLDILAEAHGTRPDLTDQPLPDADHTWYTDGSSLLQEGQRKAGAAVTTETEVIWAKALPAGTSAQRAELIALTQALKMAEGKKLNVYTDSRYAFATAHIHGEIYRRRGWLTSEGKEIKNKDEILALLKALFLPKRLSIIHCPGHQKGHSAEARGNRMADQAARKAAITETPDTSTLLIENSSPSGGSKRTADGSEFEAGKRTADGSEFEKRTADGSEFESPKKKAKVE

SEQ ID NO: 2696 - protein, 2117 aa, synthetic construct
MPAAKRVKLDGGDKKYSIGLDIGTNSVGWAVITDEYKVPSKKFKVLGNTDRHSIKKNLIGALLFDSGETAEATRLKRTARRRYTRRKNRICYLQEIFSNEMAKVDDSFFHRLEESFLVEEDKKHERHPIFGNIVDEVAYHEKYPTIYHLRKKLVDSTDKADLRLIYLALAHMIKFRGHFLIEGDLNPDNSDVDKLFIQLVQTYNQLFEENPINASGVDAKAILSARLSKSRRLENLIAQLPGEKKNGLFGNLIALSLGLTPNFKSNFDLAEDAKLQLSKDTYDDDLDNLLAQIGDQYADLFLAAKNLSDAILLSDILRVNTEITKAPLSASMIKRYDEHHQDLTLLKALVRQQLPEKYKEIFFDQSKNGYAGYIDGGASQEEFYKFIKPILEKMDGTEELLVKLNREDLLRKQRTFDNGSIPHQIHLGELHAILRRQEDFYPFLKDNREKIEKILTFRIPYYVGPLARGNSRFAWMTRKSEETITPWNFEEVVDKGASAQSFIERMTNFDKNLPNEKVLPKHSLLYEYFTVYNELTKVKYVTEGMRKPAFLSGEQKKAIVDLLFKTNRKVTVKQLKEDYFKKIECFDSVEISGVEDRFNASLGTYHDLLKIIKDKDFLDNEENEDILEDIVLTLTLFEDREMIEERLKTYAHLFDDKVMKQLKRRRYTGWGRLSRKLINGIRDKQSGKTILDFLKSDGFANRNFMQLIHDDSLTFKEDIQKAQVSGQGDSLHEHIANLAGSPAIKKGILQTVKVVDELVKVMGRHKPENIVIEMARENQTTQKGQKNSRERMKRIEEGIKELGSQILKEHPVENTQLQNEKLYLYYLQNGRDMYVDQELDINRLSDYDVDHIVPQSFLKDDSIDNKVLTRSDKARGKSDNVPSEEVVKKMKNYWRQLLNAKLITQRKFDNLTKAERGGLSELDKAGFIKRQLVETRQITKHVAQILDSRMNTKYDENDKLIREVKVITLKSKLVSDFRKDFQFYKVREINNYHHAHDAYLNAVVGTALIKKYPKLESEFVYGDYKVYDVRKMIAKSEQEIGKATAKYFFYSNIMNFFKTEITLANGEIRKRPLIETNGETGEIVWDKGRDFATVRKVLSMPQVNIVKKTEVQTGGFSKESILPKRNSDKLIARKKDWDPKKYGGFDSPTVAYSVLVVAKVEKGKSKKLKSVKELLGITIMERSSFEKNPIDFLEAKGYKEVKKDLIIKLPKYSLFELENGRKRMLASAGELQKGNELALPSKYVNFLYLASHYEKLKGSPEDNEQKQLFVEQHKHYLDEIIEQISEFSKRVILADANLDKVLSAYNKHRDKPIREQAENIIHLFTLTNLGAPAAFKYFDTTIDRKRYTSTKEVLDATLIHQSITGLYETRIDLSQLGGDGGGSAGSAAGSGEFGGTLNIEDEYRLHETSKEPDVSLGSTWLSDFPQAWAETGGMGLAVRQAPLIIPLKATSTPVSIKQYPMSQEARLGIKPHIQRLLDQGILVPCQSPWNTPLLPVKKPGTNDYRPVQDLREVNKRVEDIHPTVPNPYNLLSGLPPSHQWYTVLDLKDAFFCLRLHPTSQPLFAFEWRDPEMGISGQLTWTRLPQGFKNSPTLFNEALHRDLADFRIQHPDLILLQYVDDLLLAATSELDCQQGTRALLQTLGNLGYRASAKKAQICQKQVKYLGYLLKEGQRWLTEARKETVMGQPTPKTPRQLREFLGKAGFCRLFIPGFAEMAAPLYPLTKPGTLFNWGPDQQKAYQEIKQALLTAPALGLPDLTKPFELFVDEKQGYAKGVLTQKLGPWRRPVAYLSKKLDPVAAGWPPCLRMVAAIAVLTKDAGKLTMGQPLVILAPHAVEALVKQPPDRWLSNARMTHYQALLLDTDRVQFGPVVALNPATLLPLPEEGLQHNCLDILAEAHGTRPDLTDQPLPDADHTWYTDGSSLLQEGQRKAGAAVTTETEVIWAKALPAGTSAQRAELIALTQALKMAEGKKLNVYTDSRYAFATAHIHGEIYRRRGWLTSEGKEIKNKDEILALLKALFLPKRLSIIHCPGHQKGHSAEARGNRMADQAARKAAITETPDTSTLLIENSSPSGGSKRTADGSEFEAGKRTADGSEFEKRTADGSEFESPKKKAKVE

SEQ ID NO: 2697 - protein, 2114 aa, synthetic construct
MPAAKRVKLDGGDKKYSIGLDIGTNSVGWAVITDEYKVPSKKFKVLGNTDRHSIKKNLIGALLFDSGETAEATRLKRTARRRYTRRKNRICYLQEIFSNEMAKVDDSFFHRLEESFLVEEDKKHERHPIFGNIVDEVAYHEKYPTIYHLRKKLVDSTDKADLRLIYLALAHMIKFRGHFLIEGDLNPDNSDVDKLFIQLVQTYNQLFEENPINASGVDAKAILSARLSKSRRLENLIAQLPGEKKNGLFGNLIALSLGLTPNFKSNFDLAEDAKLQLSKDTYDDDLDNLLAQIGDQYADLFLAAKNLSDAILLSDILRVNTEITKAPLSASMIKRYDEHHQDLTLLKALVRQQLPEKYKEIFFDQSKNGYAGYIDGGASQEEFYKFIKPILEKMDGTEELLVKLNREDLLRKQRTFDNGSIPHQIHLGELHAILRRQEDFYPFLKDNREKIEKILTFRIPYYVGPLARGNSRFAWMTRKSEETITPWNFEEVVDKGASAQSFIERMTNFDKNLPNEKVLPKHSLLYEYFTVYNELTKVKYVTEGMRKPAFLSGEQKKAIVDLLFKTNRKVTVKQLKEDYFKKIECFDSVEISGVEDRFNASLGTYHDLLKIIKDKDFLDNEENEDILEDIVLTLTLFEDREMIEERLKTYAHLFDDKVMKQLKRRRYTGWGRLSRKLINGIRDKQSGKTILDFLKSDGFANRNFMQLIHDDSLTFKEDIQKAQVSGQGDSLHEHIANLAGSPAIKKGILQTVKVVDELVKVMGRHKPENIVIEMARENQTTQKGQKNSRERMKRIEEGIKELGSQILKEHPVENTQLQNEKLYLYYLQNGRDMYVDQELDINRLSDYDVDHIVPQSFLKDDSIDNKVLTRSDKARGKSDNVPSEEVVKKMKNYWRQLLNAKLITQRKFDNLTKAERGGLSELDKAGFIKRQLVETRQITKHVAQILDSRMNTKYDENDKLIREVKVITLKSKLVSDFRKDFQFYKVREINNYHHAHDAYLNAVVGTALIKKYPKLESEFVYGDYKVYDVRKMIAKSEQEIGKATAKYFFYSNIMNFFKTEITLANGEIRKRPLIETNGETGEIVWDKGRDFATVRKVLSMPQVNIVKKTEVQTGGFSKESILPKRNSDKLIARKKDWDPKKYGGFDSPTVAYSVLVVAKVEKGKSKKLKSVKELLGITIMERSSFEKNPIDFLEAKGYKEVKKDLIIKLPKYSLFELENGRKRMLASAGELQKGNELALPSKYVNFLYLASHYEKLKGSPEDNEQKQLFVEQHKHYLDEIIEQISEFSKRVILADANLDKVLSAYNKHRDKPIREQAENIIHLFTLTNLGAPAAFKYFDTTIDRKRYTSTKEVLDATLIHQSITGLYETRIDLSQLGGDGGGGSGGSGGSGGTLNIEDEYRLHETSKEPDVSLGSTWLSDFPQAWAETGGMGLAVRQAPLIIPLKATSTPVSIKQYPMSQEARLGIKPHIQRLLDQGILVPCQSPWNTPLLPVKKPGTNDYRPVQDLREVNKRVEDIHPTVPNPYNLLSGLPPSHQWYTVLDLKDAFFCLRLHPTSQPLFAFEWRDPEMGISGQLTWTRLPQGFKNSPTLFNEALHRDLADFRIQHPDLILLQYVDDLLLAATSELDCQQGTRALLQTLGNLGYRASAKKAQICQKQVKYLGYLLKEGQRWLTEARKETVMGQPTPKTPRQLREFLGKAGFCRLFIPGFAEMAAPLYPLTKPGTLFNWGPDQQKAYQEIKQALLTAPALGLPDLTKPFELFVDEKQGYAKGVLTQKLGPWRRPVAYLSKKLDPVAAGWPPCLRMVAAIAVLTKDAGKLTMGQPLVILAPHAVEALVKQPPDRWLSNARMTHYQALLLDTDRVQFGPVVALNPATLLPLPEEGLQHNCLDILAEAHGTRPDLTDQPLPDADHTWYTDGSSLLQEGQRKAGAAVTTETEVIWAKALPAGTSAQRAELIALTQALKMAEGKKLNVYTDSRYAFATAHIHGEIYRRRGWLTSEGKEIKNKDEILALLKALFLPKRLSIIHCPGHQKGHSAEARGNRMADQAARKAAITETPDTSTLLIENSSPSGGSKRTADGSEFEAGKRTADGSEFEKRTADGSEFESPKKKAKVE

SEQ ID NO: 2698 - protein, 2114 aa, synthetic construct
MPAAKRVKLDGGDKKYSIGLDIGTNSVGWAVITDEYKVPSKKFKVLGNTDRHSIKKNLIGALLFDSGETAEATRLKRTARRRYTRRKNRICYLQEIFSNEMAKVDDSFFHRLEESFLVEEDKKHERHPIFGNIVDEVAYHEKYPTIYHLRKKLVDSTDKADLRLIYLALAHMIKFRGHFLIEGDLNPDNSDVDKLFIQLVQTYNQLFEENPINASGVDAKAILSARLSKSRRLENLIAQLPGEKKNGLFGNLIALSLGLTPNFKSNFDLAEDAKLQLSKDTYDDDLDNLLAQIGDQYADLFLAAKNLSDAILLSDILRVNTEITKAPLSASMIKRYDEHHQDLTLLKALVRQQLPEKYKEIFFDQSKNGYAGYIDGGASQEEFYKFIKPILEKMDGTEELLVKLNREDLLRKQRTFDNGSIPHQIHLGELHAILRRQEDFYPFLKDNREKIEKILTFRIPYYVGPLARGNSRFAWMTRKSEETITPWNFEEVVDKGASAQSFIERMTNFDKNLPNEKVLPKHSLLYEYFTVYNELTKVKYVTEGMRKPAFLSGEQKKAIVDLLFKTNRKVTVKQLKEDYFKKIECFDSVEISGVEDRFNASLGTYHDLLKIIKDKDFLDNEENEDILEDIVLTLTLFEDREMIEERLKTYAHLFDDKVMKQLKRRRYTGWGRLSRKLINGIRDKQSGKTILDFLKSDGFANRNFMQLIHDDSLTFKEDIQKAQVSGQGDSLHEHIANLAGSPAIKKGILQTVKVVDELVKVMGRHKPENIVIEMARENQTTQKGQKNSRERMKRIEEGIKELGSQILKEHPVENTQLQNEKLYLYYLQNGRDMYVDQELDINRLSDYDVDHIVPQSFLKDDSIDNKVLTRSDKARGKSDNVPSEEVVKKMKNYWRQLLNAKLITQRKFDNLTKAERGGLSELDKAGFIKRQLVETRQITKHVAQILDSRMNTKYDENDKLIREVKVITLKSKLVSDFRKDFQFYKVREINNYHHAHDAYLNAVVGTALIKKYPKLESEFVYGDYKVYDVRKMIAKSEQEIGKATAKYFFYSNIMNFFKTEITLANGEIRKRPLIETNGETGEIVWDKGRDFATVRKVLSMPQVNIVKKTEVQTGGFSKESILPKRNSDKLIARKKDWDPKKYGGFDSPTVAYSVLVVAKVEKGKSKKLKSVKELLGITIMERSSFEKNPIDFLEAKGYKEVKKDLIIKLPKYSLFELENGRKRMLASAGELQKGNELALPSKYVNFLYLASHYEKLKGSPEDNEQKQLFVEQHKHYLDEIIEQISEFSKRVILADANLDKVLSAYNKHRDKPIREQAENIIHLFTLTNLGAPAAFKYFDTTIDRKRYTSTKEVLDATLIHQSITGLYETRIDLSQLGGDGGGGGPAPGSSGGTLNIEDEYRLHETSKEPDVSLGSTWLSDFPQAWAETGGMGLAVRQAPLIIPLKATSTPVSIKQYPMSQEARLGIKPHIQRLLDQGILVPCQSPWNTPLLPVKKPGTNDYRPVQDLREVNKRVEDIHPTVPNPYNLLSGLPPSHQWYTVLDLKDAFFCLRLHPTSQPLFAFEWRDPEMGISGQLTWTRLPQGFKNSPTLFNEALHRDLADFRIQHPDLILLQYVDDLLLAATSELDCQQGTRALLQTLGNLGYRASAKKAQICQKQVKYLGYLLKEGQRWLTEARKETVMGQPTPKTPRQLREFLGKAGFCRLFIPGFAEMAAPLYPLTKPGTLFNWGPDQQKAYQEIKQALLTAPALGLPDLTKPFELFVDEKQGYAKGVLTQKLGPWRRPVAYLSKKLDPVAAGWPPCLRMVAAIAVLTKDAGKLTMGQPLVILAPHAVEALVKQPPDRWLSNARMTHYQALLLDTDRVQFGPVVALNPATLLPLPEEGLQHNCLDILAEAHGTRPDLTDQPLPDADHTWYTDGSSLLQEGQRKAGAAVTTETEVIWAKALPAGTSAQRAELIALTQALKMAEGKKLNVYTDSRYAFATAHIHGEIYRRRGWLTSEGKEIKNKDEILALLKALFLPKRLSIIHCPGHQKGHSAEARGNRMADQAARKAAITETPDTSTLLIENSSPSGGSKRTADGSEFEAGKRTADGSEFEKRTADGSEFESPKKKAKVE

SEQ ID NO: 2699 - protein, 2114 aa, synthetic construct
MPAAKRVKLDGGDKKYSIGLDIGTNSVGWAVITDEYKVPSKKFKVLGNTDRHSIKKNLIGALLFDSGETAEATRLKRTARRRYTRRKNRICYLQEIFSNEMAKVDDSFFHRLEESFLVEEDKKHERHPIFGNIVDEVAYHEKYPTIYHLRKKLVDSTDKADLRLIYLALAHMIKFRGHFLIEGDLNPDNSDVDKLFIQLVQTYNQLFEENPINASGVDAKAILSARLSKSRRLENLIAQLPGEKKNGLFGNLIALSLGLTPNFKSNFDLAEDAKLQLSKDTYDDDLDNLLAQIGDQYADLFLAAKNLSDAILLSDILRVNTEITKAPLSASMIKRYDEHHQDLTLLKALVRQQLPEKYKEIFFDQSKNGYAGYIDGGASQEEFYKFIKPILEKMDGTEELLVKLNREDLLRKQRTFDNGSIPHQIHLGELHAILRRQEDFYPFLKDNREKIEKILTFRIPYYVGPLARGNSRFAWMTRKSEETITPWNFEEVVDKGASAQSFIERMTNFDKNLPNEKVLPKHSLLYEYFTVYNELTKVKYVTEGMRKPAFLSGEQKKAIVDLLFKTNRKVTVKQLKEDYFKKIECFDSVEISGVEDRFNASLGTYHDLLKIIKDKDFLDNEENEDILEDIVLTLTLFEDREMIEERLKTYAHLFDDKVMKQLKRRRYTGWGRLSRKLINGIRDKQSGKTILDFLKSDGFANRNFMQLIHDDSLTFKEDIQKAQVSGQGDSLHEHIANLAGSPAIKKGILQTVKVVDELVKVMGRHKPENIVIEMARENQTTQKGQKNSRERMKRIEEGIKELGSQILKEHPVENTQLQNEKLYLYYLQNGRDMYVDQELDINRLSDYDVDHIVPQSFLKDDSIDNKVLTRSDKARGKSDNVPSEEVVKKMKNYWRQLLNAKLITQRKFDNLTKAERGGLSELDKAGFIKRQLVETRQITKHVAQILDSRMNTKYDENDKLIREVKVITLKSKLVSDFRKDFQFYKVREINNYHHAHDAYLNAVVGTALIKKYPKLESEFVYGDYKVYDVRKMIAKSEQEIGKATAKYFFYSNIMNFFKTEITLANGEIRKRPLIETNGETGEIVWDKGRDFATVRKVLSMPQVNIVKKTEVQTGGFSKESILPKRNSDKLIARKKDWDPKKYGGFDSPTVAYSVLVVAKVEKGKSKKLKSVKELLGITIMERSSFEKNPIDFLEAKGYKEVKKDLIIKLPKYSLFELENGRKRMLASAGELQKGNELALPSKYVNFLYLASHYEKLKGSPEDNEQKQLFVEQHKHYLDEIIEQISEFSKRVILADANLDKVLSAYNKHRDKPIREQAENIIHLFTLTNLGAPAAFKYFDTTIDRKRYTSTKEVLDATLIHQSITGLYETRIDLSQLGGDGGGSSGGSPAPGGTLNIEDEYRLHETSKEPDVSLGSTWLSDFPQAWAETGGMGLAVRQAPLIIPLKATSTPVSIKQYPMSQEARLGIKPHIQRLLDQGILVPCQSPWNTPLLPVKKPGTNDYRPVQDLREVNKRVEDIHPTVPNPYNLLSGLPPSHQWYTVLDLKDAFFCLRLHPTSQPLFAFEWRDPEMGISGQLTWTRLPQGFKNSPTLFNEALHRDLADFRIQHPDLILLQYVDDLLLAATSELDCQQGTRALLQTLGNLGYRASAKKAQICQKQVKYLGYLLKEGQRWLTEARKETVMGQPTPKTPRQLREFLGKAGFCRLFIPGFAEMAAPLYPLTKPGTLFNWGPDQQKAYQEIKQALLTAPALGLPDLTKPFELFVDEKQGYAKGVLTQKLGPWRRPVAYLSKKLDPVAAGWPPCLRMVAAIAVLTKDAGKLTMGQPLVILAPHAVEALVKQPPDRWLSNARMTHYQALLLDTDRVQFGPVVALNPATLLPLPEEGLQHNCLDILAEAHGTRPDLTDQPLPDADHTWYTDGSSLLQEGQRKAGAAVTTETEVIWAKALPAGTSAQRAELIALTQALKMAEGKKLNVYTDSRYAFATAHIHGEIYRRRGWLTSEGKEIKNKDEILALLKALFLPKRLSIIHCPGHQKGHSAEARGNRMADQAARKAAITETPDTSTLLIENSSPSGGSKRTADGSEFEAGKRTADGSEFEKRTADGSEFESPKKKAKVE

SEQ ID NO: 2700 - protein, 2113 aa, synthetic construct
MPAAKRVKLDGGDKKYSIGLDIGTNSVGWAVITDEYKVPSKKFKVLGNTDRHSIKKNLIGALLFDSGETAEATRLKRTARRRYTRRKNRICYLQEIFSNEMAKVDDSFFHRLEESFLVEEDKKHERHPIFGNIVDEVAYHEKYPTIYHLRKKLVDSTDKADLRLIYLALAHMIKFRGHFLIEGDLNPDNSDVDKLFIQLVQTYNQLFEENPINASGVDAKAILSARLSKSRRLENLIAQLPGEKKNGLFGNLIALSLGLTPNFKSNFDLAEDAKLQLSKDTYDDDLDNLLAQIGDQYADLFLAAKNLSDAILLSDILRVNTEITKAPLSASMIKRYDEHHQDLTLLKALVRQQLPEKYKEIFFDQSKNGYAGYIDGGASQEEFYKFIKPILEKMDGTEELLVKLNREDLLRKQRTFDNGSIPHQIHLGELHAILRRQEDFYPFLKDNREKIEKILTFRIPYYVGPLARGNSRFAWMTRKSEETITPWNFEEVVDKGASAQSFIERMTNFDKNLPNEKVLPKHSLLYEYFTVYNELTKVKYVTEGMRKPAFLSGEQKKAIVDLLFKTNRKVTVKQLKEDYFKKIECFDSVEISGVEDRFNASLGTYHDLLKIIKDKDFLDNEENEDILEDIVLTLTLFEDREMIEERLKTYAHLFDDKVMKQLKRRRYTGWGRLSRKLINGIRDKQSGKTILDFLKSDGFANRNFMQLIHDDSLTFKEDIQKAQVSGQGDSLHEHIANLAGSPAIKKGILQTVKVVDELVKVMGRHKPENIVIEMARENQTTQKGQKNSRERMKRIEEGIKELGSQILKEHPVENTQLQNEKLYLYYLQNGRDMYVDQELDINRLSDYDVDHIVPQSFLKDDSIDNKVLTRSDKARGKSDNVPSEEVVKKMKNYWRQLLNAKLITQRKFDNLTKAERGGLSELDKAGFIKRQLVETRQITKHVAQILDSRMNTKYDENDKLIREVKVITLKSKLVSDFRKDFQFYKVREINNYHHAHDAYLNAVVGTALIKKYPKLESEFVYGDYKVYDVRKMIAKSEQEIGKATAKYFFYSNIMNFFKTEITLANGEIRKRPLIETNGETGEIVWDKGRDFATVRKVLSMPQVNIVKKTEVQTGGFSKESILPKRNSDKLIARKKDWDPKKYGGFDSPTVAYSVLVVAKVEKGKSKKLKSVKELLGITIMERSSFEKNPIDFLEAKGYKEVKKDLIIKLPKYSLFELENGRKRMLASAGELQKGNELALPSKYVNFLYLASHYEKLKGSPEDNEQKQLFVEQHKHYLDEIIEQISEFSKRVILADANLDKVLSAYNKHRDKPIREQAENIIHLFTLTNLGAPAAFKYFDTTIDRKRYTSTKEVLDATLIHQSITGLYETRIDLSQLGGDGGGGSEAAAKGGTLNIEDEYRLHETSKEPDVSLGSTWLSDFPQAWAETGGMGLAVRQAPLIIPLKATSTPVSIKQYPMSQEARLGIKPHIQRLLDQGILVPCQSPWNTPLLPVKKPGTNDYRPVQDLREVNKRVEDIHPTVPNPYNLLSGLPPSHQWYTVLDLKDAFFCLRLHPTSQPLFAFEWRDPEMGISGQLTWTRLPQGFKNSPTLFNEALHRDLADFRIQHPDLILLQYVDDLLLAATSELDCQQGTRALLQTLGNLGYRASAKKAQICQKQVKYLGYLLKEGQRWLTEARKETVMGQPTPKTPRQLREFLGKAGFCRLFIPGFAEMAAPLYPLTKPGTLFNWGPDQQKAYQEIKQALLTAPALGLPDLTKPFELFVDEKQGYAKGVLTQKLGPWRRPVAYLSKKLDPVAAGWPPCLRMVAAIAVLTKDAGKLTMGQPLVILAPHAVEALVKQPPDRWLSNARMTHYQALLLDTDRVQFGPVVALNPATLLPLPEEGLQHNCLDILAEAHGTRPDLTDQPLPDADHTWYTDGSSLLQEGQRKAGAAVTTETEVIWAKALPAGTSAQRAELIALTQALKMAEGKKLNVYTDSRYAFATAHIHGEIYRRRGWLTSEGKEIKNKDEILALLKALFLPKRLSIIHCPGHQKGHSAEARGNRMADQAARKAAITETPDTSTLLIENSSPSGGSKRTADGSEFEAGKRTADGSEFEKRTADGSEFESPKKKAKVE

SEQ ID NO: 2701 - protein, 2116 aa, synthetic construct
MPAAKRVKLDGGDKKYSIGLDIGTNSVGWAVITDEYKVPSKKFKVLGNTDRHSIKKNLIGALLFDSGETAEATRLKRTARRRYTRRKNRICYLQEIFSNEMAKVDDSFFHRLEESFLVEEDKKHERHPIFGNIVDEVAYHEKYPTIYHLRKKLVDSTDKADLRLIYLALAHMIKFRGHFLIEGDLNPDNSDVDKLFIQLVQTYNQLFEENPINASGVDAKAILSARLSKSRRLENLIAQLPGEKKNGLFGNLIALSLGLTPNFKSNFDLAEDAKLQLSKDTYDDDLDNLLAQIGDQYADLFLAAKNLSDAILLSDILRVNTEITKAPLSASMIKRYDEHHQDLTLLKALVRQQLPEKYKEIFFDQSKNGYAGYIDGGASQEEFYKFIKPILEKMDGTEELLVKLNREDLLRKQRTFDNGSIPHQIHLGELHAILRRQEDFYPFLKDNREKIEKILTFRIPYYVGPLARGNSRFAWMTRKSEETITPWNFEEVVDKGASAQSFIERMTNFDKNLPNEKVLPKHSLLYEYFTVYNELTKVKYVTEGMRKPAFLSGEQKKAIVDLLFKTNRKVTVKQLKEDYFKKIECFDSVEISGVEDRFNASLGTYHDLLKIIKDKDFLDNEENEDILEDIVLTLTLFEDREMIEERLKTYAHLFDDKVMKQLKRRRYTGWGRLSRKLINGIRDKQSGKTILDFLKSDGFANRNFMQLIHDDSLTFKEDIQKAQVSGQGDSLHEHIANLAGSPAIKKGILQTVKVVDELVKVMGRHKPENIVIEMARENQTTQKGQKNSRERMKRIEEGIKELGSQILKEHPVENTQLQNEKLYLYYLQNGRDMYVDQELDINRLSDYDVDHIVPQSFLKDDSIDNKVLTRSDKARGKSDNVPSEEVVKKMKNYWRQLLNAKLITQRKFDNLTKAERGGLSELDKAGFIKRQLVETRQITKHVAQILDSRMNTKYDENDKLIREVKVITLKSKLVSDFRKDFQFYKVREINNYHHAHDAYLNAVVGTALIKKYPKLESEFVYGDYKVYDVRKMIAKSEQEIGKATAKYFFYSNIMNFFKTEITLANGEIRKRPLIETNGETGEIVWDKGRDFATVRKVLSMPQVNIVKKTEVQTGGFSKESILPKRNSDKLIARKKDWDPKKYGGFDSPTVAYSVLVVAKVEKGKSKKLKSVKELLGITIMERSSFEKNPIDFLEAKGYKEVKKDLIIKLPKYSLFELENGRKRMLASAGELQKGNELALPSKYVNFLYLASHYEKLKGSPEDNEQKQLFVEQHKHYLDEIIEQISEFSKRVILADANLDKVLSAYNKHRDKPIREQAENIIHLFTLTNLGAPAAFKYFDTTIDRKRYTSTKEVLDATLIHQSITGLYETRIDLSQLGGDGGGGSPAPEAAAKGGTLNIEDEYRLHETSKEPDVSLGSTWLSDFPQAWAETGGMGLAVRQAPLIIPLKATSTPVSIKQYPMSQEARLGIKPHIQRLLDQGILVPCQSPWNTPLLPVKKPGTNDYRPVQDLREVNKRVEDIHPTVPNPYNLLSGLPPSHQWYTVLDLKDAFFCLRLHPTSQPLFAFEWRDPEMGISGQLTWTRLPQGFKNSPTLFNEALHRDLADFRIQHPDLILLQYVDDLLLAATSELDCQQGTRALLQTLGNLGYRASAKKAQICQKQVKYLGYLLKEGQRWLTEARKETVMGQPTPKTPRQLREFLGKAGFCRLFIPGFAEMAAPLYPLTKPGTLFNWGPDQQKAYQEIKQALLTAPALGLPDLTKPFELFVDEKQGYAKGVLTQKLGPWRRPVAYLSKKLDPVAAGWPPCLRMVAAIAVLTKDAGKLTMGQPLVILAPHAVEALVKQPPDRWLSNARMTHYQALLLDTDRVQFGPVVALNPATLLPLPEEGLQHNCLDILAEAHGTRPDLTDQPLPDADHTWYTDGSSLLQEGQRKAGAAVTTETEVIWAKALPAGTSAQRAELIALTQALKMAEGKKLNVYTDSRYAFATAHIHGEIYRRRGWLTSEGKEIKNKDEILALLKALFLPKRLSIIHCPGHQKGHSAEARGNRMADQAARKAAITETPDTSTLLIENSSPSGGSKRTADGSEFEAGKRTADGSEFEKRTADGSEFESPKKKAKVE

SEQ ID NO: 2702 - protein, 2114 aa, synthetic construct
MPAAKRVKLDGGDKKYSIGLDIGTNSVGWAVITDEYKVPSKKFKVLGNTDRHSIKKNLIGALLFDSGETAEATRLKRTARRRYTRRKNRICYLQEIFSNEMAKVDDSFFHRLEESFLVEEDKKHERHPIFGNIVDEVAYHEKYPTIYHLRKKLVDSTDKADLRLIYLALAHMIKFRGHFLIEGDLNPDNSDVDKLFIQLVQTYNQLFEENPINASGVDAKAILSARLSKSRRLENLIAQLPGEKKNGLFGNLIALSLGLTPNFKSNFDLAEDAKLQLSKDTYDDDLDNLLAQIGDQYADLFLAAKNLSDAILLSDILRVNTEITKAPLSASMIKRYDEHHQDLTLLKALVRQQLPEKYKEIFFDQSKNGYAGYIDGGASQEEFYKFIKPILEKMDGTEELLVKLNREDLLRKQRTFDNGSIPHQIHLGELHAILRRQEDFYPFLKDNREKIEKILTFRIPYYVGPLARGNSRFAWMTRKSEETITPWNFEEVVDKGASAQSFIERMTNFDKNLPNEKVLPKHSLLYEYFTVYNELTKVKYVTEGMRKPAFLSGEQKKAIVDLLFKTNRKVTVKQLKEDYFKKIECFDSVEISGVEDRFNASLGTYHDLLKIIKDKDFLDNEENEDILEDIVLTLTLFEDREMIEERLKTYAHLFDDKVMKQLKRRRYTGWGRLSRKLINGIRDKQSGKTILDFLKSDGFANRNFMQLIHDDSLTFKEDIQKAQVSGQGDSLHEHIANLAGSPAIKKGILQTVKVVDELVKVMGRHKPENIVIEMARENQTTQKGQKNSRERMKRIEEGIKELGSQILKEHPVENTQLQNEKLYLYYLQNGRDMYVDQELDINRLSDYDVDHIVPQSFLKDDSIDNKVLTRSDKARGKSDNVPSEEVVKKMKNYWRQLLNAKLITQRKFDNLTKAERGGLSELDKAGFIKRQLVETRQITKHVAQILDSRMNTKYDENDKLIREVKVITLKSKLVSDFRKDFQFYKVREINNYHHAHDAYLNAVVGTALIKKYPKLESEFVYGDYKVYDVRKMIAKSEQEIGKATAKYFFYSNIMNFFKTEITLANGEIRKRPLIETNGETGEIVWDKGRDFATVRKVLSMPQVNIVKKTEVQTGGFSKESILPKRNSDKLIARKKDWDPKKYGGFDSPTVAYSVLVVAKVEKGKSKKLKSVKELLGITIMERSSFEKNPIDFLEAKGYKEVKKDLIIKLPKYSLFELENGRKRMLASAGELQKGNELALPSKYVNFLYLASHYEKLKGSPEDNEQKQLFVEQHKHYLDEIIEQISEFSKRVILADANLDKVLSAYNKHRDKPIREQAENIIHLFTLTNLGAPAAFKYFDTTIDRKRYTSTKEVLDATLIHQSITGLYETRIDLSQLGGDGGGGSGGGGSSGGTLNIEDEYRLHETSKEPDVSLGSTWLSDFPQAWAETGGMGLAVRQAPLIIPLKATSTPVSIKQYPMSQEARLGIKPHIQRLLDQGILVPCQSPWNTPLLPVKKPGTNDYRPVQDLREVNKRVEDIHPTVPNPYNLLSGLPPSHQWYTVLDLKDAFFCLRLHPTSQPLFAFEWRDPEMGISGQLTWTRLPQGFKNSPTLFNEALHRDLADFRIQHPDLILLQYVDDLLLAATSELDCQQGTRALLQTLGNLGYRASAKKAQICQKQVKYLGYLLKEGQRWLTEARKETVMGQPTPKTPRQLREFLGKAGFCRLFIPGFAEMAAPLYPLTKPGTLFNWGPDQQKAYQEIKQALLTAPALGLPDLTKPFELFVDEKQGYAKGVLTQKLGPWRRPVAYLSKKLDPVAAGWPPCLRMVAAIAVLTKDAGKLTMGQPLVILAPHAVEALVKQPPDRWLSNARMTHYQALLLDTDRVQFGPVVALNPATLLPLPEEGLQHNCLDILAEAHGTRPDLTDQPLPDADHTWYTDGSSLLQEGQRKAGAAVTTETEVIWAKALPAGTSAQRAELIALTQALKMAEGKKLNVYTDSRYAFATAHIHGEIYRRRGWLTSEGKEIKNKDEILALLKALFLPKRLSIIHCPGHQKGHSAEARGNRMADQAARKAAITETPDTSTLLIENSSPSGGSKRTADGSEFEAGKRTADGSEFEKRTADGSEFESPKKKAKVE

SEQ ID NO: 2703 - protein, 2116 aa, synthetic construct
MPAAKRVKLDGGDKKYSIGLDIGTNSVGWAVITDEYKVPSKKFKVLGNTDRHSIKKNLIGALLFDSGETAEATRLKRTARRRYTRRKNRICYLQEIFSNEMAKVDDSFFHRLEESFLVEEDKKHERHPIFGNIVDEVAYHEKYPTIYHLRKKLVDSTDKADLRLIYLALAHMIKFRGHFLIEGDLNPDNSDVDKLFIQLVQTYNQLFEENPINASGVDAKAILSARLSKSRRLENLIAQLPGEKKNGLFGNLIALSLGLTPNFKSNFDLAEDAKLQLSKDTYDDDLDNLLAQIGDQYADLFLAAKNLSDAILLSDILRVNTEITKAPLSASMIKRYDEHHQDLTLLKALVRQQLPEKYKEIFFDQSKNGYAGYIDGGASQEEFYKFIKPILEKMDGTEELLVKLNREDLLRKQRTFDNGSIPHQIHLGELHAILRRQEDFYPFLKDNREKIEKILTFRIPYYVGPLARGNSRFAWMTRKSEETITPWNFEEVVDKGASAQSFIERMTNFDKNLPNEKVLPKHSLLYEYFTVYNELTKVKYVTEGMRKPAFLSGEQKKAIVDLLFKTNRKVTVKQLKEDYFKKIECFDSVEISGVEDRFNASLGTYHDLLKIIKDKDFLDNEENEDILEDIVLTLTLFEDREMIEERLKTYAHLFDDKVMKQLKRRRYTGWGRLSRKLINGIRDKQSGKTILDFLKSDGFANRNFMQLIHDDSLTFKEDIQKAQVSGQGDSLHEHIANLAGSPAIKKGILQTVKVVDELVKVMGRHKPENIVIEMARENQTTQKGQKNSRERMKRIEEGIKELGSQILKEHPVENTQLQNEKLYLYYLQNGRDMYVDQELDINRLSDYDVDHIVPQSFLKDDSIDNKVLTRSDKARGKSDNVPSEEVVKKMKNYWRQLLNAKLITQRKFDNLTKAERGGLSELDKAGFIKRQLVETRQITKHVAQILDSRMNTKYDENDKLIREVKVITLKSKLVSDFRKDFQFYKVREINNYHHAHDAYLNAVVGTALIKKYPKLESEFVYGDYKVYDVRKMIAKSEQEIGKATAKYFFYSNIMNFFKTEITLANGEIRKRPLIETNGETGEIVWDKGRDFATVRKVLSMPQVNIVKKTEVQTGGFSKESILPKRNSDKLIARKKDWDPKKYGGFDSPTVAYSVLVVAKVEKGKSKKLKSVKELLGITIMERSSFEKNPIDFLEAKGYKEVKKDLIIKLPKYSLFELENGRKRMLASAGELQKGNELALPSKYVNFLYLASHYEKLKGSPEDNEQKQLFVEQHKHYLDEIIEQISEFSKRVILADANLDKVLSAYNKHRDKPIREQAENIIHLFTLTNLGAPAAFKYFDTTIDRKRYTSTKEVLDATLIHQSITGLYETRIDLSQLGGDGGGSSEAAAKGGSGGTLNIEDEYRLHETSKEPDVSLGSTWLSDFPQAWAETGGMGLAVRQAPLIIPLKATSTPVSIKQYPMSQEARLGIKPHIQRLLDQGILVPCQSPWNTPLLPVKKPGTNDYRPVQDLREVNKRVEDIHPTVPNPYNLLSGLPPSHQWYTVLDLKDAFFCLRLHPTSQPLFAFEWRDPEMGISGQLTWTRLPQGFKNSPTLFNEALHRDLADFRIQHPDLILLQYVDDLLLAATSELDCQQGTRALLQTLGNLGYRASAKKAQICQKQVKYLGYLLKEGQRWLTEARKETVMGQPTPKTPRQLREFLGKAGFCRLFIPGFAEMAAPLYPLTKPGTLFNWGPDQQKAYQEIKQALLTAPALGLPDLTKPFELFVDEKQGYAKGVLTQKLGPWRRPVAYLSKKLDPVAAGWPPCLRMVAAIAVLTKDAGKLTMGQPLVILAPHAVEALVKQPPDRWLSNARMTHYQALLLDTDRVQFGPVVALNPATLLPLPEEGLQHNCLDILAEAHGTRPDLTDQPLPDADHTWYTDGSSLLQEGQRKAGAAVTTETEVIWAKALPAGTSAQRAELIALTQALKMAEGKKLNVYTDSRYAFATAHIHGEIYRRRGWLTSEGKEIKNKDEILALLKALFLPKRLSIIHCPGHQKGHSAEARGNRMADQAARKAAITETPDTSTLLIENSSPSGGSKRTADGSEFEAGKRTADGSEFEKRTADGSEFESPKKKAKVE

SEQ ID NO: 2704 - protein, 2094 aa, synthetic construct
MPAAKRVKLDGGDKKYSIGLDIGTNSVGWAVITDEYKVPSKKFKVLGNTDRHSIKKNLIGALLFDSGETAEATRLKRTARRRYTRRKNRICYLQEIFSNEMAKVDDSFFHRLEESFLVEEDKKHERHPIFGNIVDEVAYHEKYPTIYHLRKKLVDSTDKADLRLIYLALAHMIKFRGHFLIEGDLNPDNSDVDKLFIQLVQTYNQLFEENPINASGVDAKAILSARLSKSRRLENLIAQLPGEKKNGLFGNLIALSLGLTPNFKSNFDLAEDAKLQLSKDTYDDDLDNLLAQIGDQYADLFLAAKNLSDAILLSDILRVNTEITKAPLSASMIKRYDEHHQDLTLLKALVRQQLPEKYKEIFFDQSKNGYAGYIDGGASQEEFYKFIKPILEKMDGTEELLVKLNREDLLRKQRTFDNGSIPHQIHLGELHAILRRQEDFYPFLKDNREKIEKILTFRIPYYVGPLARGNSRFAWMTRKSEETITPWNFEEVVDKGASAQSFIERMTNFDKNLPNEKVLPKHSLLYEYFTVYNELTKVKYVTEGMRKPAFLSGEQKKAIVDLLFKTNRKVTVKQLKEDYFKKIECFDSVEISGVEDRFNASLGTYHDLLKIIKDKDFLDNEENEDILEDIVLTLTLFEDREMIEERLKTYAHLFDDKVMKQLKRRRYTGWGRLSRKLINGIRDKQSGKTILDFLKSDGFANRNFMQLIHDDSLTFKEDIQKAQVSGQGDSLHEHIANLAGSPAIKKGILQTVKVVDELVKVMGRHKPENIVIEMARENQTTQKGQKNSRERMKRIEEGIKELGSQILKEHPVENTQLQNEKLYLYYLQNGRDMYVDQELDINRLSDYDVDHIVPQSFLKDDSIDNKVLTRSDKARGKSDNVPSEEVVKKMKNYWRQLLNAKLITQRKFDNLTKAERGGLSELDKAGFIKRQLVETRQITKHVAQILDSRMNTKYDENDKLIREVKVITLKSKLVSDFRKDFQFYKVREINNYHHAHDAYLNAVVGTALIKKYPKLESEFVYGDYKVYDVRKMIAKSEQEIGKATAKYFFYSNIMNFFKTEITLANGEIRKRPLIETNGETGEIVWDKGRDFATVRKVLSMPQVNIVKKTEVQTGGFSKESILPKRNSDKLIARKKDWDPKKYGGFDSPTVAYSVLVVAKVEKGKSKKLKSVKELLGITIMERSSFEKNPIDFLEAKGYKEVKKDLIIKLPKYSLFELENGRKRMLASAGELQKGNELALPSKYVNFLYLASHYEKLKGSPEDNEQKQLFVEQHKHYLDEIIEQISEFSKRVILADANLDKVLSAYNKHRDKPIREQAENIIHLFTLTNLGAPAAFKYFDTTIDRKRYTSTKEVLDATLIHQSITGLYETRIDLSQLGGDGGGGSPAPGSSGGTLNIEDEHRLHETSKEPDVSLGSTWLSDFPQAWAETGGMGLAVRQAPLIIPLKATSTPVSIKQYPMSQEARLGIKPHIQRLLDQGILVPCQSPWNTPLLPVKKPGTNDYRPVQDLREVNKRVEDIHPTVPNPYNLLSGLPPSHQWYTVLDLKDAFFCLRLHPTSQPLFAFEWRDPEMGISGQLTWTRLPQGFKNSPTLFDEALHRDLADFRIQHPDLILLQYVDDLLLAATSELDCQQGTRALLQTLGNLGYRASAKKAQICQKQVKYLGYLLKEGQRWLTEARKETVMGQPTPKTPRQLREFLGTAGFCRLWIPGFAEMAAPLYPLTKTGTLFNWGPDQQKAYQEIKQALLTAPALGLPDLTKPFELFVDEKQGYAKGVLTQKLGPWRRPVAYLSKKLDPVAAGWPPCLRMVAAIAVLTKDAGKLTMGQPLVILAPHAVEALVKQPPDRWLSNARMTHYQALLLDTDRVQFGPVVALNPATLLPLPEEGLQHNCLDILAEAHGTRPDLTDQPLPDADHTWYTDGSSLLQEGQRKAGAAVTTETEVIWAKALPAGTSAQRAELIALTQALKMAEGKKLNVYTDSRYAFATAHIHGEIYRRRGLLTSEGKEIKNKDEILALLKALFLPKRLSIIHCPGHQKGHSAEARGNRMADQAARKAAITETPDTSTLLAGKRTADGSEFEKRTADGSEFESPKKKAKVE

SEQ ID NO: 2705 - protein, 2096 aa, synthetic construct
MPAAKRVKLDGGDKKYSIGLDIGTNSVGWAVITDEYKVPSKKFKVLGNTDRHSIKKNLIGALLFDSGETAEATRLKRTARRRYTRRKNRICYLQEIFSNEMAKVDDSFFHRLEESFLVEEDKKHERHPIFGNIVDEVAYHEKYPTIYHLRKKLVDSTDKADLRLIYLALAHMIKFRGHFLIEGDLNPDNSDVDKLFIQLVQTYNQLFEENPINASGVDAKAILSARLSKSRRLENLIAQLPGEKKNGLFGNLIALSLGLTPNFKSNFDLAEDAKLQLSKDTYDDDLDNLLAQIGDQYADLFLAAKNLSDAILLSDILRVNTEITKAPLSASMIKRYDEHHQDLTLLKALVRQQLPEKYKEIFFDQSKNGYAGYIDGGASQEEFYKFIKPILEKMDGTEELLVKLNREDLLRKQRTFDNGSIPHQIHLGELHAILRRQEDFYPFLKDNREKIEKILTFRIPYYVGPLARGNSRFAWMTRKSEETITPWNFEEVVDKGASAQSFIERMTNFDKNLPNEKVLPKHSLLYEYFTVYNELTKVKYVTEGMRKPAFLSGEQKKAIVDLLFKTNRKVTVKQLKEDYFKKIECFDSVEISGVEDRFNASLGTYHDLLKIIKDKDFLDNEENEDILEDIVLTLTLFEDREMIEERLKTYAHLFDDKVMKQLKRRRYTGWGRLSRKLINGIRDKQSGKTILDFLKSDGFANRNFMQLIHDDSLTFKEDIQKAQVSGQGDSLHEHIANLAGSPAIKKGILQTVKVVDELVKVMGRHKPENIVIEMARENQTTQKGQKNSRERMKRIEEGIKELGSQILKEHPVENTQLQNEKLYLYYLQNGRDMYVDQELDINRLSDYDVDHIVPQSFLKDDSIDNKVLTRSDKARGKSDNVPSEEVVKKMKNYWRQLLNAKLITQRKFDNLTKAERGGLSELDKAGFIKRQLVETRQITKHVAQILDSRMNTKYDENDKLIREVKVITLKSKLVSDFRKDFQFYKVREINNYHHAHDAYLNAVVGTALIKKYPKLESEFVYGDYKVYDVRKMIAKSEQEIGKATAKYFFYSNIMNFFKTEITLANGEIRKRPLIETNGETGEIVWDKGRDFATVRKVLSMPQVNIVKKTEVQTGGFSKESILPKRNSDKLIARKKDWDPKKYGGFDSPTVAYSVLVVAKVEKGKSKKLKSVKELLGITIMERSSFEKNPIDFLEAKGYKEVKKDLIIKLPKYSLFELENGRKRMLASAGELQKGNELALPSKYVNFLYLASHYEKLKGSPEDNEQKQLFVEQHKHYLDEIIEQISEFSKRVILADANLDKVLSAYNKHRDKPIREQAENIIHLFTLTNLGAPAAFKYFDTTIDRKRYTSTKEVLDATLIHQSITGLYETRIDLSQLGGDGGEAAAKGSSGGGGGTLNIEDEHRLHETSKEPDVSLGSTWLSDFPQAWAETGGMGLAVRQAPLIIPLKATSTPVSIKQYPMSQEARLGIKPHIQRLLDQGILVPCQSPWNTPLLPVKKPGTNDYRPVQDLREVNKRVEDIHPTVPNPYNLLSGLPPSHQWYTVLDLKDAFFCLRLHPTSQPLFAFEWRDPEMGISGQLTWTRLPQGFKNSPTLFDEALHRDLADFRIQHPDLILLQYVDDLLLAATSELDCQQGTRALLQTLGNLGYRASAKKAQICQKQVKYLGYLLKEGQRWLTEARKETVMGQPTPKTPRQLREFLGTAGFCRLWIPGFAEMAAPLYPLTKTGTLFNWGPDQQKAYQEIKQALLTAPALGLPDLTKPFELFVDEKQGYAKGVLTQKLGPWRRPVAYLSKKLDPVAAGWPPCLRMVAAIAVLTKDAGKLTMGQPLVILAPHAVEALVKQPPDRWLSNARMTHYQALLLDTDRVQFGPVVALNPATLLPLPEEGLQHNCLDILAEAHGTRPDLTDQPLPDADHTWYTDGSSLLQEGQRKAGAAVTTETEVIWAKALPAGTSAQRAELIALTQALKMAEGKKLNVYTDSRYAFATAHIHGEIYRRRGLLTSEGKEIKNKDEILALLKALFLPKRLSIIHCPGHQKGHSAEARGNRMADQAARKAAITETPDTSTLLAGKRTADGSEFEKRTADGSEFESPKKKAKVE

SEQ ID NO: 2706 - protein, 2096 aa, synthetic construct
MPAAKRVKLDGGDKKYSIGLDIGTNSVGWAVITDEYKVPSKKFKVLGNTDRHSIKKNLIGALLFDSGETAEATRLKRTARRRYTRRKNRICYLQEIFSNEMAKVDDSFFHRLEESFLVEEDKKHERHPIFGNIVDEVAYHEKYPTIYHLRKKLVDSTDKADLRLIYLALAHMIKFRGHFLIEGDLNPDNSDVDKLFIQLVQTYNQLFEENPINASGVDAKAILSARLSKSRRLENLIAQLPGEKKNGLFGNLIALSLGLTPNFKSNFDLAEDAKLQLSKDTYDDDLDNLLAQIGDQYADLFLAAKNLSDAILLSDILRVNTEITKAPLSASMIKRYDEHHQDLTLLKALVRQQLPEKYKEIFFDQSKNGYAGYIDGGASQEEFYKFIKPILEKMDGTEELLVKLNREDLLRKQRTFDNGSIPHQIHLGELHAILRRQEDFYPFLKDNREKIEKILTFRIPYYVGPLARGNSRFAWMTRKSEETITPWNFEEVVDKGASAQSFIERMTNFDKNLPNEKVLPKHSLLYEYFTVYNELTKVKYVTEGMRKPAFLSGEQKKAIVDLLFKTNRKVTVKQLKEDYFKKIECFDSVEISGVEDRFNASLGTYHDLLKIIKDKDFLDNEENEDILEDIVLTLTLFEDREMIEERLKTYAHLFDDKVMKQLKRRRYTGWGRLSRKLINGIRDKQSGKTILDFLKSDGFANRNFMQLIHDDSLTFKEDIQKAQVSGQGDSLHEHIANLAGSPAIKKGILQTVKVVDELVKVMGRHKPENIVIEMARENQTTQKGQKNSRERMKRIEEGIKELGSQILKEHPVENTQLQNEKLYLYYLQNGRDMYVDQELDINRLSDYDVDHIVPQSFLKDDSIDNKVLTRSDKARGKSDNVPSEEVVKKMKNYWRQLLNAKLITQRKFDNLTKAERGGLSELDKAGFIKRQLVETRQITKHVAQILDSRMNTKYDENDKLIREVKVITLKSKLVSDFRKDFQFYKVREINNYHHAHDAYLNAVVGTALIKKYPKLESEFVYGDYKVYDVRKMIAKSEQEIGKATAKYFFYSNIMNFFKTEITLANGEIRKRPLIETNGETGEIVWDKGRDFATVRKVLSMPQVNIVKKTEVQTGGFSKESILPKRNSDKLIARKKDWDPKKYGGFDSPTVAYSVLVVAKVEKGKSKKLKSVKELLGITIMERSSFEKNPIDFLEAKGYKEVKKDLIIKLPKYSLFELENGRKRMLASAGELQKGNELALPSKYVNFLYLASHYEKLKGSPEDNEQKQLFVEQHKHYLDEIIEQISEFSKRVILADANLDKVLSAYNKHRDKPIREQAENIIHLFTLTNLGAPAAFKYFDTTIDRKRYTSTKEVLDATLIHQSITGLYETRIDLSQLGGDGGGSSGGGEAAAKGGTLNIEDEHRLHETSKEPDVSLGSTWLSDFPQAWAETGGMGLAVRQAPLIIPLKATSTPVSIKQYPMSQEARLGIKPHIQRLLDQGILVPCQSPWNTPLLPVKKPGTNDYRPVQDLREVNKRVEDIHPTVPNPYNLLSGLPPSHQWYTVLDLKDAFFCLRLHPTSQPLFAFEWRDPEMGISGQLTWTRLPQGFKNSPTLFDEALHRDLADFRIQHPDLILLQYVDDLLLAATSELDCQQGTRALLQTLGNLGYRASAKKAQICQKQVKYLGYLLKEGQRWLTEARKETVMGQPTPKTPRQLREFLGTAGFCRLWIPGFAEMAAPLYPLTKTGTLFNWGPDQQKAYQEIKQALLTAPALGLPDLTKPFELFVDEKQGYAKGVLTQKLGPWRRPVAYLSKKLDPVAAGWPPCLRMVAAIAVLTKDAGKLTMGQPLVILAPHAVEALVKQPPDRWLSNARMTHYQALLLDTDRVQFGPVVALNPATLLPLPEEGLQHNCLDILAEAHGTRPDLTDQPLPDADHTWYTDGSSLLQEGQRKAGAAVTTETEVIWAKALPAGTSAQRAELIALTQALKMAEGKKLNVYTDSRYAFATAHIHGEIYRRRGLLTSEGKEIKNKDEILALLKALFLPKRLSIIHCPGHQKGHSAEARGNRMADQAARKAAITETPDTSTLLAGKRTADGSEFEKRTADGSEFESPKKKAKVE

SEQ ID NO: 2707 - protein, 2093 aa, synthetic construct
MPAAKRVKLDGGDKKYSIGLDIGTNSVGWAVITDEYKVPSKKFKVLGNTDRHSIKKNLIGALLFDSGETAEATRLKRTARRRYTRRKNRICYLQEIFSNEMAKVDDSFFHRLEESFLVEEDKKHERHPIFGNIVDEVAYHEKYPTIYHLRKKLVDSTDKADLRLIYLALAHMIKFRGHFLIEGDLNPDNSDVDKLFIQLVQTYNQLFEENPINASGVDAKAILSARLSKSRRLENLIAQLPGEKKNGLFGNLIALSLGLTPNFKSNFDLAEDAKLQLSKDTYDDDLDNLLAQIGDQYADLFLAAKNLSDAILLSDILRVNTEITKAPLSASMIKRYDEHHQDLTLLKALVRQQLPEKYKEIFFDQSKNGYAGYIDGGASQEEFYKFIKPILEKMDGTEELLVKLNREDLLRKQRTFDNGSIPHQIHLGELHAILRRQEDFYPFLKDNREKIEKILTFRIPYYVGPLARGNSRFAWMTRKSEETITPWNFEEVVDKGASAQSFIERMTNFDKNLPNEKVLPKHSLLYEYFTVYNELTKVKYVTEGMRKPAFLSGEQKKAIVDLLFKTNRKVTVKQLKEDYFKKIECFDSVEISGVEDRFNASLGTYHDLLKIIKDKDFLDNEENEDILEDIVLTLTLFEDREMIEERLKTYAHLFDDKVMKQLKRRRYTGWGRLSRKLINGIRDKQSGKTILDFLKSDGFANRNFMQLIHDDSLTFKEDIQKAQVSGQGDSLHEHIANLAGSPAIKKGILQTVKVVDELVKVMGRHKPENIVIEMARENQTTQKGQKNSRERMKRIEEGIKELGSQILKEHPVENTQLQNEKLYLYYLQNGRDMYVDQELDINRLSDYDVDHIVPQSFLKDDSIDNKVLTRSDKARGKSDNVPSEEVVKKMKNYWRQLLNAKLITQRKFDNLTKAERGGLSELDKAGFIKRQLVETRQITKHVAQILDSRMNTKYDENDKLIREVKVITLKSKLVSDFRKDFQFYKVREINNYHHAHDAYLNAVVGTALIKKYPKLESEFVYGDYKVYDVRKMIAKSEQEIGKATAKYFFYSNIMNFFKTEITLANGEIRKRPLIETNGETGEIVWDKGRDFATVRKVLSMPQVNIVKKTEVQTGGFSKESILPKRNSDKLIARKKDWDPKKYGGFDSPTVAYSVLVVAKVEKGKSKKLKSVKELLGITIMERSSFEKNPIDFLEAKGYKEVKKDLIIKLPKYSLFELENGRKRMLASAGELQKGNELALPSKYVNFLYLASHYEKLKGSPEDNEQKQLFVEQHKHYLDEIIEQISEFSKRVILADANLDKVLSAYNKHRDKPIREQAENIIHLFTLTNLGAPAAFKYFDTTIDRKRYTSTKEVLDATLIHQSITGLYETRIDLSQLGGDGGEAAAKGSSGGTLNIEDEHRLHETSKEPDVSLGSTWLSDFPQAWAETGGMGLAVRQAPLIIPLKATSTPVSIKQYPMSQEARLGIKPHIQRLLDQGILVPCQSPWNTPLLPVKKPGTNDYRPVQDLREVNKRVEDIHPTVPNPYNLLSGLPPSHQWYTVLDLKDAFFCLRLHPTSQPLFAFEWRDPEMGISGQLTWTRLPQGFKNSPTLFDEALHRDLADFRIQHPDLILLQYVDDLLLAATSELDCQQGTRALLQTLGNLGYRASAKKAQICQKQVKYLGYLLKEGQRWLTEARKETVMGQPTPKTPRQLREFLGTAGFCRLWIPGFAEMAAPLYPLTKTGTLFNWGPDQQKAYQEIKQALLTAPALGLPDLTKPFELFVDEKQGYAKGVLTQKLGPWRRPVAYLSKKLDPVAAGWPPCLRMVAAIAVLTKDAGKLTMGQPLVILAPHAVEALVKQPPDRWLSNARMTHYQALLLDTDRVQFGPVVALNPATLLPLPEEGLQHNCLDILAEAHGTRPDLTDQPLPDADHTWYTDGSSLLQEGQRKAGAAVTTETEVIWAKALPAGTSAQRAELIALTQALKMAEGKKLNVYTDSRYAFATAHIHGEIYRRRGLLTSEGKEIKNKDEILALLKALFLPKRLSIIHCPGHQKGHSAEARGNRMADQAARKAAITETPDTSTLLAGKRTADGSEFEKRTADGSEFESPKKKAKVE

SEQ ID NO: 2708 - protein, 2096 aa, synthetic construct
MPAAKRVKLDGGDKKYSIGLDIGTNSVGWAVITDEYKVPSKKFKVLGNTDRHSIKKNLIGALLFDSGETAEATRLKRTARRRYTRRKNRICYLQEIFSNEMAKVDDSFFHRLEESFLVEEDKKHERHPIFGNIVDEVAYHEKYPTIYHLRKKLVDSTDKADLRLIYLALAHMIKFRGHFLIEGDLNPDNSDVDKLFIQLVQTYNQLFEENPINASGVDAKAILSARLSKSRRLENLIAQLPGEKKNGLFGNLIALSLGLTPNFKSNFDLAEDAKLQLSKDTYDDDLDNLLAQIGDQYADLFLAAKNLSDAILLSDILRVNTEITKAPLSASMIKRYDEHHQDLTLLKALVRQQLPEKYKEIFFDQSKNGYAGYIDGGASQEEFYKFIKPILEKMDGTEELLVKLNREDLLRKQRTFDNGSIPHQIHLGELHAILRRQEDFYPFLKDNREKIEKILTFRIPYYVGPLARGNSRFAWMTRKSEETITPWNFEEVVDKGASAQSFIERMTNFDKNLPNEKVLPKHSLLYEYFTVYNELTKVKYVTEGMRKPAFLSGEQKKAIVDLLFKTNRKVTVKQLKEDYFKKIECFDSVEISGVEDRFNASLGTYHDLLKIIKDKDFLDNEENEDILEDIVLTLTLFEDREMIEERLKTYAHLFDDKVMKQLKRRRYTGWGRLSRKLINGIRDKQSGKTILDFLKSDGFANRNFMQLIHDDSLTFKEDIQKAQVSGQGDSLHEHIANLAGSPAIKKGILQTVKVVDELVKVMGRHKPENIVIEMARENQTTQKGQKNSRERMKRIEEGIKELGSQILKEHPVENTQLQNEKLYLYYLQNGRDMYVDQELDINRLSDYDVDHIVPQSFLKDDSIDNKVLTRSDKARGKSDNVPSEEVVKKMKNYWRQLLNAKLITQRKFDNLTKAERGGLSELDKAGFIKRQLVETRQITKHVAQILDSRMNTKYDENDKLIREVKVITLKSKLVSDFRKDFQFYKVREINNYHHAHDAYLNAVVGTALIKKYPKLESEFVYGDYKVYDVRKMIAKSEQEIGKATAKYFFYSNIMNFFKTEITLANGEIRKRPLIETNGETGEIVWDKGRDFATVRKVLSMPQVNIVKKTEVQTGGFSKESILPKRNSDKLIARKKDWDPKKYGGFDSPTVAYSVLVVAKVEKGKSKKLKSVKELLGITIMERSSFEKNPIDFLEAKGYKEVKKDLIIKLPKYSLFELENGRKRMLASAGELQKGNELALPSKYVNFLYLASHYEKLKGSPEDNEQKQLFVEQHKHYLDEIIEQISEFSKRVILADANLDKVLSAYNKHRDKPIREQAENIIHLFTLTNLGAPAAFKYFDTTIDRKRYTSTKEVLDATLIHQSITGLYETRIDLSQLGGDGGGGGGGSEAAAKGGTLNIEDEHRLHETSKEPDVSLGSTWLSDFPQAWAETGGMGLAVRQAPLIIPLKATSTPVSIKQYPMSQEARLGIKPHIQRLLDQGILVPCQSPWNTPLLPVKKPGTNDYRPVQDLREVNKRVEDIHPTVPNPYNLLSGLPPSHQWYTVLDLKDAFFCLRLHPTSQPLFAFEWRDPEMGISGQLTWTRLPQGFKNSPTLFDEALHRDLADFRIQHPDLILLQYVDDLLLAATSELDCQQGTRALLQTLGNLGYRASAKKAQICQKQVKYLGYLLKEGQRWLTEARKETVMGQPTPKTPRQLREFLGTAGFCRLWIPGFAEMAAPLYPLTKTGTLFNWGPDQQKAYQEIKQALLTAPALGLPDLTKPFELFVDEKQGYAKGVLTQKLGPWRRPVAYLSKKLDPVAAGWPPCLRMVAAIAVLTKDAGKLTMGQPLVILAPHAVEALVKQPPDRWLSNARMTHYQALLLDTDRVQFGPVVALNPATLLPLPEEGLQHNCLDILAEAHGTRPDLTDQPLPDADHTWYTDGSSLLQEGQRKAGAAVTTETEVIWAKALPAGTSAQRAELIALTQALKMAEGKKLNVYTDSRYAFATAHIHGEIYRRRGLLTSEGKEIKNKDEILALLKALFLPKRLSIIHCPGHQKGHSAEARGNRMADQAARKAAITETPDTSTLLAGKRTADGSEFEKRTADGSEFESPKKKAKVE

SEQ ID NO: 2709 - protein, 2096 aa, synthetic construct
MPAAKRVKLDGGDKKYSIGLDIGTNSVGWAVITDEYKVPSKKFKVLGNTDRHSIKKNLIGALLFDSGETAEATRLKRTARRRYTRRKNRICYLQEIFSNEMAKVDDSFFHRLEESFLVEEDKKHERHPIFGNIVDEVAYHEKYPTIYHLRKKLVDSTDKADLRLIYLALAHMIKFRGHFLIEGDLNPDNSDVDKLFIQLVQTYNQLFEENPINASGVDAKAILSARLSKSRRLENLIAQLPGEKKNGLFGNLIALSLGLTPNFKSNFDLAEDAKLQLSKDTYDDDLDNLLAQIGDQYADLFLAAKNLSDAILLSDILRVNTEITKAPLSASMIKRYDEHHQDLTLLKALVRQQLPEKYKEIFFDQSKNGYAGYIDGGASQEEFYKFIKPILEKMDGTEELLVKLNREDLLRKQRTFDNGSIPHQIHLGELHAILRRQEDFYPFLKDNREKIEKILTFRIPYYVGPLARGNSRFAWMTRKSEETITPWNFEEVVDKGASAQSFIERMTNFDKNLPNEKVLPKHSLLYEYFTVYNELTKVKYVTEGMRKPAFLSGEQKKAIVDLLFKTNRKVTVKQLKEDYFKKIECFDSVEISGVEDRFNASLGTYHDLLKIIKDKDFLDNEENEDILEDIVLTLTLFEDREMIEERLKTYAHLFDDKVMKQLKRRRYTGWGRLSRKLINGIRDKQSGKTILDFLKSDGFANRNFMQLIHDDSLTFKEDIQKAQVSGQGDSLHEHIANLAGSPAIKKGILQTVKVVDELVKVMGRHKPENIVIEMARENQTTQKGQKNSRERMKRIEEGIKELGSQILKEHPVENTQLQNEKLYLYYLQNGRDMYVDQELDINRLSDYDVDHIVPQSFLKDDSIDNKVLTRSDKARGKSDNVPSEEVVKKMKNYWRQLLNAKLITQRKFDNLTKAERGGLSELDKAGFIKRQLVETRQITKHVAQILDSRMNTKYDENDKLIREVKVITLKSKLVSDFRKDFQFYKVREINNYHHAHDAYLNAVVGTALIKKYPKLESEFVYGDYKVYDVRKMIAKSEQEIGKATAKYFFYSNIMNFFKTEITLANGEIRKRPLIETNGETGEIVWDKGRDFATVRKVLSMPQVNIVKKTEVQTGGFSKESILPKRNSDKLIARKKDWDPKKYGGFDSPTVAYSVLVVAKVEKGKSKKLKSVKELLGITIMERSSFEKNPIDFLEAKGYKEVKKDLIIKLPKYSLFELENGRKRMLASAGELQKGNELALPSKYVNFLYLASHYEKLKGSPEDNEQKQLFVEQHKHYLDEIIEQISEFSKRVILADANLDKVLSAYNKHRDKPIREQAENIIHLFTLTNLGAPAAFKYFDTTIDRKRYTSTKEVLDATLIHQSITGLYETRIDLSQLGGDGGPAPAPAPAPAPGGTLNIEDEHRLHETSKEPDVSLGSTWLSDFPQAWAETGGMGLAVRQAPLIIPLKATSTPVSIKQYPMSQEARLGIKPHIQRLLDQGILVPCQSPWNTPLLPVKKPGTNDYRPVQDLREVNKRVEDIHPTVPNPYNLLSGLPPSHQWYTVLDLKDAFFCLRLHPTSQPLFAFEWRDPEMGISGQLTWTRLPQGFKNSPTLFDEALHRDLADFRIQHPDLILLQYVDDLLLAATSELDCQQGTRALLQTLGNLGYRASAKKAQICQKQVKYLGYLLKEGQRWLTEARKETVMGQPTPKTPRQLREFLGTAGFCRLWIPGFAEMAAPLYPLTKTGTLFNWGPDQQKAYQEIKQALLTAPALGLPDLTKPFELFVDEKQGYAKGVLTQKLGPWRRPVAYLSKKLDPVAAGWPPCLRMVAAIAVLTKDAGKLTMGQPLVILAPHAVEALVKQPPDRWLSNARMTHYQALLLDTDRVQFGPVVALNPATLLPLPEEGLQHNCLDILAEAHGTRPDLTDQPLPDADHTWYTDGSSLLQEGQRKAGAAVTTETEVIWAKALPAGTSAQRAELIALTQALKMAEGKKLNVYTDSRYAFATAHIHGEIYRRRGLLTSEGKEIKNKDEILALLKALFLPKRLSIIHCPGHQKGHSAEARGNRMADQAARKAAITETPDTSTLLAGKRTADGSEFEKRTADGSEFESPKKKAKVE

SEQ ID NO: 2710 - protein, 2091 aa, synthetic construct
MPAAKRVKLDGGDKKYSIGLDIGTNSVGWAVITDEYKVPSKKFKVLGNTDRHSIKKNLIGALLFDSGETAEATRLKRTARRRYTRRKNRICYLQEIFSNEMAKVDDSFFHRLEESFLVEEDKKHERHPIFGNIVDEVAYHEKYPTIYHLRKKLVDSTDKADLRLIYLALAHMIKFRGHFLIEGDLNPDNSDVDKLFIQLVQTYNQLFEENPINASGVDAKAILSARLSKSRRLENLIAQLPGEKKNGLFGNLIALSLGLTPNFKSNFDLAEDAKLQLSKDTYDDDLDNLLAQIGDQYADLFLAAKNLSDAILLSDILRVNTEITKAPLSASMIKRYDEHHQDLTLLKALVRQQLPEKYKEIFFDQSKNGYAGYIDGGASQEEFYKFIKPILEKMDGTEELLVKLNREDLLRKQRTFDNGSIPHQIHLGELHAILRRQEDFYPFLKDNREKIEKILTFRIPYYVGPLARGNSRFAWMTRKSEETITPWNFEEVVDKGASAQSFIERMTNFDKNLPNEKVLPKHSLLYEYFTVYNELTKVKYVTEGMRKPAFLSGEQKKAIVDLLFKTNRKVTVKQLKEDYFKKIECFDSVEISGVEDRFNASLGTYHDLLKIIKDKDFLDNEENEDILEDIVLTLTLFEDREMIEERLKTYAHLFDDKVMKQLKRRRYTGWGRLSRKLINGIRDKQSGKTILDFLKSDGFANRNFMQLIHDDSLTFKEDIQKAQVSGQGDSLHEHIANLAGSPAIKKGILQTVKVVDELVKVMGRHKPENIVIEMARENQTTQKGQKNSRERMKRIEEGIKELGSQILKEHPVENTQLQNEKLYLYYLQNGRDMYVDQELDINRLSDYDVDHIVPQSFLKDDSIDNKVLTRSDKARGKSDNVPSEEVVKKMKNYWRQLLNAKLITQRKFDNLTKAERGGLSELDKAGFIKRQLVETRQITKHVAQILDSRMNTKYDENDKLIREVKVITLKSKLVSDFRKDFQFYKVREINNYHHAHDAYLNAVVGTALIKKYPKLESEFVYGDYKVYDVRKMIAKSEQEIGKATAKYFFYSNIMNFFKTEITLANGEIRKRPLIETNGETGEIVWDKGRDFATVRKVLSMPQVNIVKKTEVQTGGFSKESILPKRNSDKLIARKKDWDPKKYGGFDSPTVAYSVLVVAKVEKGKSKKLKSVKELLGITIMERSSFEKNPIDFLEAKGYKEVKKDLIIKLPKYSLFELENGRKRMLASAGELQKGNELALPSKYVNFLYLASHYEKLKGSPEDNEQKQLFVEQHKHYLDEIIEQISEFSKRVILADANLDKVLSAYNKHRDKPIREQAENIIHLFTLTNLGAPAAFKYFDTTIDRKRYTSTKEVLDATLIHQSITGLYETRIDLSQLGGDGGGSSPAPGGTLNIEDEHRLHETSKEPDVSLGSTWLSDFPQAWAETGGMGLAVRQAPLIIPLKATSTPVSIKQYPMSQEARLGIKPHIQRLLDQGILVPCQSPWNTPLLPVKKPGTNDYRPVQDLREVNKRVEDIHPTVPNPYNLLSGLPPSHQWYTVLDLKDAFFCLRLHPTSQPLFAFEWRDPEMGISGQLTWTRLPQGFKNSPTLFDEALHRDLADFRIQHPDLILLQYVDDLLLAATSELDCQQGTRALLQTLGNLGYRASAKKAQICQKQVKYLGYLLKEGQRWLTEARKETVMGQPTPKTPRQLREFLGTAGFCRLWIPGFAEMAAPLYPLTKTGTLFNWGPDQQKAYQEIKQALLTAPALGLPDLTKPFELFVDEKQGYAKGVLTQKLGPWRRPVAYLSKKLDPVAAGWPPCLRMVAAIAVLTKDAGKLTMGQPLVILAPHAVEALVKQPPDRWLSNARMTHYQALLLDTDRVQFGPVVALNPATLLPLPEEGLQHNCLDILAEAHGTRPDLTDQPLPDADHTWYTDGSSLLQEGQRKAGAAVTTETEVIWAKALPAGTSAQRAELIALTQALKMAEGKKLNVYTDSRYAFATAHIHGEIYRRRGLLTSEGKEIKNKDEILALLKALFLPKRLSIIHCPGHQKGHSAEARGNRMADQAARKAAITETPDTSTLLAGKRTADGSEFEKRTADGSEFESPKKKAKVE

SEQ ID NO: 2711 - protein, 2131 aa, synthetic construct
MPAAKRVKLDGGDKKYSIGLDIGTNSVGWAVITDEYKVPSKKFKVLGNTDRHSIKKNLIGALLFDSGETAEATRLKRTARRRYTRRKNRICYLQEIFSNEMAKVDDSFFHRLEESFLVEEDKKHERHPIFGNIVDEVAYHEKYPTIYHLRKKLVDSTDKADLRLIYLALAHMIKFRGHFLIEGDLNPDNSDVDKLFIQLVQTYNQLFEENPINASGVDAKAILSARLSKSRRLENLIAQLPGEKKNGLFGNLIALSLGLTPNFKSNFDLAEDAKLQLSKDTYDDDLDNLLAQIGDQYADLFLAAKNLSDAILLSDILRVNTEITKAPLSASMIKRYDEHHQDLTLLKALVRQQLPEKYKEIFFDQSKNGYAGYIDGGASQEEFYKFIKPILEKMDGTEELLVKLNREDLLRKQRTFDNGSIPHQIHLGELHAILRRQEDFYPFLKDNREKIEKILTFRIPYYVGPLARGNSRFAWMTRKSEETITPWNFEEVVDKGASAQSFIERMTNFDKNLPNEKVLPKHSLLYEYFTVYNELTKVKYVTEGMRKPAFLSGEQKKAIVDLLFKTNRKVTVKQLKEDYFKKIECFDSVEISGVEDRFNASLGTYHDLLKIIKDKDFLDNEENEDILEDIVLTLTLFEDREMIEERLKTYAHLFDDKVMKQLKRRRYTGWGRLSRKLINGIRDKQSGKTILDFLKSDGFANRNFMQLIHDDSLTFKEDIQKAQVSGQGDSLHEHIANLAGSPAIKKGILQTVKVVDELVKVMGRHKPENIVIEMARENQTTQKGQKNSRERMKRIEEGIKELGSQILKEHPVENTQLQNEKLYLYYLQNGRDMYVDQELDINRLSDYDVDHIVPQSFLKDDSIDNKVLTRSDKARGKSDNVPSEEVVKKMKNYWRQLLNAKLITQRKFDNLTKAERGGLSELDKAGFIKRQLVETRQITKHVAQILDSRMNTKYDENDKLIREVKVITLKSKLVSDFRKDFQFYKVREINNYHHAHDAYLNAVVGTALIKKYPKLESEFVYGDYKVYDVRKMIAKSEQEIGKATAKYFFYSNIMNFFKTEITLANGEIRKRPLIETNGETGEIVWDKGRDFATVRKVLSMPQVNIVKKTEVQTGGFSKESILPKRNSDKLIARKKDWDPKKYGGFDSPTVAYSVLVVAKVEKGKSKKLKSVKELLGITIMERSSFEKNPIDFLEAKGYKEVKKDLIIKLPKYSLFELENGRKRMLASAGELQKGNELALPSKYVNFLYLASHYEKLKGSPEDNEQKQLFVEQHKHYLDEIIEQISEFSKRVILADANLDKVLSAYNKHRDKPIREQAENIIHLFTLTNLGAPAAFKYFDTTIDRKRYTSTKEVLDATLIHQSITGLYETRIDLSQLGGDGGAEAAAKEAAAKEAAAKEAAAKALEAEAAAKEAAAKEAAAKEAAAKAGGTLNIEDEHRLHETSKEPDVSLGSTWLSDFPQAWAETGGMGLAVRQAPLIIPLKATSTPVSIKQYPMSQEARLGIKPHIQRLLDQGILVPCQSPWNTPLLPVKKPGTNDYRPVQDLREVNKRVEDIHPTVPNPYNLLSGLPPSHQWYTVLDLKDAFFCLRLHPTSQPLFAFEWRDPEMGISGQLTWTRLPQGFKNSPTLFNEALHRDLADFRIQHPDLILLQYVDDLLLAATSELDCQQGTRALLQTLGNLGYRASAKKAQICQKQVKYLGYLLKEGQRWLTEARKETVMGQPTPKTPRQLREFLGTAGFCRLWIPGFAEMAAPLYPLTKPGTLFNWGPDQQKAYQEIKQALLTAPALGLPDLTKPFELFVDEKQGYAKGVLTQKLGPWRRPVAYLSKKLDPVAAGWPPCLRMVAAIAVLTKDAGKLTMGQPLVILAPHAVEALVKQPPDRWLSNARMTHYQALLLDTDRVQFGPVVALNPATLLPLPEEGLQHNCLDILAEAHGTRPDLTDQPLPDADHTWYTDGSSLLQEGQRKAGAAVTTETEVIWAKALPAGTSAQRAELIALTQALKMAEGKKLNVYTDSRYAFATAHIHGEIYRRRGWLTSEGKEIKNKDEILALLKALFLPKRLSIIHCPGHQKGHSAEARGNRMADQAARKAAITETPDTSTLLAGKRTADGSEFEKRTADGSEFESPKKKAKVE

SEQ ID NO: 2712 - protein, 2100 aa, synthetic construct
MPAAKRVKLDGGDKKYSIGLDIGTNSVGWAVITDEYKVPSKKFKVLGNTDRHSIKKNLIGALLFDSGETAEATRLKRTARRRYTRRKNRICYLQEIFSNEMAKVDDSFFHRLEESFLVEEDKKHERHPIFGNIVDEVAYHEKYPTIYHLRKKLVDSTDKADLRLIYLALAHMIKFRGHFLIEGDLNPDNSDVDKLFIQLVQTYNQLFEENPINASGVDAKAILSARLSKSRRLENLIAQLPGEKKNGLFGNLIALSLGLTPNFKSNFDLAEDAKLQLSKDTYDDDLDNLLAQIGDQYADLFLAAKNLSDAILLSDILRVNTEITKAPLSASMIKRYDEHHQDLTLLKALVRQQLPEKYKEIFFDQSKNGYAGYIDGGASQEEFYKFIKPILEKMDGTEELLVKLNREDLLRKQRTFDNGSIPHQIHLGELHAILRRQEDFYPFLKDNREKIEKILTFRIPYYVGPLARGNSRFAWMTRKSEETITPWNFEEVVDKGASAQSFIERMTNFDKNLPNEKVLPKHSLLYEYFTVYNELTKVKYVTEGMRKPAFLSGEQKKAIVDLLFKTNRKVTVKQLKEDYFKKIECFDSVEISGVEDRFNASLGTYHDLLKIIKDKDFLDNEENEDILEDIVLTLTLFEDREMIEERLKTYAHLFDDKVMKQLKRRRYTGWGRLSRKLINGIRDKQSGKTILDFLKSDGFANRNFMQLIHDDSLTFKEDIQKAQVSGQGDSLHEHIANLAGSPAIKKGILQTVKVVDELVKVMGRHKPENIVIEMARENQTTQKGQKNSRERMKRIEEGIKELGSQILKEHPVENTQLQNEKLYLYYLQNGRDMYVDQELDINRLSDYDVDHIVPQSFLKDDSIDNKVLTRSDKARGKSDNVPSEEVVKKMKNYWRQLLNAKLITQRKFDNLTKAERGGLSELDKAGFIKRQLVETRQITKHVAQILDSRMNTKYDENDKLIREVKVITLKSKLVSDFRKDFQFYKVREINNYHHAHDAYLNAVVGTALIKKYPKLESEFVYGDYKVYDVRKMIAKSEQEIGKATAKYFFYSNIMNFFKTEITLANGEIRKRPLIETNGETGEIVWDKGRDFATVRKVLSMPQVNIVKKTEVQTGGFSKESILPKRNSDKLIARKKDWDPKKYGGFDSPTVAYSVLVVAKVEKGKSKKLKSVKELLGITIMERSSFEKNPIDFLEAKGYKEVKKDLIIKLPKYSLFELENGRKRMLASAGELQKGNELALPSKYVNFLYLASHYEKLKGSPEDNEQKQLFVEQHKHYLDEIIEQISEFSKRVILADANLDKVLSAYNKHRDKPIREQAENIIHLFTLTNLGAPAAFKYFDTTIDRKRYTSTKEVLDATLIHQSITGLYETRIDLSQLGGDGGEAAAKGGGGSEAAAKGGTLNIEDEHRLHETSKEPDVSLGSTWLSDFPQAWAETGGMGLAVRQAPLIIPLKATSTPVSIKQYPMSQEARLGIKPHIQRLLDQGILVPCQSPWNTPLLPVKKPGTNDYRPVQDLREVNKRVEDIHPTVPNPYNLLSGLPPSHQWYTVLDLKDAFFCLRLHPTSQPLFAFEWRDPEMGISGQLTWTRLPQGFKNSPTLFNEALHRDLADFRIQHPDLILLQYVDDLLLAATSELDCQQGTRALLQTLGNLGYRASAKKAQICQKQVKYLGYLLKEGQRWLTEARKETVMGQPTPKTPRQLREFLGTAGFCRLWIPGFAEMAAPLYPLTKPGTLFNWGPDQQKAYQEIKQALLTAPALGLPDLTKPFELFVDEKQGYAKGVLTQKLGPWRRPVAYLSKKLDPVAAGWPPCLRMVAAIAVLTKDAGKLTMGQPLVILAPHAVEALVKQPPDRWLSNARMTHYQALLLDTDRVQFGPVVALNPATLLPLPEEGLQHNCLDILAEAHGTRPDLTDQPLPDADHTWYTDGSSLLQEGQRKAGAAVTTETEVIWAKALPAGTSAQRAELIALTQALKMAEGKKLNVYTDSRYAFATAHIHGEIYRRRGWLTSEGKEIKNKDEILALLKALFLPKRLSIIHCPGHQKGHSAEARGNRMADQAARKAAITETPDTSTLLAGKRTADGSEFEKRTADGSEFESPKKKAKVE

SEQ ID NO: 2713 - protein, 2096 aa, synthetic construct
MPAAKRVKLDGGDKKYSIGLDIGTNSVGWAVITDEYKVPSKKFKVLGNTDRHSIKKNLIGALLFDSGETAEATRLKRTARRRYTRRKNRICYLQEIFSNEMAKVDDSFFHRLEESFLVEEDKKHERHPIFGNIVDEVAYHEKYPTIYHLRKKLVDSTDKADLRLIYLALAHMIKFRGHFLIEGDLNPDNSDVDKLFIQLVQTYNQLFEENPINASGVDAKAILSARLSKSRRLENLIAQLPGEKKNGLFGNLIALSLGLTPNFKSNFDLAEDAKLQLSKDTYDDDLDNLLAQIGDQYADLFLAAKNLSDAILLSDILRVNTEITKAPLSASMIKRYDEHHQDLTLLKALVRQQLPEKYKEIFFDQSKNGYAGYIDGGASQEEFYKFIKPILEKMDGTEELLVKLNREDLLRKQRTFDNGSIPHQIHLGELHAILRRQEDFYPFLKDNREKIEKILTFRIPYYVGPLARGNSRFAWMTRKSEETITPWNFEEVVDKGASAQSFIERMTNFDKNLPNEKVLPKHSLLYEYFTVYNELTKVKYVTEGMRKPAFLSGEQKKAIVDLLFKTNRKVTVKQLKEDYFKKIECFDSVEISGVEDRFNASLGTYHDLLKIIKDKDFLDNEENEDILEDIVLTLTLFEDREMIEERLKTYAHLFDDKVMKQLKRRRYTGWGRLSRKLINGIRDKQSGKTILDFLKSDGFANRNFMQLIHDDSLTFKEDIQKAQVSGQGDSLHEHIANLAGSPAIKKGILQTVKVVDELVKVMGRHKPENIVIEMARENQTTQKGQKNSRERMKRIEEGIKELGSQILKEHPVENTQLQNEKLYLYYLQNGRDMYVDQELDINRLSDYDVDHIVPQSFLKDDSIDNKVLTRSDKARGKSDNVPSEEVVKKMKNYWRQLLNAKLITQRKFDNLTKAERGGLSELDKAGFIKRQLVETRQITKHVAQILDSRMNTKYDENDKLIREVKVITLKSKLVSDFRKDFQFYKVREINNYHHAHDAYLNAVVGTALIKKYPKLESEFVYGDYKVYDVRKMIAKSEQEIGKATAKYFFYSNIMNFFKTEITLANGEIRKRPLIETNGETGEIVWDKGRDFATVRKVLSMPQVNIVKKTEVQTGGFSKESILPKRNSDKLIARKKDWDPKKYGGFDSPTVAYSVLVVAKVEKGKSKKLKSVKELLGITIMERSSFEKNPIDFLEAKGYKEVKKDLIIKLPKYSLFELENGRKRMLASAGELQKGNELALPSKYVNFLYLASHYEKLKGSPEDNEQKQLFVEQHKHYLDEIIEQISEFSKRVILADANLDKVLSAYNKHRDKPIREQAENIIHLFTLTNLGAPAAFKYFDTTIDRKRYTSTKEVLDATLIHQSITGLYETRIDLSQLGGDGGGGSEAAAKGGGGGTLNIEDEHRLHETSKEPDVSLGSTWLSDFPQAWAETGGMGLAVRQAPLIIPLKATSTPVSIKQYPMSQEARLGIKPHIQRLLDQGILVPCQSPWNTPLLPVKKPGTNDYRPVQDLREVNKRVEDIHPTVPNPYNLLSGLPPSHQWYTVLDLKDAFFCLRLHPTSQPLFAFEWRDPEMGISGQLTWTRLPQGFKNSPTLFNEALHRDLADFRIQHPDLILLQYVDDLLLAATSELDCQQGTRALLQTLGNLGYRASAKKAQICQKQVKYLGYLLKEGQRWLTEARKETVMGQPTPKTPRQLREFLGTAGFCRLWIPGFAEMAAPLYPLTKPGTLFNWGPDQQKAYQEIKQALLTAPALGLPDLTKPFELFVDEKQGYAKGVLTQKLGPWRRPVAYLSKKLDPVAAGWPPCLRMVAAIAVLTKDAGKLTMGQPLVILAPHAVEALVKQPPDRWLSNARMTHYQALLLDTDRVQFGPVVALNPATLLPLPEEGLQHNCLDILAEAHGTRPDLTDQPLPDADHTWYTDGSSLLQEGQRKAGAAVTTETEVIWAKALPAGTSAQRAELIALTQALKMAEGKKLNVYTDSRYAFATAHIHGEIYRRRGWLTSEGKEIKNKDEILALLKALFLPKRLSIIHCPGHQKGHSAEARGNRMADQAARKAAITETPDTSTLLAGKRTADGSEFEKRTADGSEFESPKKKAKVE

SEQ ID NO: 2714 - protein, 2096 aa, synthetic construct
MPAAKRVKLDGGDKKYSIGLDIGTNSVGWAVITDEYKVPSKKFKVLGNTDRHSIKKNLIGALLFDSGETAEATRLKRTARRRYTRRKNRICYLQEIFSNEMAKVDDSFFHRLEESFLVEEDKKHERHPIFGNIVDEVAYHEKYPTIYHLRKKLVDSTDKADLRLIYLALAHMIKFRGHFLIEGDLNPDNSDVDKLFIQLVQTYNQLFEENPINASGVDAKAILSARLSKSRRLENLIAQLPGEKKNGLFGNLIALSLGLTPNFKSNFDLAEDAKLQLSKDTYDDDLDNLLAQIGDQYADLFLAAKNLSDAILLSDILRVNTEITKAPLSASMIKRYDEHHQDLTLLKALVRQQLPEKYKEIFFDQSKNGYAGYIDGGASQEEFYKFIKPILEKMDGTEELLVKLNREDLLRKQRTFDNGSIPHQIHLGELHAILRRQEDFYPFLKDNREKIEKILTFRIPYYVGPLARGNSRFAWMTRKSEETITPWNFEEVVDKGASAQSFIERMTNFDKNLPNEKVLPKHSLLYEYFTVYNELTKVKYVTEGMRKPAFLSGEQKKAIVDLLFKTNRKVTVKQLKEDYFKKIECFDSVEISGVEDRFNASLGTYHDLLKIIKDKDFLDNEENEDILEDIVLTLTLFEDREMIEERLKTYAHLFDDKVMKQLKRRRYTGWGRLSRKLINGIRDKQSGKTILDFLKSDGFANRNFMQLIHDDSLTFKEDIQKAQVSGQGDSLHEHIANLAGSPAIKKGILQTVKVVDELVKVMGRHKPENIVIEMARENQTTQKGQKNSRERMKRIEEGIKELGSQILKEHPVENTQLQNEKLYLYYLQNGRDMYVDQELDINRLSDYDVDHIVPQSFLKDDSIDNKVLTRSDKARGKSDNVPSEEVVKKMKNYWRQLLNAKLITQRKFDNLTKAERGGLSELDKAGFIKRQLVETRQITKHVAQILDSRMNTKYDENDKLIREVKVITLKSKLVSDFRKDFQFYKVREINNYHHAHDAYLNAVVGTALIKKYPKLESEFVYGDYKVYDVRKMIAKSEQEIGKATAKYFFYSNIMNFFKTEITLANGEIRKRPLIETNGETGEIVWDKGRDFATVRKVLSMPQVNIVKKTEVQTGGFSKESILPKRNSDKLIARKKDWDPKKYGGFDSPTVAYSVLVVAKVEKGKSKKLKSVKELLGITIMERSSFEKNPIDFLEAKGYKEVKKDLIIKLPKYSLFELENGRKRMLASAGELQKGNELALPSKYVNFLYLASHYEKLKGSPEDNEQKQLFVEQHKHYLDEIIEQISEFSKRVILADANLDKVLSAYNKHRDKPIREQAENIIHLFTLTNLGAPAAFKYFDTTIDRKRYTSTKEVLDATLIHQSITGLYETRIDLSQLGGDGGEAAAKPAPGGSGGTLNIEDEHRLHETSKEPDVSLGSTWLSDFPQAWAETGGMGLAVRQAPLIIPLKATSTPVSIKQYPMSQEARLGIKPHIQRLLDQGILVPCQSPWNTPLLPVKKPGTNDYRPVQDLREVNKRVEDIHPTVPNPYNLLSGLPPSHQWYTVLDLKDAFFCLRLHPTSQPLFAFEWRDPEMGISGQLTWTRLPQGFKNSPTLFNEALHRDLADFRIQHPDLILLQYVDDLLLAATSELDCQQGTRALLQTLGNLGYRASAKKAQICQKQVKYLGYLLKEGQRWLTEARKETVMGQPTPKTPRQLREFLGTAGFCRLWIPGFAEMAAPLYPLTKPGTLFNWGPDQQKAYQEIKQALLTAPALGLPDLTKPFELFVDEKQGYAKGVLTQKLGPWRRPVAYLSKKLDPVAAGWPPCLRMVAAIAVLTKDAGKLTMGQPLVILAPHAVEALVKQPPDRWLSNARMTHYQALLLDTDRVQFGPVVALNPATLLPLPEEGLQHNCLDILAEAHGTRPDLTDQPLPDADHTWYTDGSSLLQEGQRKAGAAVTTETEVIWAKALPAGTSAQRAELIALTQALKMAEGKKLNVYTDSRYAFATAHIHGEIYRRRGWLTSEGKEIKNKDEILALLKALFLPKRLSIIHCPGHQKGHSAEARGNRMADQAARKAAITETPDTSTLLAGKRTADGSEFEKRTADGSEFESPKKKAKVE

SEQ ID NO: 2715 - protein, 2094 aa, synthetic construct
MPAAKRVKLDGGDKKYSIGLDIGTNSVGWAVITDEYKVPSKKFKVLGNTDRHSIKKNLIGALLFDSGETAEATRLKRTARRRYTRRKNRICYLQEIFSNEMAKVDDSFFHRLEESFLVEEDKKHERHPIFGNIVDEVAYHEKYPTIYHLRKKLVDSTDKADLRLIYLALAHMIKFRGHFLIEGDLNPDNSDVDKLFIQLVQTYNQLFEENPINASGVDAKAILSARLSKSRRLENLIAQLPGEKKNGLFGNLIALSLGLTPNFKSNFDLAEDAKLQLSKDTYDDDLDNLLAQIGDQYADLFLAAKNLSDAILLSDILRVNTEITKAPLSASMIKRYDEHHQDLTLLKALVRQQLPEKYKEIFFDQSKNGYAGYIDGGASQEEFYKFIKPILEKMDGTEELLVKLNREDLLRKQRTFDNGSIPHQIHLGELHAILRRQEDFYPFLKDNREKIEKILTFRIPYYVGPLARGNSRFAWMTRKSEETITPWNFEEVVDKGASAQSFIERMTNFDKNLPNEKVLPKHSLLYEYFTVYNELTKVKYVTEGMRKPAFLSGEQKKAIVDLLFKTNRKVTVKQLKEDYFKKIECFDSVEISGVEDRFNASLGTYHDLLKIIKDKDFLDNEENEDILEDIVLTLTLFEDREMIEERLKTYAHLFDDKVMKQLKRRRYTGWGRLSRKLINGIRDKQSGKTILDFLKSDGFANRNFMQLIHDDSLTFKEDIQKAQVSGQGDSLHEHIANLAGSPAIKKGILQTVKVVDELVKVMGRHKPENIVIEMARENQTTQKGQKNSRERMKRIEEGIKELGSQILKEHPVENTQLQNEKLYLYYLQNGRDMYVDQELDINRLSDYDVDHIVPQSFLKDDSIDNKVLTRSDKARGKSDNVPSEEVVKKMKNYWRQLLNAKLITQRKFDNLTKAERGGLSELDKAGFIKRQLVETRQITKHVAQILDSRMNTKYDENDKLIREVKVITLKSKLVSDFRKDFQFYKVREINNYHHAHDAYLNAVVGTALIKKYPKLESEFVYGDYKVYDVRKMIAKSEQEIGKATAKYFFYSNIMNFFKTEITLANGEIRKRPLIETNGETGEIVWDKGRDFATVRKVLSMPQVNIVKKTEVQTGGFSKESILPKRNSDKLIARKKDWDPKKYGGFDSPTVAYSVLVVAKVEKGKSKKLKSVKELLGITIMERSSFEKNPIDFLEAKGYKEVKKDLIIKLPKYSLFELENGRKRMLASAGELQKGNELALPSKYVNFLYLASHYEKLKGSPEDNEQKQLFVEQHKHYLDEIIEQISEFSKRVILADANLDKVLSAYNKHRDKPIREQAENIIHLFTLTNLGAPAAFKYFDTTIDRKRYTSTKEVLDATLIHQSITGLYETRIDLSQLGGDGGGSSGGGGGSGGTLNIEDEHRLHETSKEPDVSLGSTWLSDFPQAWAETGGMGLAVRQAPLIIPLKATSTPVSIKQYPMSQEARLGIKPHIQRLLDQGILVPCQSPWNTPLLPVKKPGTNDYRPVQDLREVNKRVEDIHPTVPNPYNLLSGLPPSHQWYTVLDLKDAFFCLRLHPTSQPLFAFEWRDPEMGISGQLTWTRLPQGFKNSPTLFNEALHRDLADFRIQHPDLILLQYVDDLLLAATSELDCQQGTRALLQTLGNLGYRASAKKAQICQKQVKYLGYLLKEGQRWLTEARKETVMGQPTPKTPRQLREFLGTAGFCRLWIPGFAEMAAPLYPLTKPGTLFNWGPDQQKAYQEIKQALLTAPALGLPDLTKPFELFVDEKQGYAKGVLTQKLGPWRRPVAYLSKKLDPVAAGWPPCLRMVAAIAVLTKDAGKLTMGQPLVILAPHAVEALVKQPPDRWLSNARMTHYQALLLDTDRVQFGPVVALNPATLLPLPEEGLQHNCLDILAEAHGTRPDLTDQPLPDADHTWYTDGSSLLQEGQRKAGAAVTTETEVIWAKALPAGTSAQRAELIALTQALKMAEGKKLNVYTDSRYAFATAHIHGEIYRRRGWLTSEGKEIKNKDEILALLKALFLPKRLSIIHCPGHQKGHSAEARGNRMADQAARKAAITETPDTSTLLAGKRTADGSEFEKRTADGSEFESPKKKAKVE

SEQ ID NO: 2716 - protein, 2110 aa, synthetic construct
MPAAKRVKLDGGDKKYSIGLDIGTNSVGWAVITDEYKVPSKKFKVLGNTDRHSIKKNLIGALLFDSGETAEATRLKRTARRRYTRRKNRICYLQEIFSNEMAKVDDSFFHRLEESFLVEEDKKHERHPIFGNIVDEVAYHEKYPTIYHLRKKLVDSTDKADLRLIYLALAHMIKFRGHFLIEGDLNPDNSDVDKLFIQLVQTYNQLFEENPINASGVDAKAILSARLSKSRRLENLIAQLPGEKKNGLFGNLIALSLGLTPNFKSNFDLAEDAKLQLSKDTYDDDLDNLLAQIGDQYADLFLAAKNLSDAILLSDILRVNTEITKAPLSASMIKRYDEHHQDLTLLKALVRQQLPEKYKEIFFDQSKNGYAGYIDGGASQEEFYKFIKPILEKMDGTEELLVKLNREDLLRKQRTFDNGSIPHQIHLGELHAILRRQEDFYPFLKDNREKIEKILTFRIPYYVGPLARGNSRFAWMTRKSEETITPWNFEEVVDKGASAQSFIERMTNFDKNLPNEKVLPKHSLLYEYFTVYNELTKVKYVTEGMRKPAFLSGEQKKAIVDLLFKTNRKVTVKQLKEDYFKKIECFDSVEISGVEDRFNASLGTYHDLLKIIKDKDFLDNEENEDILEDIVLTLTLFEDREMIEERLKTYAHLFDDKVMKQLKRRRYTGWGRLSRKLINGIRDKQSGKTILDFLKSDGFANRNFMQLIHDDSLTFKEDIQKAQVSGQGDSLHEHIANLAGSPAIKKGILQTVKVVDELVKVMGRHKPENIVIEMARENQTTQKGQKNSRERMKRIEEGIKELGSQILKEHPVENTQLQNEKLYLYYLQNGRDMYVDQELDINRLSDYDVDHIVPQSFLKDDSIDNKVLTRSDKARGKSDNVPSEEVVKKMKNYWRQLLNAKLITQRKFDNLTKAERGGLSELDKAGFIKRQLVETRQITKHVAQILDSRMNTKYDENDKLIREVKVITLKSKLVSDFRKDFQFYKVREINNYHHAHDAYLNAVVGTALIKKYPKLESEFVYGDYKVYDVRKMIAKSEQEIGKATAKYFFYSNIMNFFKTEITLANGEIRKRPLIETNGETGEIVWDKGRDFATVRKVLSMPQVNIVKKTEVQTGGFSKESILPKRNSDKLIARKKDWDPKKYGGFDSPTVAYSVLVVAKVEKGKSKKLKSVKELLGITIMERSSFEKNPIDFLEAKGYKEVKKDLIIKLPKYSLFELENGRKRMLASAGELQKGNELALPSKYVNFLYLASHYEKLKGSPEDNEQKQLFVEQHKHYLDEIIEQISEFSKRVILADANLDKVLSAYNKHRDKPIREQAENIIHLFTLTNLGAPAAFKYFDTTIDRKRYTSTKEVLDATLIHQSITGLYETRIDLSQLGGDGGEAAAKEAAAKEAAAKEAAAKEAAAKGGTLNIEDEHRLHETSKEPDVSLGSTWLSDFPQAWAETGGMGLAVRQAPLIIPLKATSTPVSIKQYPMSQEARLGIKPHIQRLLDQGILVPCQSPWNTPLLPVKKPGTNDYRPVQDLREVNKRVEDIHPTVPNPYNLLSGLPPSHQWYTVLDLKDAFFCLRLHPTSQPLFAFEWRDPEMGISGQLTWTRLPQGFKNSPTLFNEALHRDLADFRIQHPDLILLQYVDDLLLAATSELDCQQGTRALLQTLGNLGYRASAKKAQICQKQVKYLGYLLKEGQRWLTEARKETVMGQPTPKTPRQLREFLGTAGFCRLWIPGFAEMAAPLYPLTKPGTLFNWGPDQQKAYQEIKQALLTAPALGLPDLTKPFELFVDEKQGYAKGVLTQKLGPWRRPVAYLSKKLDPVAAGWPPCLRMVAAIAVLTKDAGKLTMGQPLVILAPHAVEALVKQPPDRWLSNARMTHYQALLLDTDRVQFGPVVALNPATLLPLPEEGLQHNCLDILAEAHGTRPDLTDQPLPDADHTWYTDGSSLLQEGQRKAGAAVTTETEVIWAKALPAGTSAQRAELIALTQALKMAEGKKLNVYTDSRYAFATAHIHGEIYRRRGWLTSEGKEIKNKDEILALLKALFLPKRLSIIHCPGHQKGHSAEARGNRMADQAARKAAITETPDTSTLLAGKRTADGSEFEKRTADGSEFESPKKKAKVE

SEQ ID NO: 2717 - protein, 2091 aa, synthetic construct
MPAAKRVKLDGGDKKYSIGLDIGTNSVGWAVITDEYKVPSKKFKVLGNTDRHSIKKNLIGALLFDSGETAEATRLKRTARRRYTRRKNRICYLQEIFSNEMAKVDDSFFHRLEESFLVEEDKKHERHPIFGNIVDEVAYHEKYPTIYHLRKKLVDSTDKADLRLIYLALAHMIKFRGHFLIEGDLNPDNSDVDKLFIQLVQTYNQLFEENPINASGVDAKAILSARLSKSRRLENLIAQLPGEKKNGLFGNLIALSLGLTPNFKSNFDLAEDAKLQLSKDTYDDDLDNLLAQIGDQYADLFLAAKNLSDAILLSDILRVNTEITKAPLSASMIKRYDEHHQDLTLLKALVRQQLPEKYKEIFFDQSKNGYAGYIDGGASQEEFYKFIKPILEKMDGTEELLVKLNREDLLRKQRTFDNGSIPHQIHLGELHAILRRQEDFYPFLKDNREKIEKILTFRIPYYVGPLARGNSRFAWMTRKSEETITPWNFEEVVDKGASAQSFIERMTNFDKNLPNEKVLPKHSLLYEYFTVYNELTKVKYVTEGMRKPAFLSGEQKKAIVDLLFKTNRKVTVKQLKEDYFKKIECFDSVEISGVEDRFNASLGTYHDLLKIIKDKDFLDNEENEDILEDIVLTLTLFEDREMIEERLKTYAHLFDDKVMKQLKRRRYTGWGRLSRKLINGIRDKQSGKTILDFLKSDGFANRNFMQLIHDDSLTFKEDIQKAQVSGQGDSLHEHIANLAGSPAIKKGILQTVKVVDELVKVMGRHKPENIVIEMARENQTTQKGQKNSRERMKRIEEGIKELGSQILKEHPVENTQLQNEKLYLYYLQNGRDMYVDQELDINRLSDYDVDHIVPQSFLKDDSIDNKVLTRSDKARGKSDNVPSEEVVKKMKNYWRQLLNAKLITQRKFDNLTKAERGGLSELDKAGFIKRQLVETRQITKHVAQILDSRMNTKYDENDKLIREVKVITLKSKLVSDFRKDFQFYKVREINNYHHAHDAYLNAVVGTALIKKYPKLESEFVYGDYKVYDVRKMIAKSEQEIGKATAKYFFYSNIMNFFKTEITLANGEIRKRPLIETNGETGEIVWDKGRDFATVRKVLSMPQVNIVKKTEVQTGGFSKESILPKRNSDKLIARKKDWDPKKYGGFDSPTVAYSVLVVAKVEKGKSKKLKSVKELLGITIMERSSFEKNPIDFLEAKGYKEVKKDLIIKLPKYSLFELENGRKRMLASAGELQKGNELALPSKYVNFLYLASHYEKLKGSPEDNEQKQLFVEQHKHYLDEIIEQISEFSKRVILADANLDKVLSAYNKHRDKPIREQAENIIHLFTLTNLGAPAAFKYFDTTIDRKRYTSTKEVLDATLIHQSITGLYETRIDLSQLGGDGGGGGGGSGGTLNIEDEHRLHETSKEPDVSLGSTWLSDFPQAWAETGGMGLAVRQAPLIIPLKATSTPVSIKQYPMSQEARLGIKPHIQRLLDQGILVPCQSPWNTPLLPVKKPGTNDYRPVQDLREVNKRVEDIHPTVPNPYNLLSGLPPSHQWYTVLDLKDAFFCLRLHPTSQPLFAFEWRDPEMGISGQLTWTRLPQGFKNSPTLFNEALHRDLADFRIQHPDLILLQYVDDLLLAATSELDCQQGTRALLQTLGNLGYRASAKKAQICQKQVKYLGYLLKEGQRWLTEARKETVMGQPTPKTPRQLREFLGTAGFCRLWIPGFAEMAAPLYPLTKPGTLFNWGPDQQKAYQEIKQALLTAPALGLPDLTKPFELFVDEKQGYAKGVLTQKLGPWRRPVAYLSKKLDPVAAGWPPCLRMVAAIAVLTKDAGKLTMGQPLVILAPHAVEALVKQPPDRWLSNARMTHYQALLLDTDRVQFGPVVALNPATLLPLPEEGLQHNCLDILAEAHGTRPDLTDQPLPDADHTWYTDGSSLLQEGQRKAGAAVTTETEVIWAKALPAGTSAQRAELIALTQALKMAEGKKLNVYTDSRYAFATAHIHGEIYRRRGWLTSEGKEIKNKDEILALLKALFLPKRLSIIHCPGHQKGHSAEARGNRMADQAARKAAITETPDTSTLLAGKRTADGSEFEKRTADGSEFESPKKKAKVE

SEQ ID NO: 2718 - protein, 2093 aa, synthetic construct
MPAAKRVKLDGGDKKYSIGLDIGTNSVGWAVITDEYKVPSKKFKVLGNTDRHSIKKNLIGALLFDSGETAEATRLKRTARRRYTRRKNRICYLQEIFSNEMAKVDDSFFHRLEESFLVEEDKKHERHPIFGNIVDEVAYHEKYPTIYHLRKKLVDSTDKADLRLIYLALAHMIKFRGHFLIEGDLNPDNSDVDKLFIQLVQTYNQLFEENPINASGVDAKAILSARLSKSRRLENLIAQLPGEKKNGLFGNLIALSLGLTPNFKSNFDLAEDAKLQLSKDTYDDDLDNLLAQIGDQYADLFLAAKNLSDAILLSDILRVNTEITKAPLSASMIKRYDEHHQDLTLLKALVRQQLPEKYKEIFFDQSKNGYAGYIDGGASQEEFYKFIKPILEKMDGTEELLVKLNREDLLRKQRTFDNGSIPHQIHLGELHAILRRQEDFYPFLKDNREKIEKILTFRIPYYVGPLARGNSRFAWMTRKSEETITPWNFEEVVDKGASAQSFIERMTNFDKNLPNEKVLPKHSLLYEYFTVYNELTKVKYVTEGMRKPAFLSGEQKKAIVDLLFKTNRKVTVKQLKEDYFKKIECFDSVEISGVEDRFNASLGTYHDLLKIIKDKDFLDNEENEDILEDIVLTLTLFEDREMIEERLKTYAHLFDDKVMKQLKRRRYTGWGRLSRKLINGIRDKQSGKTILDFLKSDGFANRNFMQLIHDDSLTFKEDIQKAQVSGQGDSLHEHIANLAGSPAIKKGILQTVKVVDELVKVMGRHKPENIVIEMARENQTTQKGQKNSRERMKRIEEGIKELGSQILKEHPVENTQLQNEKLYLYYLQNGRDMYVDQELDINRLSDYDVDHIVPQSFLKDDSIDNKVLTRSDKARGKSDNVPSEEVVKKMKNYWRQLLNAKLITQRKFDNLTKAERGGLSELDKAGFIKRQLVETRQITKHVAQILDSRMNTKYDENDKLIREVKVITLKSKLVSDFRKDFQFYKVREINNYHHAHDAYLNAVVGTALIKKYPKLESEFVYGDYKVYDVRKMIAKSEQEIGKATAKYFFYSNIMNFFKTEITLANGEIRKRPLIETNGETGEIVWDKGRDFATVRKVLSMPQVNIVKKTEVQTGGFSKESILPKRNSDKLIARKKDWDPKKYGGFDSPTVAYSVLVVAKVEKGKSKKLKSVKELLGITIMERSSFEKNPIDFLEAKGYKEVKKDLIIKLPKYSLFELENGRKRMLASAGELQKGNELALPSKYVNFLYLASHYEKLKGSPEDNEQKQLFVEQHKHYLDEIIEQISEFSKRVILADANLDKVLSAYNKHRDKPIREQAENIIHLFTLTNLGAPAAFKYFDTTIDRKRYTSTKEVLDATLIHQSITGLYETRIDLSQLGGDGGGSSEAAAKGGTLNIEDEHRLHETSKEPDVSLGSTWLSDFPQAWAETGGMGLAVRQAPLIIPLKATSTPVSIKQYPMSQEARLGIKPHIQRLLDQGILVPCQSPWNTPLLPVKKPGTNDYRPVQDLREVNKRVEDIHPTVPNPYNLLSGLPPSHQWYTVLDLKDAFFCLRLHPTSQPLFAFEWRDPEMGISGQLTWTRLPQGFKNSPTLFNEALHRDLADFRIQHPDLILLQYVDDLLLAATSELDCQQGTRALLQTLGNLGYRASAKKAQICQKQVKYLGYLLKEGQRWLTEARKETVMGQPTPKTPRQLREFLGTAGFCRLWIPGFAEMAAPLYPLTKPGTLFNWGPDQQKAYQEIKQALLTAPALGLPDLTKPFELFVDEKQGYAKGVLTQKLGPWRRPVAYLSKKLDPVAAGWPPCLRMVAAIAVLTKDAGKLTMGQPLVILAPHAVEALVKQPPDRWLSNARMTHYQALLLDTDRVQFGPVVALNPATLLPLPEEGLQHNCLDILAEAHGTRPDLTDQPLPDADHTWYTDGSSLLQEGQRKAGAAVTTETEVIWAKALPAGTSAQRAELIALTQALKMAEGKKLNVYTDSRYAFATAHIHGEIYRRRGWLTSEGKEIKNKDEILALLKALFLPKRLSIIHCPGHQKGHSAEARGNRMADQAARKAAITETPDTSTLLAGKRTADGSEFEKRTADGSEFESPKKKAKVE

SEQ ID NO: 2719 - protein, 2096 aa, synthetic construct
MPAAKRVKLDGGDKKYSIGLDIGTNSVGWAVITDEYKVPSKKFKVLGNTDRHSIKKNLIGALLFDSGETAEATRLKRTARRRYTRRKNRICYLQEIFSNEMAKVDDSFFHRLEESFLVEEDKKHERHPIFGNIVDEVAYHEKYPTIYHLRKKLVDSTDKADLRLIYLALAHMIKFRGHFLIEGDLNPDNSDVDKLFIQLVQTYNQLFEENPINASGVDAKAILSARLSKSRRLENLIAQLPGEKKNGLFGNLIALSLGLTPNFKSNFDLAEDAKLQLSKDTYDDDLDNLLAQIGDQYADLFLAAKNLSDAILLSDILRVNTEITKAPLSASMIKRYDEHHQDLTLLKALVRQQLPEKYKEIFFDQSKNGYAGYIDGGASQEEFYKFIKPILEKMDGTEELLVKLNREDLLRKQRTFDNGSIPHQIHLGELHAILRRQEDFYPFLKDNREKIEKILTFRIPYYVGPLARGNSRFAWMTRKSEETITPWNFEEVVDKGASAQSFIERMTNFDKNLPNEKVLPKHSLLYEYFTVYNELTKVKYVTEGMRKPAFLSGEQKKAIVDLLFKTNRKVTVKQLKEDYFKKIECFDSVEISGVEDRFNASLGTYHDLLKIIKDKDFLDNEENEDILEDIVLTLTLFEDREMIEERLKTYAHLFDDKVMKQLKRRRYTGWGRLSRKLINGIRDKQSGKTILDFLKSDGFANRNFMQLIHDDSLTFKEDIQKAQVSGQGDSLHEHIANLAGSPAIKKGILQTVKVVDELVKVMGRHKPENIVIEMARENQTTQKGQKNSRERMKRIEEGIKELGSQILKEHPVENTQLQNEKLYLYYLQNGRDMYVDQELDINRLSDYDVDHIVPQSFLKDDSIDNKVLTRSDKARGKSDNVPSEEVVKKMKNYWRQLLNAKLITQRKFDNLTKAERGGLSELDKAGFIKRQLVETRQITKHVAQILDSRMNTKYDENDKLIREVKVITLKSKLVSDFRKDFQFYKVREINNYHHAHDAYLNAVVGTALIKKYPKLESEFVYGDYKVYDVRKMIAKSEQEIGKATAKYFFYSNIMNFFKTEITLANGEIRKRPLIETNGETGEIVWDKGRDFATVRKVLSMPQVNIVKKTEVQTGGFSKESILPKRNSDKLIARKKDWDPKKYGGFDSPTVAYSVLVVAKVEKGKSKKLKSVKELLGITIMERSSFEKNPIDFLEAKGYKEVKKDLIIKLPKYSLFELENGRKRMLASAGELQKGNELALPSKYVNFLYLASHYEKLKGSPEDNEQKQLFVEQHKHYLDEIIEQISEFSKRVILADANLDKVLSAYNKHRDKPIREQAENIIHLFTLTNLGAPAAFKYFDTTIDRKRYTSTKEVLDATLIHQSITGLYETRIDLSQLGGDGGGGGEAAAKPAPGGTLNIEDEHRLHETSKEPDVSLGSTWLSDFPQAWAETGGMGLAVRQAPLIIPLKATSTPVSIKQYPMSQEARLGIKPHIQRLLDQGILVPCQSPWNTPLLPVKKPGTNDYRPVQDLREVNKRVEDIHPTVPNPYNLLSGLPPSHQWYTVLDLKDAFFCLRLHPTSQPLFAFEWRDPEMGISGQLTWTRLPQGFKNSPTLFNEALHRDLADFRIQHPDLILLQYVDDLLLAATSELDCQQGTRALLQTLGNLGYRASAKKAQICQKQVKYLGYLLKEGQRWLTEARKETVMGQPTPKTPRQLREFLGTAGFCRLWIPGFAEMAAPLYPLTKPGTLFNWGPDQQKAYQEIKQALLTAPALGLPDLTKPFELFVDEKQGYAKGVLTQKLGPWRRPVAYLSKKLDPVAAGWPPCLRMVAAIAVLTKDAGKLTMGQPLVILAPHAVEALVKQPPDRWLSNARMTHYQALLLDTDRVQFGPVVALNPATLLPLPEEGLQHNCLDILAEAHGTRPDLTDQPLPDADHTWYTDGSSLLQEGQRKAGAAVTTETEVIWAKALPAGTSAQRAELIALTQALKMAEGKKLNVYTDSRYAFATAHIHGEIYRRRGWLTSEGKEIKNKDEILALLKALFLPKRLSIIHCPGHQKGHSAEARGNRMADQAARKAAITETPDTSTLLAGKRTADGSEFEKRTADGSEFESPKKKAKVE

SEQ ID NO: 2720 - protein, 2105 aa, synthetic construct
MPAAKRVKLDGGDKKYSIGLDIGTNSVGWAVITDEYKVPSKKFKVLGNTDRHSIKKNLIGALLFDSGETAEATRLKRTARRRYTRRKNRICYLQEIFSNEMAKVDDSFFHRLEESFLVEEDKKHERHPIFGNIVDEVAYHEKYPTIYHLRKKLVDSTDKADLRLIYLALAHMIKFRGHFLIEGDLNPDNSDVDKLFIQLVQTYNQLFEENPINASGVDAKAILSARLSKSRRLENLIAQLPGEKKNGLFGNLIALSLGLTPNFKSNFDLAEDAKLQLSKDTYDDDLDNLLAQIGDQYADLFLAAKNLSDAILLSDILRVNTEITKAPLSASMIKRYDEHHQDLTLLKALVRQQLPEKYKEIFFDQSKNGYAGYIDGGASQEEFYKFIKPILEKMDGTEELLVKLNREDLLRKQRTFDNGSIPHQIHLGELHAILRRQEDFYPFLKDNREKIEKILTFRIPYYVGPLARGNSRFAWMTRKSEETITPWNFEEVVDKGASAQSFIERMTNFDKNLPNEKVLPKHSLLYEYFTVYNELTKVKYVTEGMRKPAFLSGEQKKAIVDLLFKTNRKVTVKQLKEDYFKKIECFDSVEISGVEDRFNASLGTYHDLLKIIKDKDFLDNEENEDILEDIVLTLTLFEDREMIEERLKTYAHLFDDKVMKQLKRRRYTGWGRLSRKLINGIRDKQSGKTILDFLKSDGFANRNFMQLIHDDSLTFKEDIQKAQVSGQGDSLHEHIANLAGSPAIKKGILQTVKVVDELVKVMGRHKPENIVIEMARENQTTQKGQKNSRERMKRIEEGIKELGSQILKEHPVENTQLQNEKLYLYYLQNGRDMYVDQELDINRLSDYDVDHIVPQSFLKDDSIDNKVLTRSDKARGKSDNVPSEEVVKKMKNYWRQLLNAKLITQRKFDNLTKAERGGLSELDKAGFIKRQLVETRQITKHVAQILDSRMNTKYDENDKLIREVKVITLKSKLVSDFRKDFQFYKVREINNYHHAHDAYLNAVVGTALIKKYPKLESEFVYGDYKVYDVRKMIAKSEQEIGKATAKYFFYSNIMNFFKTEITLANGEIRKRPLIETNGETGEIVWDKGRDFATVRKVLSMPQVNIVKKTEVQTGGFSKESILPKRNSDKLIARKKDWDPKKYGGFDSPTVAYSVLVVAKVEKGKSKKLKSVKELLGITIMERSSFEKNPIDFLEAKGYKEVKKDLIIKLPKYSLFELENGRKRMLASAGELQKGNELALPSKYVNFLYLASHYEKLKGSPEDNEQKQLFVEQHKHYLDEIIEQISEFSKRVILADANLDKVLSAYNKHRDKPIREQAENIIHLFTLTNLGAPAAFKYFDTTIDRKRYTSTKEVLDATLIHQSITGLYETRIDLSQLGGDGGEAAAKEAAAKEAAAKEAAAKGGTLNIEDEHRLHETSKEPDVSLGSTWLSDFPQAWAETGGMGLAVRQAPLIIPLKATSTPVSIKQYPMSQEARLGIKPHIQRLLDQGILVPCQSPWNTPLLPVKKPGTNDYRPVQDLREVNKRVEDIHPTVPNPYNLLSGLPPSHQWYTVLDLKDAFFCLRLHPTSQPLFAFEWRDPEMGISGQLTWTRLPQGFKNSPTLFNEALHRDLADFRIQHPDLILLQYVDDLLLAATSELDCQQGTRALLQTLGNLGYRASAKKAQICQKQVKYLGYLLKEGQRWLTEARKETVMGQPTPKTPRQLREFLGTAGFCRLWIPGFAEMAAPLYPLTKPGTLFNWGPDQQKAYQEIKQALLTAPALGLPDLTKPFELFVDEKQGYAKGVLTQKLGPWRRPVAYLSKKLDPVAAGWPPCLRMVAAIAVLTKDAGKLTMGQPLVILAPHAVEALVKQPPDRWLSNARMTHYQALLLDTDRVQFGPVVALNPATLLPLPEEGLQHNCLDILAEAHGTRPDLTDQPLPDADHTWYTDGSSLLQEGQRKAGAAVTTETEVIWAKALPAGTSAQRAELIALTQALKMAEGKKLNVYTDSRYAFATAHIHGEIYRRRGWLTSEGKEIKNKDEILALLKALFLPKRLSIIHCPGHQKGHSAEARGNRMADQAARKAAITETPDTSTLLAGKRTADGSEFEKRTADGSEFESPKKKAKVE

SEQ ID NO: 2721 - protein, 2096 aa, synthetic construct
MPAAKRVKLDGGDKKYSIGLDIGTNSVGWAVITDEYKVPSKKFKVLGNTDRHSIKKNLIGALLFDSGETAEATRLKRTARRRYTRRKNRICYLQEIFSNEMAKVDDSFFHRLEESFLVEEDKKHERHPIFGNIVDEVAYHEKYPTIYHLRKKLVDSTDKADLRLIYLALAHMIKFRGHFLIEGDLNPDNSDVDKLFIQLVQTYNQLFEENPINASGVDAKAILSARLSKSRRLENLIAQLPGEKKNGLFGNLIALSLGLTPNFKSNFDLAEDAKLQLSKDTYDDDLDNLLAQIGDQYADLFLAAKNLSDAILLSDILRVNTEITKAPLSASMIKRYDEHHQDLTLLKALVRQQLPEKYKEIFFDQSKNGYAGYIDGGASQEEFYKFIKPILEKMDGTEELLVKLNREDLLRKQRTFDNGSIPHQIHLGELHAILRRQEDFYPFLKDNREKIEKILTFRIPYYVGPLARGNSRFAWMTRKSEETITPWNFEEVVDKGASAQSFIERMTNFDKNLPNEKVLPKHSLLYEYFTVYNELTKVKYVTEGMRKPAFLSGEQKKAIVDLLFKTNRKVTVKQLKEDYFKKIECFDSVEISGVEDRFNASLGTYHDLLKIIKDKDFLDNEENEDILEDIVLTLTLFEDREMIEERLKTYAHLFDDKVMKQLKRRRYTGWGRLSRKLINGIRDKQSGKTILDFLKSDGFANRNFMQLIHDDSLTFKEDIQKAQVSGQGDSLHEHIANLAGSPAIKKGILQTVKVVDELVKVMGRHKPENIVIEMARENQTTQKGQKNSRERMKRIEEGIKELGSQILKEHPVENTQLQNEKLYLYYLQNGRDMYVDQELDINRLSDYDVDHIVPQSFLKDDSIDNKVLTRSDKARGKSDNVPSEEVVKKMKNYWRQLLNAKLITQRKFDNLTKAERGGLSELDKAGFIKRQLVETRQITKHVAQILDSRMNTKYDENDKLIREVKVITLKSKLVSDFRKDFQFYKVREINNYHHAHDAYLNAVVGTALIKKYPKLESEFVYGDYKVYDVRKMIAKSEQEIGKATAKYFFYSNIMNFFKTEITLANGEIRKRPLIETNGETGEIVWDKGRDFATVRKVLSMPQVNIVKKTEVQTGGFSKESILPKRNSDKLIARKKDWDPKKYGGFDSPTVAYSVLVVAKVEKGKSKKLKSVKELLGITIMERSSFEKNPIDFLEAKGYKEVKKDLIIKLPKYSLFELENGRKRMLASAGELQKGNELALPSKYVNFLYLASHYEKLKGSPEDNEQKQLFVEQHKHYLDEIIEQISEFSKRVILADANLDKVLSAYNKHRDKPIREQAENIIHLFTLTNLGAPAAFKYFDTTIDRKRYTSTKEVLDATLIHQSITGLYETRIDLSQLGGDGGGGGEAAAKGGSGGTLNIEDEHRLHETSKEPDVSLGSTWLSDFPQAWAETGGMGLAVRQAPLIIPLKATSTPVSIKQYPMSQEARLGIKPHIQRLLDQGILVPCQSPWNTPLLPVKKPGTNDYRPVQDLREVNKRVEDIHPTVPNPYNLLSGLPPSHQWYTVLDLKDAFFCLRLHPTSQPLFAFEWRDPEMGISGQLTWTRLPQGFKNSPTLFNEALHRDLADFRIQHPDLILLQYVDDLLLAATSELDCQQGTRALLQTLGNLGYRASAKKAQICQKQVKYLGYLLKEGQRWLTEARKETVMGQPTPKTPRQLREFLGTAGFCRLWIPGFAEMAAPLYPLTKPGTLFNWGPDQQKAYQEIKQALLTAPALGLPDLTKPFELFVDEKQGYAKGVLTQKLGPWRRPVAYLSKKLDPVAAGWPPCLRMVAAIAVLTKDAGKLTMGQPLVILAPHAVEALVKQPPDRWLSNARMTHYQALLLDTDRVQFGPVVALNPATLLPLPEEGLQHNCLDILAEAHGTRPDLTDQPLPDADHTWYTDGSSLLQEGQRKAGAAVTTETEVIWAKALPAGTSAQRAELIALTQALKMAEGKKLNVYTDSRYAFATAHIHGEIYRRRGWLTSEGKEIKNKDEILALLKALFLPKRLSIIHCPGHQKGHSAEARGNRMADQAARKAAITETPDTSTLLAGKRTADGSEFEKRTADGSEFESPKKKAKVE

SEQ ID NO: 2722 - protein, 2096 aa, synthetic construct
MPAAKRVKLDGGDKKYSIGLDIGTNSVGWAVITDEYKVPSKKFKVLGNTDRHSIKKNLIGALLFDSGETAEATRLKRTARRRYTRRKNRICYLQEIFSNEMAKVDDSFFHRLEESFLVEEDKKHERHPIFGNIVDEVAYHEKYPTIYHLRKKLVDSTDKADLRLIYLALAHMIKFRGHFLIEGDLNPDNSDVDKLFIQLVQTYNQLFEENPINASGVDAKAILSARLSKSRRLENLIAQLPGEKKNGLFGNLIALSLGLTPNFKSNFDLAEDAKLQLSKDTYDDDLDNLLAQIGDQYADLFLAAKNLSDAILLSDILRVNTEITKAPLSASMIKRYDEHHQDLTLLKALVRQQLPEKYKEIFFDQSKNGYAGYIDGGASQEEFYKFIKPILEKMDGTEELLVKLNREDLLRKQRTFDNGSIPHQIHLGELHAILRRQEDFYPFLKDNREKIEKILTFRIPYYVGPLARGNSRFAWMTRKSEETITPWNFEEVVDKGASAQSFIERMTNFDKNLPNEKVLPKHSLLYEYFTVYNELTKVKYVTEGMRKPAFLSGEQKKAIVDLLFKTNRKVTVKQLKEDYFKKIECFDSVEISGVEDRFNASLGTYHDLLKIIKDKDFLDNEENEDILEDIVLTLTLFEDREMIEERLKTYAHLFDDKVMKQLKRRRYTGWGRLSRKLINGIRDKQSGKTILDFLKSDGFANRNFMQLIHDDSLTFKEDIQKAQVSGQGDSLHEHIANLAGSPAIKKGILQTVKVVDELVKVMGRHKPENIVIEMARENQTTQKGQKNSRERMKRIEEGIKELGSQILKEHPVENTQLQNEKLYLYYLQNGRDMYVDQELDINRLSDYDVDHIVPQSFLKDDSIDNKVLTRSDKARGKSDNVPSEEVVKKMKNYWRQLLNAKLITQRKFDNLTKAERGGLSELDKAGFIKRQLVETRQITKHVAQILDSRMNTKYDENDKLIREVKVITLKSKLVSDFRKDFQFYKVREINNYHHAHDAYLNAVVGTALIKKYPKLESEFVYGDYKVYDVRKMIAKSEQEIGKATAKYFFYSNIMNFFKTEITLANGEIRKRPLIETNGETGEIVWDKGRDFATVRKVLSMPQVNIVKKTEVQTGGFSKESILPKRNSDKLIARKKDWDPKKYGGFDSPTVAYSVLVVAKVEKGKSKKLKSVKELLGITIMERSSFEKNPIDFLEAKGYKEVKKDLIIKLPKYSLFELENGRKRMLASAGELQKGNELALPSKYVNFLYLASHYEKLKGSPEDNEQKQLFVEQHKHYLDEIIEQISEFSKRVILADANLDKVLSAYNKHRDKPIREQAENIIHLFTLTNLGAPAAFKYFDTTIDRKRYTSTKEVLDATLIHQSITGLYETRIDLSQLGGDGGGGGGGSEAAAKGGTLNIEDEHRLHETSKEPDVSLGSTWLSDFPQAWAETGGMGLAVRQAPLIIPLKATSTPVSIKQYPMSQEARLGIKPHIQRLLDQGILVPCQSPWNTPLLPVKKPGTNDYRPVQDLREVNKRVEDIHPTVPNPYNLLSGLPPSHQWYTVLDLKDAFFCLRLHPTSQPLFAFEWRDPEMGISGQLTWTRLPQGFKNSPTLFNEALHRDLADFRIQHPDLILLQYVDDLLLAATSELDCQQGTRALLQTLGNLGYRASAKKAQICQKQVKYLGYLLKEGQRWLTEARKETVMGQPTPKTPRQLREFLGTAGFCRLWIPGFAEMAAPLYPLTKPGTLFNWGPDQQKAYQEIKQALLTAPALGLPDLTKPFELFVDEKQGYAKGVLTQKLGPWRRPVAYLSKKLDPVAAGWPPCLRMVAAIAVLTKDAGKLTMGQPLVILAPHAVEALVKQPPDRWLSNARMTHYQALLLDTDRVQFGPVVALNPATLLPLPEEGLQHNCLDILAEAHGTRPDLTDQPLPDADHTWYTDGSSLLQEGQRKAGAAVTTETEVIWAKALPAGTSAQRAELIALTQALKMAEGKKLNVYTDSRYAFATAHIHGEIYRRRGWLTSEGKEIKNKDEILALLKALFLPKRLSIIHCPGHQKGHSAEARGNRMADQAARKAAITETPDTSTLLAGKRTADGSEFEKRTADGSEFESPKKKAKVE

SEQ ID NO: 2723 - protein, 2096 aa, synthetic construct
MPAAKRVKLDGGDKKYSIGLDIGTNSVGWAVITDEYKVPSKKFKVLGNTDRHSIKKNLIGALLFDSGETAEATRLKRTARRRYTRRKNRICYLQEIFSNEMAKVDDSFFHRLEESFLVEEDKKHERHPIFGNIVDEVAYHEKYPTIYHLRKKLVDSTDKADLRLIYLALAHMIKFRGHFLIEGDLNPDNSDVDKLFIQLVQTYNQLFEENPINASGVDAKAILSARLSKSRRLENLIAQLPGEKKNGLFGNLIALSLGLTPNFKSNFDLAEDAKLQLSKDTYDDDLDNLLAQIGDQYADLFLAAKNLSDAILLSDILRVNTEITKAPLSASMIKRYDEHHQDLTLLKALVRQQLPEKYKEIFFDQSKNGYAGYIDGGASQEEFYKFIKPILEKMDGTEELLVKLNREDLLRKQRTFDNGSIPHQIHLGELHAILRRQEDFYPFLKDNREKIEKILTFRIPYYVGPLARGNSRFAWMTRKSEETITPWNFEEVVDKGASAQSFIERMTNFDKNLPNEKVLPKHSLLYEYFTVYNELTKVKYVTEGMRKPAFLSGEQKKAIVDLLFKTNRKVTVKQLKEDYFKKIECFDSVEISGVEDRFNASLGTYHDLLKIIKDKDFLDNEENEDILEDIVLTLTLFEDREMIEERLKTYAHLFDDKVMKQLKRRRYTGWGRLSRKLINGIRDKQSGKTILDFLKSDGFANRNFMQLIHDDSLTFKEDIQKAQVSGQGDSLHEHIANLAGSPAIKKGILQTVKVVDELVKVMGRHKPENIVIEMARENQTTQKGQKNSRERMKRIEEGIKELGSQILKEHPVENTQLQNEKLYLYYLQNGRDMYVDQELDINRLSDYDVDHIVPQSFLKDDSIDNKVLTRSDKARGKSDNVPSEEVVKKMKNYWRQLLNAKLITQRKFDNLTKAERGGLSELDKAGFIKRQLVETRQITKHVAQILDSRMNTKYDENDKLIREVKVITLKSKLVSDFRKDFQFYKVREINNYHHAHDAYLNAVVGTALIKKYPKLESEFVYGDYKVYDVRKMIAKSEQEIGKATAKYFFYSNIMNFFKTEITLANGEIRKRPLIETNGETGEIVWDKGRDFATVRKVLSMPQVNIVKKTEVQTGGFSKESILPKRNSDKLIARKKDWDPKKYGGFDSPTVAYSVLVVAKVEKGKSKKLKSVKELLGITIMERSSFEKNPIDFLEAKGYKEVKKDLIIKLPKYSLFELENGRKRMLASAGELQKGNELALPSKYVNFLYLASHYEKLKGSPEDNEQKQLFVEQHKHYLDEIIEQISEFSKRVILADANLDKVLSAYNKHRDKPIREQAENIIHLFTLTNLGAPAAFKYFDTTIDRKRYTSTKEVLDATLIHQSITGLYETRIDLSQLGGDGGEAAAKGSSPAPGGTLNIEDEHRLHETSKEPDVSLGSTWLSDFPQAWAETGGMGLAVRQAPLIIPLKATSTPVSIKQYPMSQEARLGIKPHIQRLLDQGILVPCQSPWNTPLLPVKKPGTNDYRPVQDLREVNKRVEDIHPTVPNPYNLLSGLPPSHQWYTVLDLKDAFFCLRLHPTSQPLFAFEWRDPEMGISGQLTWTRLPQGFKNSPTLFNEALHRDLADFRIQHPDLILLQYVDDLLLAATSELDCQQGTRALLQTLGNLGYRASAKKAQICQKQVKYLGYLLKEGQRWLTEARKETVMGQPTPKTPRQLREFLGTAGFCRLWIPGFAEMAAPLYPLTKPGTLFNWGPDQQKAYQEIKQALLTAPALGLPDLTKPFELFVDEKQGYAKGVLTQKLGPWRRPVAYLSKKLDPVAAGWPPCLRMVAAIAVLTKDAGKLTMGQPLVILAPHAVEALVKQPPDRWLSNARMTHYQALLLDTDRVQFGPVVALNPATLLPLPEEGLQHNCLDILAEAHGTRPDLTDQPLPDADHTWYTDGSSLLQEGQRKAGAAVTTETEVIWAKALPAGTSAQRAELIALTQALKMAEGKKLNVYTDSRYAFATAHIHGEIYRRRGWLTSEGKEIKNKDEILALLKALFLPKRLSIIHCPGHQKGHSAEARGNRMADQAARKAAITETPDTSTLLAGKRTADGSEFEKRTADGSEFESPKKKAKVE

SEQ ID NO: 2724 - protein, 2093 aa, synthetic construct
MPAAKRVKLDGGDKKYSIGLDIGTNSVGWAVITDEYKVPSKKFKVLGNTDRHSIKKNLIGALLFDSGETAEATRLKRTARRRYTRRKNRICYLQEIFSNEMAKVDDSFFHRLEESFLVEEDKKHERHPIFGNIVDEVAYHEKYPTIYHLRKKLVDSTDKADLRLIYLALAHMIKFRGHFLIEGDLNPDNSDVDKLFIQLVQTYNQLFEENPINASGVDAKAILSARLSKSRRLENLIAQLPGEKKNGLFGNLIALSLGLTPNFKSNFDLAEDAKLQLSKDTYDDDLDNLLAQIGDQYADLFLAAKNLSDAILLSDILRVNTEITKAPLSASMIKRYDEHHQDLTLLKALVRQQLPEKYKEIFFDQSKNGYAGYIDGGASQEEFYKFIKPILEKMDGTEELLVKLNREDLLRKQRTFDNGSIPHQIHLGELHAILRRQEDFYPFLKDNREKIEKILTFRIPYYVGPLARGNSRFAWMTRKSEETITPWNFEEVVDKGASAQSFIERMTNFDKNLPNEKVLPKHSLLYEYFTVYNELTKVKYVTEGMRKPAFLSGEQKKAIVDLLFKTNRKVTVKQLKEDYFKKIECFDSVEISGVEDRFNASLGTYHDLLKIIKDKDFLDNEENEDILEDIVLTLTLFEDREMIEERLKTYAHLFDDKVMKQLKRRRYTGWGRLSRKLINGIRDKQSGKTILDFLKSDGFANRNFMQLIHDDSLTFKEDIQKAQVSGQGDSLHEHIANLAGSPAIKKGILQTVKVVDELVKVMGRHKPENIVIEMARENQTTQKGQKNSRERMKRIEEGIKELGSQILKEHPVENTQLQNEKLYLYYLQNGRDMYVDQELDINRLSDYDVDHIVPQSFLKDDSIDNKVLTRSDKARGKSDNVPSEEVVKKMKNYWRQLLNAKLITQRKFDNLTKAERGGLSELDKAGFIKRQLVETRQITKHVAQILDSRMNTKYDENDKLIREVKVITLKSKLVSDFRKDFQFYKVREINNYHHAHDAYLNAVVGTALIKKYPKLESEFVYGDYKVYDVRKMIAKSEQEIGKATAKYFFYSNIMNFFKTEITLANGEIRKRPLIETNGETGEIVWDKGRDFATVRKVLSMPQVNIVKKTEVQTGGFSKESILPKRNSDKLIARKKDWDPKKYGGFDSPTVAYSVLVVAKVEKGKSKKLKSVKELLGITIMERSSFEKNPIDFLEAKGYKEVKKDLIIKLPKYSLFELENGRKRMLASAGELQKGNELALPSKYVNFLYLASHYEKLKGSPEDNEQKQLFVEQHKHYLDEIIEQISEFSKRVILADANLDKVLSAYNKHRDKPIREQAENIIHLFTLTNLGAPAAFKYFDTTIDRKRYTSTKEVLDATLIHQSITGLYETRIDLSQLGGDGGEAAAKPAPGGTLNIEDEHRLHETSKEPDVSLGSTWLSDFPQAWAETGGMGLAVRQAPLIIPLKATSTPVSIKQYPMSQEARLGIKPHIQRLLDQGILVPCQSPWNTPLLPVKKPGTNDYRPVQDLREVNKRVEDIHPTVPNPYNLLSGLPPSHQWYTVLDLKDAFFCLRLHPTSQPLFAFEWRDPEMGISGQLTWTRLPQGFKNSPTLFNEALHRDLADFRIQHPDLILLQYVDDLLLAATSELDCQQGTRALLQTLGNLGYRASAKKAQICQKQVKYLGYLLKEGQRWLTEARKETVMGQPTPKTPRQLREFLGTAGFCRLWIPGFAEMAAPLYPLTKPGTLFNWGPDQQKAYQEIKQALLTAPALGLPDLTKPFELFVDEKQGYAKGVLTQKLGPWRRPVAYLSKKLDPVAAGWPPCLRMVAAIAVLTKDAGKLTMGQPLVILAPHAVEALVKQPPDRWLSNARMTHYQALLLDTDRVQFGPVVALNPATLLPLPEEGLQHNCLDILAEAHGTRPDLTDQPLPDADHTWYTDGSSLLQEGQRKAGAAVTTETEVIWAKALPAGTSAQRAELIALTQALKMAEGKKLNVYTDSRYAFATAHIHGEIYRRRGWLTSEGKEIKNKDEILALLKALFLPKRLSIIHCPGHQKGHSAEARGNRMADQAARKAAITETPDTSTLLAGKRTADGSEFEKRTADGSEFESPKKKAKVE

SEQ ID NO: 2725 - protein, 2100 aa, synthetic construct
MPAAKRVKLDGGDKKYSIGLDIGTNSVGWAVITDEYKVPSKKFKVLGNTDRHSIKKNLIGALLFDSGETAEATRLKRTARRRYTRRKNRICYLQEIFSNEMAKVDDSFFHRLEESFLVEEDKKHERHPIFGNIVDEVAYHEKYPTIYHLRKKLVDSTDKADLRLIYLALAHMIKFRGHFLIEGDLNPDNSDVDKLFIQLVQTYNQLFEENPINASGVDAKAILSARLSKSRRLENLIAQLPGEKKNGLFGNLIALSLGLTPNFKSNFDLAEDAKLQLSKDTYDDDLDNLLAQIGDQYADLFLAAKNLSDAILLSDILRVNTEITKAPLSASMIKRYDEHHQDLTLLKALVRQQLPEKYKEIFFDQSKNGYAGYIDGGASQEEFYKFIKPILEKMDGTEELLVKLNREDLLRKQRTFDNGSIPHQIHLGELHAILRRQEDFYPFLKDNREKIEKILTFRIPYYVGPLARGNSRFAWMTRKSEETITPWNFEEVVDKGASAQSFIERMTNFDKNLPNEKVLPKHSLLYEYFTVYNELTKVKYVTEGMRKPAFLSGEQKKAIVDLLFKTNRKVTVKQLKEDYFKKIECFDSVEISGVEDRFNASLGTYHDLLKIIKDKDFLDNEENEDILEDIVLTLTLFEDREMIEERLKTYAHLFDDKVMKQLKRRRYTGWGRLSRKLINGIRDKQSGKTILDFLKSDGFANRNFMQLIHDDSLTFKEDIQKAQVSGQGDSLHEHIANLAGSPAIKKGILQTVKVVDELVKVMGRHKPENIVIEMARENQTTQKGQKNSRERMKRIEEGIKELGSQILKEHPVENTQLQNEKLYLYYLQNGRDMYVDQELDINRLSDYDVDHIVPQSFLKDDSIDNKVLTRSDKARGKSDNVPSEEVVKKMKNYWRQLLNAKLITQRKFDNLTKAERGGLSELDKAGFIKRQLVETRQITKHVAQILDSRMNTKYDENDKLIREVKVITLKSKLVSDFRKDFQFYKVREINNYHHAHDAYLNAVVGTALIKKYPKLESEFVYGDYKVYDVRKMIAKSEQEIGKATAKYFFYSNIMNFFKTEITLANGEIRKRPLIETNGETGEIVWDKGRDFATVRKVLSMPQVNIVKKTEVQTGGFSKESILPKRNSDKLIARKKDWDPKKYGGFDSPTVAYSVLVVAKVEKGKSKKLKSVKELLGITIMERSSFEKNPIDFLEAKGYKEVKKDLIIKLPKYSLFELENGRKRMLASAGELQKGNELALPSKYVNFLYLASHYEKLKGSPEDNEQKQLFVEQHKHYLDEIIEQISEFSKRVILADANLDKVLSAYNKHRDKPIREQAENIIHLFTLTNLGAPAAFKYFDTTIDRKRYTSTKEVLDATLIHQSITGLYETRIDLSQLGGDGGGGGGSEAAAKGGGGSGGTLNIEDEHRLHETSKEPDVSLGSTWLSDFPQAWAETGGMGLAVRQAPLIIPLKATSTPVSIKQYPMSQEARLGIKPHIQRLLDQGILVPCQSPWNTPLLPVKKPGTNDYRPVQDLREVNKRVEDIHPTVPNPYNLLSGLPPSHQWYTVLDLKDAFFCLRLHPTSQPLFAFEWRDPEMGISGQLTWTRLPQGFKNSPTLFNEALHRDLADFRIQHPDLILLQYVDDLLLAATSELDCQQGTRALLQTLGNLGYRASAKKAQICQKQVKYLGYLLKEGQRWLTEARKETVMGQPTPKTPRQLREFLGTAGFCRLWIPGFAEMAAPLYPLTKPGTLFNWGPDQQKAYQEIKQALLTAPALGLPDLTKPFELFVDEKQGYAKGVLTQKLGPWRRPVAYLSKKLDPVAAGWPPCLRMVAAIAVLTKDAGKLTMGQPLVILAPHAVEALVKQPPDRWLSNARMTHYQALLLDTDRVQFGPVVALNPATLLPLPEEGLQHNCLDILAEAHGTRPDLTDQPLPDADHTWYTDGSSLLQEGQRKAGAAVTTETEVIWAKALPAGTSAQRAELIALTQALKMAEGKKLNVYTDSRYAFATAHIHGEIYRRRGWLTSEGKEIKNKDEILALLKALFLPKRLSIIHCPGHQKGHSAEARGNRMADQAARKAAITETPDTSTLLAGKRTADGSEFEKRTADGSEFESPKKKAKVE

SEQ ID NO: 2726 - protein, 2093 aa, synthetic construct
MPAAKRVKLDGGDKKYSIGLDIGTNSVGWAVITDEYKVPSKKFKVLGNTDRHSIKKNLIGALLFDSGETAEATRLKRTARRRYTRRKNRICYLQEIFSNEMAKVDDSFFHRLEESFLVEEDKKHERHPIFGNIVDEVAYHEKYPTIYHLRKKLVDSTDKADLRLIYLALAHMIKFRGHFLIEGDLNPDNSDVDKLFIQLVQTYNQLFEENPINASGVDAKAILSARLSKSRRLENLIAQLPGEKKNGLFGNLIALSLGLTPNFKSNFDLAEDAKLQLSKDTYDDDLDNLLAQIGDQYADLFLAAKNLSDAILLSDILRVNTEITKAPLSASMIKRYDEHHQDLTLLKALVRQQLPEKYKEIFFDQSKNGYAGYIDGGASQEEFYKFIKPILEKMDGTEELLVKLNREDLLRKQRTFDNGSIPHQIHLGELHAILRRQEDFYPFLKDNREKIEKILTFRIPYYVGPLARGNSRFAWMTRKSEETITPWNFEEVVDKGASAQSFIERMTNFDKNLPNEKVLPKHSLLYEYFTVYNELTKVKYVTEGMRKPAFLSGEQKKAIVDLLFKTNRKVTVKQLKEDYFKKIECFDSVEISGVEDRFNASLGTYHDLLKIIKDKDFLDNEENEDILEDIVLTLTLFEDREMIEERLKTYAHLFDDKVMKQLKRRRYTGWGRLSRKLINGIRDKQSGKTILDFLKSDGFANRNFMQLIHDDSLTFKEDIQKAQVSGQGDSLHEHIANLAGSPAIKKGILQTVKVVDELVKVMGRHKPENIVIEMARENQTTQKGQKNSRERMKRIEEGIKELGSQILKEHPVENTQLQNEKLYLYYLQNGRDMYVDQELDINRLSDYDVDHIVPQSFLKDDSIDNKVLTRSDKARGKSDNVPSEEVVKKMKNYWRQLLNAKLITQRKFDNLTKAERGGLSELDKAGFIKRQLVETRQITKHVAQILDSRMNTKYDENDKLIREVKVITLKSKLVSDFRKDFQFYKVREINNYHHAHDAYLNAVVGTALIKKYPKLESEFVYGDYKVYDVRKMIAKSEQEIGKATAKYFFYSNIMNFFKTEITLANGEIRKRPLIETNGETGEIVWDKGRDFATVRKVLSMPQVNIVKKTEVQTGGFSKESILPKRNSDKLIARKKDWDPKKYGGFDSPTVAYSVLVVAKVEKGKSKKLKSVKELLGITIMERSSFEKNPIDFLEAKGYKEVKKDLIIKLPKYSLFELENGRKRMLASAGELQKGNELALPSKYVNFLYLASHYEKLKGSPEDNEQKQLFVEQHKHYLDEIIEQISEFSKRVILADANLDKVLSAYNKHRDKPIREQAENIIHLFTLTNLGAPAAFKYFDTTIDRKRYTSTKEVLDATLIHQSITGLYETRIDLSQLGGDGGEAAAKGGSGGTLNIEDEHRLHETSKEPDVSLGSTWLSDFPQAWAETGGMGLAVRQAPLIIPLKATSTPVSIKQYPMSQEARLGIKPHIQRLLDQGILVPCQSPWNTPLLPVKKPGTNDYRPVQDLREVNKRVEDIHPTVPNPYNLLSGLPPSHQWYTVLDLKDAFFCLRLHPTSQPLFAFEWRDPEMGISGQLTWTRLPQGFKNSPTLFNEALHRDLADFRIQHPDLILLQYVDDLLLAATSELDCQQGTRALLQTLGNLGYRASAKKAQICQKQVKYLGYLLKEGQRWLTEARKETVMGQPTPKTPRQLREFLGTAGFCRLWIPGFAEMAAPLYPLTKPGTLFNWGPDQQKAYQEIKQALLTAPALGLPDLTKPFELFVDEKQGYAKGVLTQKLGPWRRPVAYLSKKLDPVAAGWPPCLRMVAAIAVLTKDAGKLTMGQPLVILAPHAVEALVKQPPDRWLSNARMTHYQALLLDTDRVQFGPVVALNPATLLPLPEEGLQHNCLDILAEAHGTRPDLTDQPLPDADHTWYTDGSSLLQEGQRKAGAAVTTETEVIWAKALPAGTSAQRAELIALTQALKMAEGKKLNVYTDSRYAFATAHIHGEIYRRRGWLTSEGKEIKNKDEILALLKALFLPKRLSIIHCPGHQKGHSAEARGNRMADQAARKAAITETPDTSTLLAGKRTADGSEFEKRTADGSEFESPKKKAKVE

SEQ ID NO: 2727 - protein, 2096 aa, synthetic construct
MPAAKRVKLDGGDKKYSIGLDIGTNSVGWAVITDEYKVPSKKFKVLGNTDRHSIKKNLIGALLFDSGETAEATRLKRTARRRYTRRKNRICYLQEIFSNEMAKVDDSFFHRLEESFLVEEDKKHERHPIFGNIVDEVAYHEKYPTIYHLRKKLVDSTDKADLRLIYLALAHMIKFRGHFLIEGDLNPDNSDVDKLFIQLVQTYNQLFEENPINASGVDAKAILSARLSKSRRLENLIAQLPGEKKNGLFGNLIALSLGLTPNFKSNFDLAEDAKLQLSKDTYDDDLDNLLAQIGDQYADLFLAAKNLSDAILLSDILRVNTEITKAPLSASMIKRYDEHHQDLTLLKALVRQQLPEKYKEIFFDQSKNGYAGYIDGGASQEEFYKFIKPILEKMDGTEELLVKLNREDLLRKQRTFDNGSIPHQIHLGELHAILRRQEDFYPFLKDNREKIEKILTFRIPYYVGPLARGNSRFAWMTRKSEETITPWNFEEVVDKGASAQSFIERMTNFDKNLPNEKVLPKHSLLYEYFTVYNELTKVKYVTEGMRKPAFLSGEQKKAIVDLLFKTNRKVTVKQLKEDYFKKIECFDSVEISGVEDRFNASLGTYHDLLKIIKDKDFLDNEENEDILEDIVLTLTLFEDREMIEERLKTYAHLFDDKVMKQLKRRRYTGWGRLSRKLINGIRDKQSGKTILDFLKSDGFANRNFMQLIHDDSLTFKEDIQKAQVSGQGDSLHEHIANLAGSPAIKKGILQTVKVVDELVKVMGRHKPENIVIEMARENQTTQKGQKNSRERMKRIEEGIKELGSQILKEHPVENTQLQNEKLYLYYLQNGRDMYVDQELDINRLSDYDVDHIVPQSFLKDDSIDNKVLTRSDKARGKSDNVPSEEVVKKMKNYWRQLLNAKLITQRKFDNLTKAERGGLSELDKAGFIKRQLVETRQITKHVAQILDSRMNTKYDENDKLIREVKVITLKSKLVSDFRKDFQFYKVREINNYHHAHDAYLNAVVGTALIKKYPKLESEFVYGDYKVYDVRKMIAKSEQEIGKATAKYFFYSNIMNFFKTEITLANGEIRKRPLIETNGETGEIVWDKGRDFATVRKVLSMPQVNIVKKTEVQTGGFSKESILPKRNSDKLIARKKDWDPKKYGGFDSPTVAYSVLVVAKVEKGKSKKLKSVKELLGITIMERSSFEKNPIDFLEAKGYKEVKKDLIIKLPKYSLFELENGRKRMLASAGELQKGNELALPSKYVNFLYLASHYEKLKGSPEDNEQKQLFVEQHKHYLDEIIEQISEFSKRVILADANLDKVLSAYNKHRDKPIREQAENIIHLFTLTNLGAPAAFKYFDTTIDRKRYTSTKEVLDATLIHQSITGLYETRIDLSQLGGDGGEAAAKGGSGSSGGTLNIEDEHRLHETSKEPDVSLGSTWLSDFPQAWAETGGMGLAVRQAPLIIPLKATSTPVSIKQYPMSQEARLGIKPHIQRLLDQGILVPCQSPWNTPLLPVKKPGTNDYRPVQDLREVNKRVEDIHPTVPNPYNLLSGLPPSHQWYTVLDLKDAFFCLRLHPTSQPLFAFEWRDPEMGISGQLTWTRLPQGFKNSPTLFNEALHRDLADFRIQHPDLILLQYVDDLLLAATSELDCQQGTRALLQTLGNLGYRASAKKAQICQKQVKYLGYLLKEGQRWLTEARKETVMGQPTPKTPRQLREFLGTAGFCRLWIPGFAEMAAPLYPLTKPGTLFNWGPDQQKAYQEIKQALLTAPALGLPDLTKPFELFVDEKQGYAKGVLTQKLGPWRRPVAYLSKKLDPVAAGWPPCLRMVAAIAVLTKDAGKLTMGQPLVILAPHAVEALVKQPPDRWLSNARMTHYQALLLDTDRVQFGPVVALNPATLLPLPEEGLQHNCLDILAEAHGTRPDLTDQPLPDADHTWYTDGSSLLQEGQRKAGAAVTTETEVIWAKALPAGTSAQRAELIALTQALKMAEGKKLNVYTDSRYAFATAHIHGEIYRRRGWLTSEGKEIKNKDEILALLKALFLPKRLSIIHCPGHQKGHSAEARGNRMADQAARKAAITETPDTSTLLAGKRTADGSEFEKRTADGSEFESPKKKAKVE

SEQ ID NO: 2728 - protein, 2097 aa, synthetic construct
MPAAKRVKLDGGDKKYSIGLDIGTNSVGWAVITDEYKVPSKKFKVLGNTDRHSIKKNLIGALLFDSGETAEATRLKRTARRRYTRRKNRICYLQEIFSNEMAKVDDSFFHRLEESFLVEEDKKHERHPIFGNIVDEVAYHEKYPTIYHLRKKLVDSTDKADLRLIYLALAHMIKFRGHFLIEGDLNPDNSDVDKLFIQLVQTYNQLFEENPINASGVDAKAILSARLSKSRRLENLIAQLPGEKKNGLFGNLIALSLGLTPNFKSNFDLAEDAKLQLSKDTYDDDLDNLLAQIGDQYADLFLAAKNLSDAILLSDILRVNTEITKAPLSASMIKRYDEHHQDLTLLKALVRQQLPEKYKEIFFDQSKNGYAGYIDGGASQEEFYKFIKPILEKMDGTEELLVKLNREDLLRKQRTFDNGSIPHQIHLGELHAILRRQEDFYPFLKDNREKIEKILTFRIPYYVGPLARGNSRFAWMTRKSEETITPWNFEEVVDKGASAQSFIERMTNFDKNLPNEKVLPKHSLLYEYFTVYNELTKVKYVTEGMRKPAFLSGEQKKAIVDLLFKTNRKVTVKQLKEDYFKKIECFDSVEISGVEDRFNASLGTYHDLLKIIKDKDFLDNEENEDILEDIVLTLTLFEDREMIEERLKTYAHLFDDKVMKQLKRRRYTGWGRLSRKLINGIRDKQSGKTILDFLKSDGFANRNFMQLIHDDSLTFKEDIQKAQVSGQGDSLHEHIANLAGSPAIKKGILQTVKVVDELVKVMGRHKPENIVIEMARENQTTQKGQKNSRERMKRIEEGIKELGSQILKEHPVENTQLQNEKLYLYYLQNGRDMYVDQELDINRLSDYDVDHIVPQSFLKDDSIDNKVLTRSDKARGKSDNVPSEEVVKKMKNYWRQLLNAKLITQRKFDNLTKAERGGLSELDKAGFIKRQLVETRQITKHVAQILDSRMNTKYDENDKLIREVKVITLKSKLVSDFRKDFQFYKVREINNYHHAHDAYLNAVVGTALIKKYPKLESEFVYGDYKVYDVRKMIAKSEQEIGKATAKYFFYSNIMNFFKTEITLANGEIRKRPLIETNGETGEIVWDKGRDFATVRKVLSMPQVNIVKKTEVQTGGFSKESILPKRNSDKLIARKKDWDPKKYGGFDSPTVAYSVLVVAKVEKGKSKKLKSVKELLGITIMERSSFEKNPIDFLEAKGYKEVKKDLIIKLPKYSLFELENGRKRMLASAGELQKGNELALPSKYVNFLYLASHYEKLKGSPEDNEQKQLFVEQHKHYLDEIIEQISEFSKRVILADANLDKVLSAYNKHRDKPIREQAENIIHLFTLTNLGAPAAFKYFDTTIDRKRYTSTKEVLDATLIHQSITGLYETRIDLSQLGGDGGGSSGSSGSSGSSGGTLNIEDEHRLHETSKEPDVSLGSTWLSDFPQAWAETGGMGLAVRQAPLIIPLKATSTPVSIKQYPMSQEARLGIKPHIQRLLDQGILVPCQSPWNTPLLPVKKPGTNDYRPVQDLREVNKRVEDIHPTVPNPYNLLSGLPPSHQWYTVLDLKDAFFCLRLHPTSQPLFAFEWRDPEMGISGQLTWTRLPQGFKNSPTLFNEALHRDLADFRIQHPDLILLQYVDDLLLAATSELDCQQGTRALLQTLGNLGYRASAKKAQICQKQVKYLGYLLKEGQRWLTEARKETVMGQPTPKTPRQLREFLGTAGFCRLWIPGFAEMAAPLYPLTKPGTLFNWGPDQQKAYQEIKQALLTAPALGLPDLTKPFELFVDEKQGYAKGVLTQKLGPWRRPVAYLSKKLDPVAAGWPPCLRMVAAIAVLTKDAGKLTMGQPLVILAPHAVEALVKQPPDRWLSNARMTHYQALLLDTDRVQFGPVVALNPATLLPLPEEGLQHNCLDILAEAHGTRPDLTDQPLPDADHTWYTDGSSLLQEGQRKAGAAVTTETEVIWAKALPAGTSAQRAELIALTQALKMAEGKKLNVYTDSRYAFATAHIHGEIYRRRGWLTSEGKEIKNKDEILALLKALFLPKRLSIIHCPGHQKGHSAEARGNRMADQAARKAAITETPDTSTLLAGKRTADGSEFEKRTADGSEFESPKKKAKVE

SEQ ID NO: 2729 - protein, 2095 aa, synthetic construct
MPAAKRVKLDGGDKKYSIGLDIGTNSVGWAVITDEYKVPSKKFKVLGNTDRHSIKKNLIGALLFDSGETAEATRLKRTARRRYTRRKNRICYLQEIFSNEMAKVDDSFFHRLEESFLVEEDKKHERHPIFGNIVDEVAYHEKYPTIYHLRKKLVDSTDKADLRLIYLALAHMIKFRGHFLIEGDLNPDNSDVDKLFIQLVQTYNQLFEENPINASGVDAKAILSARLSKSRRLENLIAQLPGEKKNGLFGNLIALSLGLTPNFKSNFDLAEDAKLQLSKDTYDDDLDNLLAQIGDQYADLFLAAKNLSDAILLSDILRVNTEITKAPLSASMIKRYDEHHQDLTLLKALVRQQLPEKYKEIFFDQSKNGYAGYIDGGASQEEFYKFIKPILEKMDGTEELLVKLNREDLLRKQRTFDNGSIPHQIHLGELHAILRRQEDFYPFLKDNREKIEKILTFRIPYYVGPLARGNSRFAWMTRKSEETITPWNFEEVVDKGASAQSFIERMTNFDKNLPNEKVLPKHSLLYEYFTVYNELTKVKYVTEGMRKPAFLSGEQKKAIVDLLFKTNRKVTVKQLKEDYFKKIECFDSVEISGVEDRFNASLGTYHDLLKIIKDKDFLDNEENEDILEDIVLTLTLFEDREMIEERLKTYAHLFDDKVMKQLKRRRYTGWGRLSRKLINGIRDKQSGKTILDFLKSDGFANRNFMQLIHDDSLTFKEDIQKAQVSGQGDSLHEHIANLAGSPAIKKGILQTVKVVDELVKVMGRHKPENIVIEMARENQTTQKGQKNSRERMKRIEEGIKELGSQILKEHPVENTQLQNEKLYLYYLQNGRDMYVDQELDINRLSDYDVDHIVPQSFLKDDSIDNKVLTRSDKARGKSDNVPSEEVVKKMKNYWRQLLNAKLITQRKFDNLTKAERGGLSELDKAGFIKRQLVETRQITKHVAQILDSRMNTKYDENDKLIREVKVITLKSKLVSDFRKDFQFYKVREINNYHHAHDAYLNAVVGTALIKKYPKLESEFVYGDYKVYDVRKMIAKSEQEIGKATAKYFFYSNIMNFFKTEITLANGEIRKRPLIETNGETGEIVWDKGRDFATVRKVLSMPQVNIVKKTEVQTGGFSKESILPKRNSDKLIARKKDWDPKKYGGFDSPTVAYSVLVVAKVEKGKSKKLKSVKELLGITIMERSSFEKNPIDFLEAKGYKEVKKDLIIKLPKYSLFELENGRKRMLASAGELQKGNELALPSKYVNFLYLASHYEKLKGSPEDNEQKQLFVEQHKHYLDEIIEQISEFSKRVILADANLDKVLSAYNKHRDKPIREQAENIIHLFTLTNLGAPAAFKYFDTTIDRKRYTSTKEVLDATLIHQSITGLYETRIDLSQLGGDGGEAAAKEAAAKGGTLNIEDEHRLHETSKEPDVSLGSTWLSDFPQAWAETGGMGLAVRQAPLIIPLKATSTPVSIKQYPMSQEARLGIKPHIQRLLDQGILVPCQSPWNTPLLPVKKPGTNDYRPVQDLREVNKRVEDIHPTVPNPYNLLSGLPPSHQWYTVLDLKDAFFCLRLHPTSQPLFAFEWRDPEMGISGQLTWTRLPQGFKNSPTLFNEALHRDLADFRIQHPDLILLQYVDDLLLAATSELDCQQGTRALLQTLGNLGYRASAKKAQICQKQVKYLGYLLKEGQRWLTEARKETVMGQPTPKTPRQLREFLGTAGFCRLWIPGFAEMAAPLYPLTKPGTLFNWGPDQQKAYQEIKQALLTAPALGLPDLTKPFELFVDEKQGYAKGVLTQKLGPWRRPVAYLSKKLDPVAAGWPPCLRMVAAIAVLTKDAGKLTMGQPLVILAPHAVEALVKQPPDRWLSNARMTHYQALLLDTDRVQFGPVVALNPATLLPLPEEGLQHNCLDILAEAHGTRPDLTDQPLPDADHTWYTDGSSLLQEGQRKAGAAVTTETEVIWAKALPAGTSAQRAELIALTQALKMAEGKKLNVYTDSRYAFATAHIHGEIYRRRGWLTSEGKEIKNKDEILALLKALFLPKRLSIIHCPGHQKGHSAEARGNRMADQAARKAAITETPDTSTLLAGKRTADGSEFEKRTADGSEFESPKKKAKVE

SEQ ID NO: 2730 - protein, 2090 aa, synthetic construct
MPAAKRVKLDGGDKKYSIGLDIGTNSVGWAVITDEYKVPSKKFKVLGNTDRHSIKKNLIGALLFDSGETAEATRLKRTARRRYTRRKNRICYLQEIFSNEMAKVDDSFFHRLEESFLVEEDKKHERHPIFGNIVDEVAYHEKYPTIYHLRKKLVDSTDKADLRLIYLALAHMIKFRGHFLIEGDLNPDNSDVDKLFIQLVQTYNQLFEENPINASGVDAKAILSARLSKSRRLENLIAQLPGEKKNGLFGNLIALSLGLTPNFKSNFDLAEDAKLQLSKDTYDDDLDNLLAQIGDQYADLFLAAKNLSDAILLSDILRVNTEITKAPLSASMIKRYDEHHQDLTLLKALVRQQLPEKYKEIFFDQSKNGYAGYIDGGASQEEFYKFIKPILEKMDGTEELLVKLNREDLLRKQRTFDNGSIPHQIHLGELHAILRRQEDFYPFLKDNREKIEKILTFRIPYYVGPLARGNSRFAWMTRKSEETITPWNFEEVVDKGASAQSFIERMTNFDKNLPNEKVLPKHSLLYEYFTVYNELTKVKYVTEGMRKPAFLSGEQKKAIVDLLFKTNRKVTVKQLKEDYFKKIECFDSVEISGVEDRFNASLGTYHDLLKIIKDKDFLDNEENEDILEDIVLTLTLFEDREMIEERLKTYAHLFDDKVMKQLKRRRYTGWGRLSRKLINGIRDKQSGKTILDFLKSDGFANRNFMQLIHDDSLTFKEDIQKAQVSGQGDSLHEHIANLAGSPAIKKGILQTVKVVDELVKVMGRHKPENIVIEMARENQTTQKGQKNSRERMKRIEEGIKELGSQILKEHPVENTQLQNEKLYLYYLQNGRDMYVDQELDINRLSDYDVDHIVPQSFLKDDSIDNKVLTRSDKARGKSDNVPSEEVVKKMKNYWRQLLNAKLITQRKFDNLTKAERGGLSELDKAGFIKRQLVETRQITKHVAQILDSRMNTKYDENDKLIREVKVITLKSKLVSDFRKDFQFYKVREINNYHHAHDAYLNAVVGTALIKKYPKLESEFVYGDYKVYDVRKMIAKSEQEIGKATAKYFFYSNIMNFFKTEITLANGEIRKRPLIETNGETGEIVWDKGRDFATVRKVLSMPQVNIVKKTEVQTGGFSKESILPKRNSDKLIARKKDWDPKKYGGFDSPTVAYSVLVVAKVEKGKSKKLKSVKELLGITIMERSSFEKNPIDFLEAKGYKEVKKDLIIKLPKYSLFELENGRKRMLASAGELQKGNELALPSKYVNFLYLASHYEKLKGSPEDNEQKQLFVEQHKHYLDEIIEQISEFSKRVILADANLDKVLSAYNKHRDKPIREQAENIIHLFTLTNLGAPAAFKYFDTTIDRKRYTSTKEVLDATLIHQSITGLYETRIDLSQLGGDGGEAAAKGGTLNIEDEHRLHETSKEPDVSLGSTWLSDFPQAWAETGGMGLAVRQAPLIIPLKATSTPVSIKQYPMSQEARLGIKPHIQRLLDQGILVPCQSPWNTPLLPVKKPGTNDYRPVQDLREVNKRVEDIHPTVPNPYNLLSGLPPSHQWYTVLDLKDAFFCLRLHPTSQPLFAFEWRDPEMGISGQLTWTRLPQGFKNSPTLFNEALHRDLADFRIQHPDLILLQYVDDLLLAATSELDCQQGTRALLQTLGNLGYRASAKKAQICQKQVKYLGYLLKEGQRWLTEARKETVMGQPTPKTPRQLREFLGTAGFCRLWIPGFAEMAAPLYPLTKPGTLFNWGPDQQKAYQEIKQALLTAPALGLPDLTKPFELFVDEKQGYAKGVLTQKLGPWRRPVAYLSKKLDPVAAGWPPCLRMVAAIAVLTKDAGKLTMGQPLVILAPHAVEALVKQPPDRWLSNARMTHYQALLLDTDRVQFGPVVALNPATLLPLPEEGLQHNCLDILAEAHGTRPDLTDQPLPDADHTWYTDGSSLLQEGQRKAGAAVTTETEVIWAKALPAGTSAQRAELIALTQALKMAEGKKLNVYTDSRYAFATAHIHGEIYRRRGWLTSEGKEIKNKDEILALLKALFLPKRLSIIHCPGHQKGHSAEARGNRMADQAARKAAITETPDTSTLLAGKRTADGSEFEKRTADGSEFESPKKKAKVE

SEQ ID NO: 2731 - protein, 2094 aa, synthetic construct
MPAAKRVKLDGGDKKYSIGLDIGTNSVGWAVITDEYKVPSKKFKVLGNTDRHSIKKNLIGALLFDSGETAEATRLKRTARRRYTRRKNRICYLQEIFSNEMAKVDDSFFHRLEESFLVEEDKKHERHPIFGNIVDEVAYHEKYPTIYHLRKKLVDSTDKADLRLIYLALAHMIKFRGHFLIEGDLNPDNSDVDKLFIQLVQTYNQLFEENPINASGVDAKAILSARLSKSRRLENLIAQLPGEKKNGLFGNLIALSLGLTPNFKSNFDLAEDAKLQLSKDTYDDDLDNLLAQIGDQYADLFLAAKNLSDAILLSDILRVNTEITKAPLSASMIKRYDEHHQDLTLLKALVRQQLPEKYKEIFFDQSKNGYAGYIDGGASQEEFYKFIKPILEKMDGTEELLVKLNREDLLRKQRTFDNGSIPHQIHLGELHAILRRQEDFYPFLKDNREKIEKILTFRIPYYVGPLARGNSRFAWMTRKSEETITPWNFEEVVDKGASAQSFIERMTNFDKNLPNEKVLPKHSLLYEYFTVYNELTKVKYVTEGMRKPAFLSGEQKKAIVDLLFKTNRKVTVKQLKEDYFKKIECFDSVEISGVEDRFNASLGTYHDLLKIIKDKDFLDNEENEDILEDIVLTLTLFEDREMIEERLKTYAHLFDDKVMKQLKRRRYTGWGRLSRKLINGIRDKQSGKTILDFLKSDGFANRNFMQLIHDDSLTFKEDIQKAQVSGQGDSLHEHIANLAGSPAIKKGILQTVKVVDELVKVMGRHKPENIVIEMARENQTTQKGQKNSRERMKRIEEGIKELGSQILKEHPVENTQLQNEKLYLYYLQNGRDMYVDQELDINRLSDYDVDHIVPQSFLKDDSIDNKVLTRSDKARGKSDNVPSEEVVKKMKNYWRQLLNAKLITQRKFDNLTKAERGGLSELDKAGFIKRQLVETRQITKHVAQILDSRMNTKYDENDKLIREVKVITLKSKLVSDFRKDFQFYKVREINNYHHAHDAYLNAVVGTALIKKYPKLESEFVYGDYKVYDVRKMIAKSEQEIGKATAKYFFYSNIMNFFKTEITLANGEIRKRPLIETNGETGEIVWDKGRDFATVRKVLSMPQVNIVKKTEVQTGGFSKESILPKRNSDKLIARKKDWDPKKYGGFDSPTVAYSVLVVAKVEKGKSKKLKSVKELLGITIMERSSFEKNPIDFLEAKGYKEVKKDLIIKLPKYSLFELENGRKRMLASAGELQKGNELALPSKYVNFLYLASHYEKLKGSPEDNEQKQLFVEQHKHYLDEIIEQISEFSKRVILADANLDKVLSAYNKHRDKPIREQAENIIHLFTLTNLGAPAAFKYFDTTIDRKRYTSTKEVLDATLIHQSITGLYETRIDLSQLGGDGGPAPAPAPAPGGTLNIEDEHRLHETSKEPDVSLGSTWLSDFPQAWAETGGMGLAVRQAPLIIPLKATSTPVSIKQYPMSQEARLGIKPHIQRLLDQGILVPCQSPWNTPLLPVKKPGTNDYRPVQDLREVNKRVEDIHPTVPNPYNLLSGLPPSHQWYTVLDLKDAFFCLRLHPTSQPLFAFEWRDPEMGISGQLTWTRLPQGFKNSPTLFNEALHRDLADFRIQHPDLILLQYVDDLLLAATSELDCQQGTRALLQTLGNLGYRASAKKAQICQKQVKYLGYLLKEGQRWLTEARKETVMGQPTPKTPRQLREFLGTAGFCRLWIPGFAEMAAPLYPLTKPGTLFNWGPDQQKAYQEIKQALLTAPALGLPDLTKPFELFVDEKQGYAKGVLTQKLGPWRRPVAYLSKKLDPVAAGWPPCLRMVAAIAVLTKDAGKLTMGQPLVILAPHAVEALVKQPPDRWLSNARMTHYQALLLDTDRVQFGPVVALNPATLLPLPEEGLQHNCLDILAEAHGTRPDLTDQPLPDADHTWYTDGSSLLQEGQRKAGAAVTTETEVIWAKALPAGTSAQRAELIALTQALKMAEGKKLNVYTDSRYAFATAHIHGEIYRRRGWLTSEGKEIKNKDEILALLKALFLPKRLSIIHCPGHQKGHSAEARGNRMADQAARKAAITETPDTSTLLAGKRTADGSEFEKRTADGSEFESPKKKAKVE

SEQ ID NO: 2732 - protein, 2096 aa, synthetic construct
MPAAKRVKLDGGDKKYSIGLDIGTNSVGWAVITDEYKVPSKKFKVLGNTDRHSIKKNLIGALLFDSGETAEATRLKRTARRRYTRRKNRICYLQEIFSNEMAKVDDSFFHRLEESFLVEEDKKHERHPIFGNIVDEVAYHEKYPTIYHLRKKLVDSTDKADLRLIYLALAHMIKFRGHFLIEGDLNPDNSDVDKLFIQLVQTYNQLFEENPINASGVDAKAILSARLSKSRRLENLIAQLPGEKKNGLFGNLIALSLGLTPNFKSNFDLAEDAKLQLSKDTYDDDLDNLLAQIGDQYADLFLAAKNLSDAILLSDILRVNTEITKAPLSASMIKRYDEHHQDLTLLKALVRQQLPEKYKEIFFDQSKNGYAGYIDGGASQEEFYKFIKPILEKMDGTEELLVKLNREDLLRKQRTFDNGSIPHQIHLGELHAILRRQEDFYPFLKDNREKIEKILTFRIPYYVGPLARGNSRFAWMTRKSEETITPWNFEEVVDKGASAQSFIERMTNFDKNLPNEKVLPKHSLLYEYFTVYNELTKVKYVTEGMRKPAFLSGEQKKAIVDLLFKTNRKVTVKQLKEDYFKKIECFDSVEISGVEDRFNASLGTYHDLLKIIKDKDFLDNEENEDILEDIVLTLTLFEDREMIEERLKTYAHLFDDKVMKQLKRRRYTGWGRLSRKLINGIRDKQSGKTILDFLKSDGFANRNFMQLIHDDSLTFKEDIQKAQVSGQGDSLHEHIANLAGSPAIKKGILQTVKVVDELVKVMGRHKPENIVIEMARENQTTQKGQKNSRERMKRIEEGIKELGSQILKEHPVENTQLQNEKLYLYYLQNGRDMYVDQELDINRLSDYDVDHIVPQSFLKDDSIDNKVLTRSDKARGKSDNVPSEEVVKKMKNYWRQLLNAKLITQRKFDNLTKAERGGLSELDKAGFIKRQLVETRQITKHVAQILDSRMNTKYDENDKLIREVKVITLKSKLVSDFRKDFQFYKVREINNYHHAHDAYLNAVVGTALIKKYPKLESEFVYGDYKVYDVRKMIAKSEQEIGKATAKYFFYSNIMNFFKTEITLANGEIRKRPLIETNGETGEIVWDKGRDFATVRKVLSMPQVNIVKKTEVQTGGFSKESILPKRNSDKLIARKKDWDPKKYGGFDSPTVAYSVLVVAKVEKGKSKKLKSVKELLGITIMERSSFEKNPIDFLEAKGYKEVKKDLIIKLPKYSLFELENGRKRMLASAGELQKGNELALPSKYVNFLYLASHYEKLKGSPEDNEQKQLFVEQHKHYLDEIIEQISEFSKRVILADANLDKVLSAYNKHRDKPIREQAENIIHLFTLTNLGAPAAFKYFDTTIDRKRYTSTKEVLDATLIHQSITGLYETRIDLSQLGGDGGGSSEAAAKGGGGGTLNIEDEHRLHETSKEPDVSLGSTWLSDFPQAWAETGGMGLAVRQAPLIIPLKATSTPVSIKQYPMSQEARLGIKPHIQRLLDQGILVPCQSPWNTPLLPVKKPGTNDYRPVQDLREVNKRVEDIHPTVPNPYNLLSGLPPSHQWYTVLDLKDAFFCLRLHPTSQPLFAFEWRDPEMGISGQLTWTRLPQGFKNSPTLFNEALHRDLADFRIQHPDLILLQYVDDLLLAATSELDCQQGTRALLQTLGNLGYRASAKKAQICQKQVKYLGYLLKEGQRWLTEARKETVMGQPTPKTPRQLREFLGTAGFCRLWIPGFAEMAAPLYPLTKPGTLFNWGPDQQKAYQEIKQALLTAPALGLPDLTKPFELFVDEKQGYAKGVLTQKLGPWRRPVAYLSKKLDPVAAGWPPCLRMVAAIAVLTKDAGKLTMGQPLVILAPHAVEALVKQPPDRWLSNARMTHYQALLLDTDRVQFGPVVALNPATLLPLPEEGLQHNCLDILAEAHGTRPDLTDQPLPDADHTWYTDGSSLLQEGQRKAGAAVTTETEVIWAKALPAGTSAQRAELIALTQALKMAEGKKLNVYTDSRYAFATAHIHGEIYRRRGWLTSEGKEIKNKDEILALLKALFLPKRLSIIHCPGHQKGHSAEARGNRMADQAARKAAITETPDTSTLLAGKRTADGSEFEKRTADGSEFESPKKKAKVE

SEQ ID NO: 2733 - protein, 2091 aa, synthetic construct
MPAAKRVKLDGGDKKYSIGLDIGTNSVGWAVITDEYKVPSKKFKVLGNTDRHSIKKNLIGALLFDSGETAEATRLKRTARRRYTRRKNRICYLQEIFSNEMAKVDDSFFHRLEESFLVEEDKKHERHPIFGNIVDEVAYHEKYPTIYHLRKKLVDSTDKADLRLIYLALAHMIKFRGHFLIEGDLNPDNSDVDKLFIQLVQTYNQLFEENPINASGVDAKAILSARLSKSRRLENLIAQLPGEKKNGLFGNLIALSLGLTPNFKSNFDLAEDAKLQLSKDTYDDDLDNLLAQIGDQYADLFLAAKNLSDAILLSDILRVNTEITKAPLSASMIKRYDEHHQDLTLLKALVRQQLPEKYKEIFFDQSKNGYAGYIDGGASQEEFYKFIKPILEKMDGTEELLVKLNREDLLRKQRTFDNGSIPHQIHLGELHAILRRQEDFYPFLKDNREKIEKILTFRIPYYVGPLARGNSRFAWMTRKSEETITPWNFEEVVDKGASAQSFIERMTNFDKNLPNEKVLPKHSLLYEYFTVYNELTKVKYVTEGMRKPAFLSGEQKKAIVDLLFKTNRKVTVKQLKEDYFKKIECFDSVEISGVEDRFNASLGTYHDLLKIIKDKDFLDNEENEDILEDIVLTLTLFEDREMIEERLKTYAHLFDDKVMKQLKRRRYTGWGRLSRKLINGIRDKQSGKTILDFLKSDGFANRNFMQLIHDDSLTFKEDIQKAQVSGQGDSLHEHIANLAGSPAIKKGILQTVKVVDELVKVMGRHKPENIVIEMARENQTTQKGQKNSRERMKRIEEGIKELGSQILKEHPVENTQLQNEKLYLYYLQNGRDMYVDQELDINRLSDYDVDHIVPQSFLKDDSIDNKVLTRSDKARGKSDNVPSEEVVKKMKNYWRQLLNAKLITQRKFDNLTKAERGGLSELDKAGFIKRQLVETRQITKHVAQILDSRMNTKYDENDKLIREVKVITLKSKLVSDFRKDFQFYKVREINNYHHAHDAYLNAVVGTALIKKYPKLESEFVYGDYKVYDVRKMIAKSEQEIGKATAKYFFYSNIMNFFKTEITLANGEIRKRPLIETNGETGEIVWDKGRDFATVRKVLSMPQVNIVKKTEVQTGGFSKESILPKRNSDKLIARKKDWDPKKYGGFDSPTVAYSVLVVAKVEKGKSKKLKSVKELLGITIMERSSFEKNPIDFLEAKGYKEVKKDLIIKLPKYSLFELENGRKRMLASAGELQKGNELALPSKYVNFLYLASHYEKLKGSPEDNEQKQLFVEQHKHYLDEIIEQISEFSKRVILADANLDKVLSAYNKHRDKPIREQAENIIHLFTLTNLGAPAAFKYFDTTIDRKRYTSTKEVLDATLIHQSITGLYETRIDLSQLGGDGGPAPGGSGGTLNIEDEHRLHETSKEPDVSLGSTWLSDFPQAWAETGGMGLAVRQAPLIIPLKATSTPVSIKQYPMSQEARLGIKPHIQRLLDQGILVPCQSPWNTPLLPVKKPGTNDYRPVQDLREVNKRVEDIHPTVPNPYNLLSGLPPSHQWYTVLDLKDAFFCLRLHPTSQPLFAFEWRDPEMGISGQLTWTRLPQGFKNSPTLFNEALHRDLADFRIQHPDLILLQYVDDLLLAATSELDCQQGTRALLQTLGNLGYRASAKKAQICQKQVKYLGYLLKEGQRWLTEARKETVMGQPTPKTPRQLREFLGTAGFCRLWIPGFAEMAAPLYPLTKPGTLFNWGPDQQKAYQEIKQALLTAPALGLPDLTKPFELFVDEKQGYAKGVLTQKLGPWRRPVAYLSKKLDPVAAGWPPCLRMVAAIAVLTKDAGKLTMGQPLVILAPHAVEALVKQPPDRWLSNARMTHYQALLLDTDRVQFGPVVALNPATLLPLPEEGLQHNCLDILAEAHGTRPDLTDQPLPDADHTWYTDGSSLLQEGQRKAGAAVTTETEVIWAKALPAGTSAQRAELIALTQALKMAEGKKLNVYTDSRYAFATAHIHGEIYRRRGWLTSEGKEIKNKDEILALLKALFLPKRLSIIHCPGHQKGHSAEARGNRMADQAARKAAITETPDTSTLLAGKRTADGSEFEKRTADGSEFESPKKKAKVE

SEQ ID NO: 2734 - protein, 2118 aa, synthetic construct
MPAAKRVKLDGGDKKYSIGLDIGTNSVGWAVITDEYKVPSKKFKVLGNTDRHSIKKNLIGALLFDSGETAEATRLKRTARRRYTRRKNRICYLQEIFSNEMAKVDDSFFHRLEESFLVEEDKKHERHPIFGNIVDEVAYHEKYPTIYHLRKKLVDSTDKADLRLIYLALAHMIKFRGHFLIEGDLNPDNSDVDKLFIQLVQTYNQLFEENPINASGVDAKAILSARLSKSRRLENLIAQLPGEKKNGLFGNLIALSLGLTPNFKSNFDLAEDAKLQLSKDTYDDDLDNLLAQIGDQYADLFLAAKNLSDAILLSDILRVNTEITKAPLSASMIKRYDEHHQDLTLLKALVRQQLPEKYKEIFFDQSKNGYAGYIDGGASQEEFYKFIKPILEKMDGTEELLVKLNREDLLRKQRTFDNGSIPHQIHLGELHAILRRQEDFYPFLKDNREKIEKILTFRIPYYVGPLARGNSRFAWMTRKSEETITPWNFEEVVDKGASAQSFIERMTNFDKNLPNEKVLPKHSLLYEYFTVYNELTKVKYVTEGMRKPAFLSGEQKKAIVDLLFKTNRKVTVKQLKEDYFKKIECFDSVEISGVEDRFNASLGTYHDLLKIIKDKDFLDNEENEDILEDIVLTLTLFEDREMIEERLKTYAHLFDDKVMKQLKRRRYTGWGRLSRKLINGIRDKQSGKTILDFLKSDGFANRNFMQLIHDDSLTFKEDIQKAQVSGQGDSLHEHIANLAGSPAIKKGILQTVKVVDELVKVMGRHKPENIVIEMARENQTTQKGQKNSRERMKRIEEGIKELGSQILKEHPVENTQLQNEKLYLYYLQNGRDMYVDQELDINRLSDYDVDHIVPQSFLKDDSIDNKVLTRSDKARGKSDNVPSEEVVKKMKNYWRQLLNAKLITQRKFDNLTKAERGGLSELDKAGFIKRQLVETRQITKHVAQILDSRMNTKYDENDKLIREVKVITLKSKLVSDFRKDFQFYKVREINNYHHAHDAYLNAVVGTALIKKYPKLESEFVYGDYKVYDVRKMIAKSEQEIGKATAKYFFYSNIMNFFKTEITLANGEIRKRPLIETNGETGEIVWDKGRDFATVRKVLSMPQVNIVKKTEVQTGGFSKESILPKRNSDKLIARKKDWDPKKYGGFDSPTVAYSVLVVAKVEKGKSKKLKSVKELLGITIMERSSFEKNPIDFLEAKGYKEVKKDLIIKLPKYSLFELENGRKRMLASAGELQKGNELALPSKYVNFLYLASHYEKLKGSPEDNEQKQLFVEQHKHYLDEIIEQISEFSKRVILADANLDKVLSAYNKHRDKPIREQAENIIHLFTLTNLGAPAAFKYFDTTIDRKRYTSTKEVLDATLIHQSITGLYETRIDLSQLGGDGGSGGSSGGSSGSETPGTSESATPESSGGSSGGSSGGTLNIEDEHRLHETSKEPDVSLGSTWLSDFPQAWAETGGMGLAVRQAPLIIPLKATSTPVSIKQYPMSQEARLGIKPHIQRLLDQGILVPCQSPWNTPLLPVKKPGTNDYRPVQDLREVNKRVEDIHPTVPNPYNLLSGLPPSHQWYTVLDLKDAFFCLRLHPTSQPLFAFEWRDPEMGISGQLTWTRLPQGFKNSPTLFNEALHRDLADFRIQHPDLILLQYVDDLLLAATSELDCQQGTRALLQTLGNLGYRASAKKAQICQKQVKYLGYLLKEGQRWLTEARKETVMGQPTPKTPRQLREFLGTAGFCRLWIPGFAEMAAPLYPLTKPGTLFNWGPDQQKAYQEIKQALLTAPALGLPDLTKPFELFVDEKQGYAKGVLTQKLGPWRRPVAYLSKKLDPVAAGWPPCLRMVAAIAVLTKDAGKLTMGQPLVILAPHAVEALVKQPPDRWLSNARMTHYQALLLDTDRVQFGPVVALNPATLLPLPEEGLQHNCLDILAEAHGTRPDLTDQPLPDADHTWYTDGSSLLQEGQRKAGAAVTTETEVIWAKALPAGTSAQRAELIALTQALKMAEGKKLNVYTDSRYAFATAHIHGEIYRRRGWLTSEGKEIKNKDEILALLKALFLPKRLSIIHCPGHQKGHSAEARGNRMADQAARKAAITETPDTSTLLAGKRTADGSEFEKRTADGSEFESPKKKAKVE

SEQ ID NO: 2735 - protein, 2091 aa, synthetic construct
MPAAKRVKLDGGDKKYSIGLDIGTNSVGWAVITDEYKVPSKKFKVLGNTDRHSIKKNLIGALLFDSGETAEATRLKRTARRRYTRRKNRICYLQEIFSNEMAKVDDSFFHRLEESFLVEEDKKHERHPIFGNIVDEVAYHEKYPTIYHLRKKLVDSTDKADLRLIYLALAHMIKFRGHFLIEGDLNPDNSDVDKLFIQLVQTYNQLFEENPINASGVDAKAILSARLSKSRRLENLIAQLPGEKKNGLFGNLIALSLGLTPNFKSNFDLAEDAKLQLSKDTYDDDLDNLLAQIGDQYADLFLAAKNLSDAILLSDILRVNTEITKAPLSASMIKRYDEHHQDLTLLKALVRQQLPEKYKEIFFDQSKNGYAGYIDGGASQEEFYKFIKPILEKMDGTEELLVKLNREDLLRKQRTFDNGSIPHQIHLGELHAILRRQEDFYPFLKDNREKIEKILTFRIPYYVGPLARGNSRFAWMTRKSEETITPWNFEEVVDKGASAQSFIERMTNFDKNLPNEKVLPKHSLLYEYFTVYNELTKVKYVTEGMRKPAFLSGEQKKAIVDLLFKTNRKVTVKQLKEDYFKKIECFDSVEISGVEDRFNASLGTYHDLLKIIKDKDFLDNEENEDILEDIVLTLTLFEDREMIEERLKTYAHLFDDKVMKQLKRRRYTGWGRLSRKLINGIRDKQSGKTILDFLKSDGFANRNFMQLIHDDSLTFKEDIQKAQVSGQGDSLHEHIANLAGSPAIKKGILQTVKVVDELVKVMGRHKPENIVIEMARENQTTQKGQKNSRERMKRIEEGIKELGSQILKEHPVENTQLQNEKLYLYYLQNGRDMYVDQELDINRLSDYDVDHIVPQSFLKDDSIDNKVLTRSDKARGKSDNVPSEEVVKKMKNYWRQLLNAKLITQRKFDNLTKAERGGLSELDKAGFIKRQLVETRQITKHVAQILDSRMNTKYDENDKLIREVKVITLKSKLVSDFRKDFQFYKVREINNYHHAHDAYLNAVVGTALIKKYPKLESEFVYGDYKVYDVRKMIAKSEQEIGKATAKYFFYSNIMNFFKTEITLANGEIRKRPLIETNGETGEIVWDKGRDFATVRKVLSMPQVNIVKKTEVQTGGFSKESILPKRNSDKLIARKKDWDPKKYGGFDSPTVAYSVLVVAKVEKGKSKKLKSVKELLGITIMERSSFEKNPIDFLEAKGYKEVKKDLIIKLPKYSLFELENGRKRMLASAGELQKGNELALPSKYVNFLYLASHYEKLKGSPEDNEQKQLFVEQHKHYLDEIIEQISEFSKRVILADANLDKVLSAYNKHRDKPIREQAENIIHLFTLTNLGAPAAFKYFDTTIDRKRYTSTKEVLDATLIHQSITGLYETRIDLSQLGGDGGGGSPAPGGTLNIEDEHRLHETSKEPDVSLGSTWLSDFPQAWAETGGMGLAVRQAPLIIPLKATSTPVSIKQYPMSQEARLGIKPHIQRLLDQGILVPCQSPWNTPLLPVKKPGTNDYRPVQDLREVNKRVEDIHPTVPNPYNLLSGLPPSHQWYTVLDLKDAFFCLRLHPTSQPLFAFEWRDPEMGISGQLTWTRLPQGFKNSPTLFNEALHRDLADFRIQHPDLILLQYVDDLLLAATSELDCQQGTRALLQTLGNLGYRASAKKAQICQKQVKYLGYLLKEGQRWLTEARKETVMGQPTPKTPRQLREFLGTAGFCRLWIPGFAEMAAPLYPLTKPGTLFNWGPDQQKAYQEIKQALLTAPALGLPDLTKPFELFVDEKQGYAKGVLTQKLGPWRRPVAYLSKKLDPVAAGWPPCLRMVAAIAVLTKDAGKLTMGQPLVILAPHAVEALVKQPPDRWLSNARMTHYQALLLDTDRVQFGPVVALNPATLLPLPEEGLQHNCLDILAEAHGTRPDLTDQPLPDADHTWYTDGSSLLQEGQRKAGAAVTTETEVIWAKALPAGTSAQRAELIALTQALKMAEGKKLNVYTDSRYAFATAHIHGEIYRRRGWLTSEGKEIKNKDEILALLKALFLPKRLSIIHCPGHQKGHSAEARGNRMADQAARKAAITETPDTSTLLAGKRTADGSEFEKRTADGSEFESPKKKAKVE

SEQ ID NO: 2736 - protein, 2100 aa, synthetic construct
MPAAKRVKLDGGDKKYSIGLDIGTNSVGWAVITDEYKVPSKKFKVLGNTDRHSIKKNLIGALLFDSGETAEATRLKRTARRRYTRRKNRICYLQEIFSNEMAKVDDSFFHRLEESFLVEEDKKHERHPIFGNIVDEVAYHEKYPTIYHLRKKLVDSTDKADLRLIYLALAHMIKFRGHFLIEGDLNPDNSDVDKLFIQLVQTYNQLFEENPINASGVDAKAILSARLSKSRRLENLIAQLPGEKKNGLFGNLIALSLGLTPNFKSNFDLAEDAKLQLSKDTYDDDLDNLLAQIGDQYADLFLAAKNLSDAILLSDILRVNTEITKAPLSASMIKRYDEHHQDLTLLKALVRQQLPEKYKEIFFDQSKNGYAGYIDGGASQEEFYKFIKPILEKMDGTEELLVKLNREDLLRKQRTFDNGSIPHQIHLGELHAILRRQEDFYPFLKDNREKIEKILTFRIPYYVGPLARGNSRFAWMTRKSEETITPWNFEEVVDKGASAQSFIERMTNFDKNLPNEKVLPKHSLLYEYFTVYNELTKVKYVTEGMRKPAFLSGEQKKAIVDLLFKTNRKVTVKQLKEDYFKKIECFDSVEISGVEDRFNASLGTYHDLLKIIKDKDFLDNEENEDILEDIVLTLTLFEDREMIEERLKTYAHLFDDKVMKQLKRRRYTGWGRLSRKLINGIRDKQSGKTILDFLKSDGFANRNFMQLIHDDSLTFKEDIQKAQVSGQGDSLHEHIANLAGSPAIKKGILQTVKVVDELVKVMGRHKPENIVIEMARENQTTQKGQKNSRERMKRIEEGIKELGSQILKEHPVENTQLQNEKLYLYYLQNGRDMYVDQELDINRLSDYDVDHIVPQSFLKDDSIDNKVLTRSDKARGKSDNVPSEEVVKKMKNYWRQLLNAKLITQRKFDNLTKAERGGLSELDKAGFIKRQLVETRQITKHVAQILDSRMNTKYDENDKLIREVKVITLKSKLVSDFRKDFQFYKVREINNYHHAHDAYLNAVVGTALIKKYPKLESEFVYGDYKVYDVRKMIAKSEQEIGKATAKYFFYSNIMNFFKTEITLANGEIRKRPLIETNGETGEIVWDKGRDFATVRKVLSMPQVNIVKKTEVQTGGFSKESILPKRNSDKLIARKKDWDPKKYGGFDSPTVAYSVLVVAKVEKGKSKKLKSVKELLGITIMERSSFEKNPIDFLEAKGYKEVKKDLIIKLPKYSLFELENGRKRMLASAGELQKGNELALPSKYVNFLYLASHYEKLKGSPEDNEQKQLFVEQHKHYLDEIIEQISEFSKRVILADANLDKVLSAYNKHRDKPIREQAENIIHLFTLTNLGAPAAFKYFDTTIDRKRYTSTKEVLDATLIHQSITGLYETRIDLSQLGGDGGGGGGSGGGGSGGGGSGGTLNIEDEHRLHETSKEPDVSLGSTWLSDFPQAWAETGGMGLAVRQAPLIIPLKATSTPVSIKQYPMSQEARLGIKPHIQRLLDQGILVPCQSPWNTPLLPVKKPGTNDYRPVQDLREVNKRVEDIHPTVPNPYNLLSGLPPSHQWYTVLDLKDAFFCLRLHPTSQPLFAFEWRDPEMGISGQLTWTRLPQGFKNSPTLFNEALHRDLADFRIQHPDLILLQYVDDLLLAATSELDCQQGTRALLQTLGNLGYRASAKKAQICQKQVKYLGYLLKEGQRWLTEARKETVMGQPTPKTPRQLREFLGTAGFCRLWIPGFAEMAAPLYPLTKPGTLFNWGPDQQKAYQEIKQALLTAPALGLPDLTKPFELFVDEKQGYAKGVLTQKLGPWRRPVAYLSKKLDPVAAGWPPCLRMVAAIAVLTKDAGKLTMGQPLVILAPHAVEALVKQPPDRWLSNARMTHYQALLLDTDRVQFGPVVALNPATLLPLPEEGLQHNCLDILAEAHGTRPDLTDQPLPDADHTWYTDGSSLLQEGQRKAGAAVTTETEVIWAKALPAGTSAQRAELIALTQALKMAEGKKLNVYTDSRYAFATAHIHGEIYRRRGWLTSEGKEIKNKDEILALLKALFLPKRLSIIHCPGHQKGHSAEARGNRMADQAARKAAITETPDTSTLLAGKRTADGSEFEKRTADGSEFESPKKKAKVE

SEQ ID NO: 2737 - protein, 2093 aa, synthetic construct
MPAAKRVKLDGGDKKYSIGLDIGTNSVGWAVITDEYKVPSKKFKVLGNTDRHSIKKNLIGALLFDSGETAEATRLKRTARRRYTRRKNRICYLQEIFSNEMAKVDDSFFHRLEESFLVEEDKKHERHPIFGNIVDEVAYHEKYPTIYHLRKKLVDSTDKADLRLIYLALAHMIKFRGHFLIEGDLNPDNSDVDKLFIQLVQTYNQLFEENPINASGVDAKAILSARLSKSRRLENLIAQLPGEKKNGLFGNLIALSLGLTPNFKSNFDLAEDAKLQLSKDTYDDDLDNLLAQIGDQYADLFLAAKNLSDAILLSDILRVNTEITKAPLSASMIKRYDEHHQDLTLLKALVRQQLPEKYKEIFFDQSKNGYAGYIDGGASQEEFYKFIKPILEKMDGTEELLVKLNREDLLRKQRTFDNGSIPHQIHLGELHAILRRQEDFYPFLKDNREKIEKILTFRIPYYVGPLARGNSRFAWMTRKSEETITPWNFEEVVDKGASAQSFIERMTNFDKNLPNEKVLPKHSLLYEYFTVYNELTKVKYVTEGMRKPAFLSGEQKKAIVDLLFKTNRKVTVKQLKEDYFKKIECFDSVEISGVEDRFNASLGTYHDLLKIIKDKDFLDNEENEDILEDIVLTLTLFEDREMIEERLKTYAHLFDDKVMKQLKRRRYTGWGRLSRKLINGIRDKQSGKTILDFLKSDGFANRNFMQLIHDDSLTFKEDIQKAQVSGQGDSLHEHIANLAGSPAIKKGILQTVKVVDELVKVMGRHKPENIVIEMARENQTTQKGQKNSRERMKRIEEGIKELGSQILKEHPVENTQLQNEKLYLYYLQNGRDMYVDQELDINRLSDYDVDHIVPQSFLKDDSIDNKVLTRSDKARGKSDNVPSEEVVKKMKNYWRQLLNAKLITQRKFDNLTKAERGGLSELDKAGFIKRQLVETRQITKHVAQILDSRMNTKYDENDKLIREVKVITLKSKLVSDFRKDFQFYKVREINNYHHAHDAYLNAVVGTALIKKYPKLESEFVYGDYKVYDVRKMIAKSEQEIGKATAKYFFYSNIMNFFKTEITLANGEIRKRPLIETNGETGEIVWDKGRDFATVRKVLSMPQVNIVKKTEVQTGGFSKESILPKRNSDKLIARKKDWDPKKYGGFDSPTVAYSVLVVAKVEKGKSKKLKSVKELLGITIMERSSFEKNPIDFLEAKGYKEVKKDLIIKLPKYSLFELENGRKRMLASAGELQKGNELALPSKYVNFLYLASHYEKLKGSPEDNEQKQLFVEQHKHYLDEIIEQISEFSKRVILADANLDKVLSAYNKHRDKPIREQAENIIHLFTLTNLGAPAAFKYFDTTIDRKRYTSTKEVLDATLIHQSITGLYETRIDLSQLGGDGGEAAAKGSSGGTLNIEDEHRLHETSKEPDVSLGSTWLSDFPQAWAETGGMGLAVRQAPLIIPLKATSTPVSIKQYPMSQEARLGIKPHIQRLLDQGILVPCQSPWNTPLLPVKKPGTNDYRPVQDLREVNKRVEDIHPTVPNPYNLLSGLPPSHQWYTVLDLKDAFFCLRLHPTSQPLFAFEWRDPEMGISGQLTWTRLPQGFKNSPTLFNEALHRDLADFRIQHPDLILLQYVDDLLLAATSELDCQQGTRALLQTLGNLGYRASAKKAQICQKQVKYLGYLLKEGQRWLTEARKETVMGQPTPKTPRQLREFLGTAGFCRLWIPGFAEMAAPLYPLTKPGTLFNWGPDQQKAYQEIKQALLTAPALGLPDLTKPFELFVDEKQGYAKGVLTQKLGPWRRPVAYLSKKLDPVAAGWPPCLRMVAAIAVLTKDAGKLTMGQPLVILAPHAVEALVKQPPDRWLSNARMTHYQALLLDTDRVQFGPVVALNPATLLPLPEEGLQHNCLDILAEAHGTRPDLTDQPLPDADHTWYTDGSSLLQEGQRKAGAAVTTETEVIWAKALPAGTSAQRAELIALTQALKMAEGKKLNVYTDSRYAFATAHIHGEIYRRRGWLTSEGKEIKNKDEILALLKALFLPKRLSIIHCPGHQKGHSAEARGNRMADQAARKAAITETPDTSTLLAGKRTADGSEFEKRTADGSEFESPKKKAKVE

SEQ ID NO: 2738 - protein, 2094 aa, synthetic construct
MPAAKRVKLDGGDKKYSIGLDIGTNSVGWAVITDEYKVPSKKFKVLGNTDRHSIKKNLIGALLFDSGETAEATRLKRTARRRYTRRKNRICYLQEIFSNEMAKVDDSFFHRLEESFLVEEDKKHERHPIFGNIVDEVAYHEKYPTIYHLRKKLVDSTDKADLRLIYLALAHMIKFRGHFLIEGDLNPDNSDVDKLFIQLVQTYNQLFEENPINASGVDAKAILSARLSKSRRLENLIAQLPGEKKNGLFGNLIALSLGLTPNFKSNFDLAEDAKLQLSKDTYDDDLDNLLAQIGDQYADLFLAAKNLSDAILLSDILRVNTEITKAPLSASMIKRYDEHHQDLTLLKALVRQQLPEKYKEIFFDQSKNGYAGYIDGGASQEEFYKFIKPILEKMDGTEELLVKLNREDLLRKQRTFDNGSIPHQIHLGELHAILRRQEDFYPFLKDNREKIEKILTFRIPYYVGPLARGNSRFAWMTRKSEETITPWNFEEVVDKGASAQSFIERMTNFDKNLPNEKVLPKHSLLYEYFTVYNELTKVKYVTEGMRKPAFLSGEQKKAIVDLLFKTNRKVTVKQLKEDYFKKIECFDSVEISGVEDRFNASLGTYHDLLKIIKDKDFLDNEENEDILEDIVLTLTLFEDREMIEERLKTYAHLFDDKVMKQLKRRRYTGWGRLSRKLINGIRDKQSGKTILDFLKSDGFANRNFMQLIHDDSLTFKEDIQKAQVSGQGDSLHEHIANLAGSPAIKKGILQTVKVVDELVKVMGRHKPENIVIEMARENQTTQKGQKNSRERMKRIEEGIKELGSQILKEHPVENTQLQNEKLYLYYLQNGRDMYVDQELDINRLSDYDVDHIVPQSFLKDDSIDNKVLTRSDKARGKSDNVPSEEVVKKMKNYWRQLLNAKLITQRKFDNLTKAERGGLSELDKAGFIKRQLVETRQITKHVAQILDSRMNTKYDENDKLIREVKVITLKSKLVSDFRKDFQFYKVREINNYHHAHDAYLNAVVGTALIKKYPKLESEFVYGDYKVYDVRKMIAKSEQEIGKATAKYFFYSNIMNFFKTEITLANGEIRKRPLIETNGETGEIVWDKGRDFATVRKVLSMPQVNIVKKTEVQTGGFSKESILPKRNSDKLIARKKDWDPKKYGGFDSPTVAYSVLVVAKVEKGKSKKLKSVKELLGITIMERSSFEKNPIDFLEAKGYKEVKKDLIIKLPKYSLFELENGRKRMLASAGELQKGNELALPSKYVNFLYLASHYEKLKGSPEDNEQKQLFVEQHKHYLDEIIEQISEFSKRVILADANLDKVLSAYNKHRDKPIREQAENIIHLFTLTNLGAPAAFKYFDTTIDRKRYTSTKEVLDATLIHQSITGLYETRIDLSQLGGDGGPAPGGGGGSGGTLNIEDEHRLHETSKEPDVSLGSTWLSDFPQAWAETGGMGLAVRQAPLIIPLKATSTPVSIKQYPMSQEARLGIKPHIQRLLDQGILVPCQSPWNTPLLPVKKPGTNDYRPVQDLREVNKRVEDIHPTVPNPYNLLSGLPPSHQWYTVLDLKDAFFCLRLHPTSQPLFAFEWRDPEMGISGQLTWTRLPQGFKNSPTLFNEALHRDLADFRIQHPDLILLQYVDDLLLAATSELDCQQGTRALLQTLGNLGYRASAKKAQICQKQVKYLGYLLKEGQRWLTEARKETVMGQPTPKTPRQLREFLGTAGFCRLWIPGFAEMAAPLYPLTKPGTLFNWGPDQQKAYQEIKQALLTAPALGLPDLTKPFELFVDEKQGYAKGVLTQKLGPWRRPVAYLSKKLDPVAAGWPPCLRMVAAIAVLTKDAGKLTMGQPLVILAPHAVEALVKQPPDRWLSNARMTHYQALLLDTDRVQFGPVVALNPATLLPLPEEGLQHNCLDILAEAHGTRPDLTDQPLPDADHTWYTDGSSLLQEGQRKAGAAVTTETEVIWAKALPAGTSAQRAELIALTQALKMAEGKKLNVYTDSRYAFATAHIHGEIYRRRGWLTSEGKEIKNKDEILALLKALFLPKRLSIIHCPGHQKGHSAEARGNRMADQAARKAAITETPDTSTLLAGKRTADGSEFEKRTADGSEFESPKKKAKVE

SEQ ID NO: 2739 - protein, 2093 aa, synthetic construct
MPAAKRVKLDGGDKKYSIGLDIGTNSVGWAVITDEYKVPSKKFKVLGNTDRHSIKKNLIGALLFDSGETAEATRLKRTARRRYTRRKNRICYLQEIFSNEMAKVDDSFFHRLEESFLVEEDKKHERHPIFGNIVDEVAYHEKYPTIYHLRKKLVDSTDKADLRLIYLALAHMIKFRGHFLIEGDLNPDNSDVDKLFIQLVQTYNQLFEENPINASGVDAKAILSARLSKSRRLENLIAQLPGEKKNGLFGNLIALSLGLTPNFKSNFDLAEDAKLQLSKDTYDDDLDNLLAQIGDQYADLFLAAKNLSDAILLSDILRVNTEITKAPLSASMIKRYDEHHQDLTLLKALVRQQLPEKYKEIFFDQSKNGYAGYIDGGASQEEFYKFIKPILEKMDGTEELLVKLNREDLLRKQRTFDNGSIPHQIHLGELHAILRRQEDFYPFLKDNREKIEKILTFRIPYYVGPLARGNSRFAWMTRKSEETITPWNFEEVVDKGASAQSFIERMTNFDKNLPNEKVLPKHSLLYEYFTVYNELTKVKYVTEGMRKPAFLSGEQKKAIVDLLFKTNRKVTVKQLKEDYFKKIECFDSVEISGVEDRFNASLGTYHDLLKIIKDKDFLDNEENEDILEDIVLTLTLFEDREMIEERLKTYAHLFDDKVMKQLKRRRYTGWGRLSRKLINGIRDKQSGKTILDFLKSDGFANRNFMQLIHDDSLTFKEDIQKAQVSGQGDSLHEHIANLAGSPAIKKGILQTVKVVDELVKVMGRHKPENIVIEMARENQTTQKGQKNSRERMKRIEEGIKELGSQILKEHPVENTQLQNEKLYLYYLQNGRDMYVDQELDINRLSDYDVDHIVPQSFLKDDSIDNKVLTRSDKARGKSDNVPSEEVVKKMKNYWRQLLNAKLITQRKFDNLTKAERGGLSELDKAGFIKRQLVETRQITKHVAQILDSRMNTKYDENDKLIREVKVITLKSKLVSDFRKDFQFYKVREINNYHHAHDAYLNAVVGTALIKKYPKLESEFVYGDYKVYDVRKMIAKSEQEIGKATAKYFFYSNIMNFFKTEITLANGEIRKRPLIETNGETGEIVWDKGRDFATVRKVLSMPQVNIVKKTEVQTGGFSKESILPKRNSDKLIARKKDWDPKKYGGFDSPTVAYSVLVVAKVEKGKSKKLKSVKELLGITIMERSSFEKNPIDFLEAKGYKEVKKDLIIKLPKYSLFELENGRKRMLASAGELQKGNELALPSKYVNFLYLASHYEKLKGSPEDNEQKQLFVEQHKHYLDEIIEQISEFSKRVILADANLDKVLSAYNKHRDKPIREQAENIIHLFTLTNLGAPAAFKYFDTTIDRKRYTSTKEVLDATLIHQSITGLYETRIDLSQLGGDGGGGGGGGGGGGTLNIEDEHRLHETSKEPDVSLGSTWLSDFPQAWAETGGMGLAVRQAPLIIPLKATSTPVSIKQYPMSQEARLGIKPHIQRLLDQGILVPCQSPWNTPLLPVKKPGTNDYRPVQDLREVNKRVEDIHPTVPNPYNLLSGLPPSHQWYTVLDLKDAFFCLRLHPTSQPLFAFEWRDPEMGISGQLTWTRLPQGFKNSPTLFNEALHRDLADFRIQHPDLILLQYVDDLLLAATSELDCQQGTRALLQTLGNLGYRASAKKAQICQKQVKYLGYLLKEGQRWLTEARKETVMGQPTPKTPRQLREFLGTAGFCRLWIPGFAEMAAPLYPLTKPGTLFNWGPDQQKAYQEIKQALLTAPALGLPDLTKPFELFVDEKQGYAKGVLTQKLGPWRRPVAYLSKKLDPVAAGWPPCLRMVAAIAVLTKDAGKLTMGQPLVILAPHAVEALVKQPPDRWLSNARMTHYQALLLDTDRVQFGPVVALNPATLLPLPEEGLQHNCLDILAEAHGTRPDLTDQPLPDADHTWYTDGSSLLQEGQRKAGAAVTTETEVIWAKALPAGTSAQRAELIALTQALKMAEGKKLNVYTDSRYAFATAHIHGEIYRRRGWLTSEGKEIKNKDEILALLKALFLPKRLSIIHCPGHQKGHSAEARGNRMADQAARKAAITETPDTSTLLAGKRTADGSEFEKRTADGSEFESPKKKAKVE

SEQ ID NO: 2740 - protein, 2093 aa, synthetic construct
MPAAKRVKLDGGDKKYSIGLDIGTNSVGWAVITDEYKVPSKKFKVLGNTDRHSIKKNLIGALLFDSGETAEATRLKRTARRRYTRRKNRICYLQEIFSNEMAKVDDSFFHRLEESFLVEEDKKHERHPIFGNIVDEVAYHEKYPTIYHLRKKLVDSTDKADLRLIYLALAHMIKFRGHFLIEGDLNPDNSDVDKLFIQLVQTYNQLFEENPINASGVDAKAILSARLSKSRRLENLIAQLPGEKKNGLFGNLIALSLGLTPNFKSNFDLAEDAKLQLSKDTYDDDLDNLLAQIGDQYADLFLAAKNLSDAILLSDILRVNTEITKAPLSASMIKRYDEHHQDLTLLKALVRQQLPEKYKEIFFDQSKNGYAGYIDGGASQEEFYKFIKPILEKMDGTEELLVKLNREDLLRKQRTFDNGSIPHQIHLGELHAILRRQEDFYPFLKDNREKIEKILTFRIPYYVGPLARGNSRFAWMTRKSEETITPWNFEEVVDKGASAQSFIERMTNFDKNLPNEKVLPKHSLLYEYFTVYNELTKVKYVTEGMRKPAFLSGEQKKAIVDLLFKTNRKVTVKQLKEDYFKKIECFDSVEISGVEDRFNASLGTYHDLLKIIKDKDFLDNEENEDILEDIVLTLTLFEDREMIEERLKTYAHLFDDKVMKQLKRRRYTGWGRLSRKLINGIRDKQSGKTILDFLKSDGFANRNFMQLIHDDSLTFKEDIQKAQVSGQGDSLHEHIANLAGSPAIKKGILQTVKVVDELVKVMGRHKPENIVIEMARENQTTQKGQKNSRERMKRIEEGIKELGSQILKEHPVENTQLQNEKLYLYYLQNGRDMYVDQELDINRLSDYDVDHIVPQSFLKDDSIDNKVLTRSDKARGKSDNVPSEEVVKKMKNYWRQLLNAKLITQRKFDNLTKAERGGLSELDKAGFIKRQLVETRQITKHVAQILDSRMNTKYDENDKLIREVKVITLKSKLVSDFRKDFQFYKVREINNYHHAHDAYLNAVVGTALIKKYPKLESEFVYGDYKVYDVRKMIAKSEQEIGKATAKYFFYSNIMNFFKTEITLANGEIRKRPLIETNGETGEIVWDKGRDFATVRKVLSMPQVNIVKKTEVQTGGFSKESILPKRNSDKLIARKKDWDPKKYGGFDSPTVAYSVLVVAKVEKGKSKKLKSVKELLGITIMERSSFEKNPIDFLEAKGYKEVKKDLIIKLPKYSLFELENGRKRMLASAGELQKGNELALPSKYVNFLYLASHYEKLKGSPEDNEQKQLFVEQHKHYLDEIIEQISEFSKRVILADANLDKVLSAYNKHRDKPIREQAENIIHLFTLTNLGAPAAFKYFDTTIDRKRYTSTKEVLDATLIHQSITGLYETRIDLSQLGGDGGPAPEAAAKGGTLNIEDEHRLHETSKEPDVSLGSTWLSDFPQAWAETGGMGLAVRQAPLIIPLKATSTPVSIKQYPMSQEARLGIKPHIQRLLDQGILVPCQSPWNTPLLPVKKPGTNDYRPVQDLREVNKRVEDIHPTVPNPYNLLSGLPPSHQWYTVLDLKDAFFCLRLHPTSQPLFAFEWRDPEMGISGQLTWTRLPQGFKNSPTLFNEALHRDLADFRIQHPDLILLQYVDDLLLAATSELDCQQGTRALLQTLGNLGYRASAKKAQICQKQVKYLGYLLKEGQRWLTEARKETVMGQPTPKTPRQLREFLGTAGFCRLWIPGFAEMAAPLYPLTKPGTLFNWGPDQQKAYQEIKQALLTAPALGLPDLTKPFELFVDEKQGYAKGVLTQKLGPWRRPVAYLSKKLDPVAAGWPPCLRMVAAIAVLTKDAGKLTMGQPLVILAPHAVEALVKQPPDRWLSNARMTHYQALLLDTDRVQFGPVVALNPATLLPLPEEGLQHNCLDILAEAHGTRPDLTDQPLPDADHTWYTDGSSLLQEGQRKAGAAVTTETEVIWAKALPAGTSAQRAELIALTQALKMAEGKKLNVYTDSRYAFATAHIHGEIYRRRGWLTSEGKEIKNKDEILALLKALFLPKRLSIIHCPGHQKGHSAEARGNRMADQAARKAAITETPDTSTLLAGKRTADGSEFEKRTADGSEFESPKKKAKVE

SEQ ID NO: 2741 - protein, 2115 aa, synthetic construct
MPAAKRVKLDGGDKKYSIGLDIGTNSVGWAVITDEYKVPSKKFKVLGNTDRHSIKKNLIGALLFDSGETAEATRLKRTARRRYTRRKNRICYLQEIFSNEMAKVDDSFFHRLEESFLVEEDKKHERHPIFGNIVDEVAYHEKYPTIYHLRKKLVDSTDKADLRLIYLALAHMIKFRGHFLIEGDLNPDNSDVDKLFIQLVQTYNQLFEENPINASGVDAKAILSARLSKSRRLENLIAQLPGEKKNGLFGNLIALSLGLTPNFKSNFDLAEDAKLQLSKDTYDDDLDNLLAQIGDQYADLFLAAKNLSDAILLSDILRVNTEITKAPLSASMIKRYDEHHQDLTLLKALVRQQLPEKYKEIFFDQSKNGYAGYIDGGASQEEFYKFIKPILEKMDGTEELLVKLNREDLLRKQRTFDNGSIPHQIHLGELHAILRRQEDFYPFLKDNREKIEKILTFRIPYYVGPLARGNSRFAWMTRKSEETITPWNFEEVVDKGASAQSFIERMTNFDKNLPNEKVLPKHSLLYEYFTVYNELTKVKYVTEGMRKPAFLSGEQKKAIVDLLFKTNRKVTVKQLKEDYFKKIECFDSVEISGVEDRFNASLGTYHDLLKIIKDKDFLDNEENEDILEDIVLTLTLFEDREMIEERLKTYAHLFDDKVMKQLKRRRYTGWGRLSRKLINGIRDKQSGKTILDFLKSDGFANRNFMQLIHDDSLTFKEDIQKAQVSGQGDSLHEHIANLAGSPAIKKGILQTVKVVDELVKVMGRHKPENIVIEMARENQTTQKGQKNSRERMKRIEEGIKELGSQILKEHPVENTQLQNEKLYLYYLQNGRDMYVDQELDINRLSDYDVDHIVPQSFLKDDSIDNKVLTRSDKARGKSDNVPSEEVVKKMKNYWRQLLNAKLITQRKFDNLTKAERGGLSELDKAGFIKRQLVETRQITKHVAQILDSRMNTKYDENDKLIREVKVITLKSKLVSDFRKDFQFYKVREINNYHHAHDAYLNAVVGTALIKKYPKLESEFVYGDYKVYDVRKMIAKSEQEIGKATAKYFFYSNIMNFFKTEITLANGEIRKRPLIETNGETGEIVWDKGRDFATVRKVLSMPQVNIVKKTEVQTGGFSKESILPKRNSDKLIARKKDWDPKKYGGFDSPTVAYSVLVVAKVEKGKSKKLKSVKELLGITIMERSSFEKNPIDFLEAKGYKEVKKDLIIKLPKYSLFELENGRKRMLASAGELQKGNELALPSKYVNFLYLASHYEKLKGSPEDNEQKQLFVEQHKHYLDEIIEQISEFSKRVILADANLDKVLSAYNKHRDKPIREQAENIIHLFTLTNLGAPAAFKYFDTTIDRKRYTSTKEVLDATLIHQSITGLYETRIDLSQLGGDGGGGGGSGGGGSGGGGSGGGGSGGGGSGGGGSGGTLNIEDEHRLHETSKEPDVSLGSTWLSDFPQAWAETGGMGLAVRQAPLIIPLKATSTPVSIKQYPMSQEARLGIKPHIQRLLDQGILVPCQSPWNTPLLPVKKPGTNDYRPVQDLREVNKRVEDIHPTVPNPYNLLSGLPPSHQWYTVLDLKDAFFCLRLHPTSQPLFAFEWRDPEMGISGQLTWTRLPQGFKNSPTLFNEALHRDLADFRIQHPDLILLQYVDDLLLAATSELDCQQGTRALLQTLGNLGYRASAKKAQICQKQVKYLGYLLKEGQRWLTEARKETVMGQPTPKTPRQLREFLGTAGFCRLWIPGFAEMAAPLYPLTKPGTLFNWGPDQQKAYQEIKQALLTAPALGLPDLTKPFELFVDEKQGYAKGVLTQKLGPWRRPVAYLSKKLDPVAAGWPPCLRMVAAIAVLTKDAGKLTMGQPLVILAPHAVEALVKQPPDRWLSNARMTHYQALLLDTDRVQFGPVVALNPATLLPLPEEGLQHNCLDILAEAHGTRPDLTDQPLPDADHTWYTDGSSLLQEGQRKAGAAVTTETEVIWAKALPAGTSAQRAELIALTQALKMAEGKKLNVYTDSRYAFATAHIHGEIYRRRGWLTSEGKEIKNKDEILALLKALFLPKRLSIIHCPGHQKGHSAEARGNRMADQAARKAAITETPDTSTLLAGKRTADGSEFEKRTADGSEFESPKKKAKVE

SEQ ID NO: 2742 - protein, 2094 aa, synthetic construct
MPAAKRVKLDGGDKKYSIGLDIGTNSVGWAVITDEYKVPSKKFKVLGNTDRHSIKKNLIGALLFDSGETAEATRLKRTARRRYTRRKNRICYLQEIFSNEMAKVDDSFFHRLEESFLVEEDKKHERHPIFGNIVDEVAYHEKYPTIYHLRKKLVDSTDKADLRLIYLALAHMIKFRGHFLIEGDLNPDNSDVDKLFIQLVQTYNQLFEENPINASGVDAKAILSARLSKSRRLENLIAQLPGEKKNGLFGNLIALSLGLTPNFKSNFDLAEDAKLQLSKDTYDDDLDNLLAQIGDQYADLFLAAKNLSDAILLSDILRVNTEITKAPLSASMIKRYDEHHQDLTLLKALVRQQLPEKYKEIFFDQSKNGYAGYIDGGASQEEFYKFIKPILEKMDGTEELLVKLNREDLLRKQRTFDNGSIPHQIHLGELHAILRRQEDFYPFLKDNREKIEKILTFRIPYYVGPLARGNSRFAWMTRKSEETITPWNFEEVVDKGASAQSFIERMTNFDKNLPNEKVLPKHSLLYEYFTVYNELTKVKYVTEGMRKPAFLSGEQKKAIVDLLFKTNRKVTVKQLKEDYFKKIECFDSVEISGVEDRFNASLGTYHDLLKIIKDKDFLDNEENEDILEDIVLTLTLFEDREMIEERLKTYAHLFDDKVMKQLKRRRYTGWGRLSRKLINGIRDKQSGKTILDFLKSDGFANRNFMQLIHDDSLTFKEDIQKAQVSGQGDSLHEHIANLAGSPAIKKGILQTVKVVDELVKVMGRHKPENIVIEMARENQTTQKGQKNSRERMKRIEEGIKELGSQILKEHPVENTQLQNEKLYLYYLQNGRDMYVDQELDINRLSDYDVDHIVPQSFLKDDSIDNKVLTRSDKARGKSDNVPSEEVVKKMKNYWRQLLNAKLITQRKFDNLTKAERGGLSELDKAGFIKRQLVETRQITKHVAQILDSRMNTKYDENDKLIREVKVITLKSKLVSDFRKDFQFYKVREINNYHHAHDAYLNAVVGTALIKKYPKLESEFVYGDYKVYDVRKMIAKSEQEIGKATAKYFFYSNIMNFFKTEITLANGEIRKRPLIETNGETGEIVWDKGRDFATVRKVLSMPQVNIVKKTEVQTGGFSKESILPKRNSDKLIARKKDWDPKKYGGFDSPTVAYSVLVVAKVEKGKSKKLKSVKELLGITIMERSSFEKNPIDFLEAKGYKEVKKDLIIKLPKYSLFELENGRKRMLASAGELQKGNELALPSKYVNFLYLASHYEKLKGSPEDNEQKQLFVEQHKHYLDEIIEQISEFSKRVILADANLDKVLSAYNKHRDKPIREQAENIIHLFTLTNLGAPAAFKYFDTTIDRKRYTSTKEVLDATLIHQSITGLYETRIDLSQLGGDGGGGGPAPGGSGGTLNIEDEHRLHETSKEPDVSLGSTWLSDFPQAWAETGGMGLAVRQAPLIIPLKATSTPVSIKQYPMSQEARLGIKPHIQRLLDQGILVPCQSPWNTPLLPVKKPGTNDYRPVQDLREVNKRVEDIHPTVPNPYNLLSGLPPSHQWYTVLDLKDAFFCLRLHPTSQPLFAFEWRDPEMGISGQLTWTRLPQGFKNSPTLFNEALHRDLADFRIQHPDLILLQYVDDLLLAATSELDCQQGTRALLQTLGNLGYRASAKKAQICQKQVKYLGYLLKEGQRWLTEARKETVMGQPTPKTPRQLREFLGTAGFCRLWIPGFAEMAAPLYPLTKPGTLFNWGPDQQKAYQEIKQALLTAPALGLPDLTKPFELFVDEKQGYAKGVLTQKLGPWRRPVAYLSKKLDPVAAGWPPCLRMVAAIAVLTKDAGKLTMGQPLVILAPHAVEALVKQPPDRWLSNARMTHYQALLLDTDRVQFGPVVALNPATLLPLPEEGLQHNCLDILAEAHGTRPDLTDQPLPDADHTWYTDGSSLLQEGQRKAGAAVTTETEVIWAKALPAGTSAQRAELIALTQALKMAEGKKLNVYTDSRYAFATAHIHGEIYRRRGWLTSEGKEIKNKDEILALLKALFLPKRLSIIHCPGHQKGHSAEARGNRMADQAARKAAITETPDTSTLLAGKRTADGSEFEKRTADGSEFESPKKKAKVE

SEQ ID NO: 2743 - protein, 2091 aa, synthetic construct
MPAAKRVKLDGGDKKYSIGLDIGTNSVGWAVITDEYKVPSKKFKVLGNTDRHSIKKNLIGALLFDSGETAEATRLKRTARRRYTRRKNRICYLQEIFSNEMAKVDDSFFHRLEESFLVEEDKKHERHPIFGNIVDEVAYHEKYPTIYHLRKKLVDSTDKADLRLIYLALAHMIKFRGHFLIEGDLNPDNSDVDKLFIQLVQTYNQLFEENPINASGVDAKAILSARLSKSRRLENLIAQLPGEKKNGLFGNLIALSLGLTPNFKSNFDLAEDAKLQLSKDTYDDDLDNLLAQIGDQYADLFLAAKNLSDAILLSDILRVNTEITKAPLSASMIKRYDEHHQDLTLLKALVRQQLPEKYKEIFFDQSKNGYAGYIDGGASQEEFYKFIKPILEKMDGTEELLVKLNREDLLRKQRTFDNGSIPHQIHLGELHAILRRQEDFYPFLKDNREKIEKILTFRIPYYVGPLARGNSRFAWMTRKSEETITPWNFEEVVDKGASAQSFIERMTNFDKNLPNEKVLPKHSLLYEYFTVYNELTKVKYVTEGMRKPAFLSGEQKKAIVDLLFKTNRKVTVKQLKEDYFKKIECFDSVEISGVEDRFNASLGTYHDLLKIIKDKDFLDNEENEDILEDIVLTLTLFEDREMIEERLKTYAHLFDDKVMKQLKRRRYTGWGRLSRKLINGIRDKQSGKTILDFLKSDGFANRNFMQLIHDDSLTFKEDIQKAQVSGQGDSLHEHIANLAGSPAIKKGILQTVKVVDELVKVMGRHKPENIVIEMARENQTTQKGQKNSRERMKRIEEGIKELGSQILKEHPVENTQLQNEKLYLYYLQNGRDMYVDQELDINRLSDYDVDHIVPQSFLKDDSIDNKVLTRSDKARGKSDNVPSEEVVKKMKNYWRQLLNAKLITQRKFDNLTKAERGGLSELDKAGFIKRQLVETRQITKHVAQILDSRMNTKYDENDKLIREVKVITLKSKLVSDFRKDFQFYKVREINNYHHAHDAYLNAVVGTALIKKYPKLESEFVYGDYKVYDVRKMIAKSEQEIGKATAKYFFYSNIMNFFKTEITLANGEIRKRPLIETNGETGEIVWDKGRDFATVRKVLSMPQVNIVKKTEVQTGGFSKESILPKRNSDKLIARKKDWDPKKYGGFDSPTVAYSVLVVAKVEKGKSKKLKSVKELLGITIMERSSFEKNPIDFLEAKGYKEVKKDLIIKLPKYSLFELENGRKRMLASAGELQKGNELALPSKYVNFLYLASHYEKLKGSPEDNEQKQLFVEQHKHYLDEIIEQISEFSKRVILADANLDKVLSAYNKHRDKPIREQAENIIHLFTLTNLGAPAAFKYFDTTIDRKRYTSTKEVLDATLIHQSITGLYETRIDLSQLGGDGGPAPGGGGGTLNIEDEHRLHETSKEPDVSLGSTWLSDFPQAWAETGGMGLAVRQAPLIIPLKATSTPVSIKQYPMSQEARLGIKPHIQRLLDQGILVPCQSPWNTPLLPVKKPGTNDYRPVQDLREVNKRVEDIHPTVPNPYNLLSGLPPSHQWYTVLDLKDAFFCLRLHPTSQPLFAFEWRDPEMGISGQLTWTRLPQGFKNSPTLFNEALHRDLADFRIQHPDLILLQYVDDLLLAATSELDCQQGTRALLQTLGNLGYRASAKKAQICQKQVKYLGYLLKEGQRWLTEARKETVMGQPTPKTPRQLREFLGTAGFCRLWIPGFAEMAAPLYPLTKPGTLFNWGPDQQKAYQEIKQALLTAPALGLPDLTKPFELFVDEKQGYAKGVLTQKLGPWRRPVAYLSKKLDPVAAGWPPCLRMVAAIAVLTKDAGKLTMGQPLVILAPHAVEALVKQPPDRWLSNARMTHYQALLLDTDRVQFGPVVALNPATLLPLPEEGLQHNCLDILAEAHGTRPDLTDQPLPDADHTWYTDGSSLLQEGQRKAGAAVTTETEVIWAKALPAGTSAQRAELIALTQALKMAEGKKLNVYTDSRYAFATAHIHGEIYRRRGWLTSEGKEIKNKDEILALLKALFLPKRLSIIHCPGHQKGHSAEARGNRMADQAARKAAITETPDTSTLLAGKRTADGSEFEKRTADGSEFESPKKKAKVE

SEQ ID NO: 2744 - protein, 2096 aa, synthetic construct
MPAAKRVKLDGGDKKYSIGLDIGTNSVGWAVITDEYKVPSKKFKVLGNTDRHSIKKNLIGALLFDSGETAEATRLKRTARRRYTRRKNRICYLQEIFSNEMAKVDDSFFHRLEESFLVEEDKKHERHPIFGNIVDEVAYHEKYPTIYHLRKKLVDSTDKADLRLIYLALAHMIKFRGHFLIEGDLNPDNSDVDKLFIQLVQTYNQLFEENPINASGVDAKAILSARLSKSRRLENLIAQLPGEKKNGLFGNLIALSLGLTPNFKSNFDLAEDAKLQLSKDTYDDDLDNLLAQIGDQYADLFLAAKNLSDAILLSDILRVNTEITKAPLSASMIKRYDEHHQDLTLLKALVRQQLPEKYKEIFFDQSKNGYAGYIDGGASQEEFYKFIKPILEKMDGTEELLVKLNREDLLRKQRTFDNGSIPHQIHLGELHAILRRQEDFYPFLKDNREKIEKILTFRIPYYVGPLARGNSRFAWMTRKSEETITPWNFEEVVDKGASAQSFIERMTNFDKNLPNEKVLPKHSLLYEYFTVYNELTKVKYVTEGMRKPAFLSGEQKKAIVDLLFKTNRKVTVKQLKEDYFKKIECFDSVEISGVEDRFNASLGTYHDLLKIIKDKDFLDNEENEDILEDIVLTLTLFEDREMIEERLKTYAHLFDDKVMKQLKRRRYTGWGRLSRKLINGIRDKQSGKTILDFLKSDGFANRNFMQLIHDDSLTFKEDIQKAQVSGQGDSLHEHIANLAGSPAIKKGILQTVKVVDELVKVMGRHKPENIVIEMARENQTTQKGQKNSRERMKRIEEGIKELGSQILKEHPVENTQLQNEKLYLYYLQNGRDMYVDQELDINRLSDYDVDHIVPQSFLKDDSIDNKVLTRSDKARGKSDNVPSEEVVKKMKNYWRQLLNAKLITQRKFDNLTKAERGGLSELDKAGFIKRQLVETRQITKHVAQILDSRMNTKYDENDKLIREVKVITLKSKLVSDFRKDFQFYKVREINNYHHAHDAYLNAVVGTALIKKYPKLESEFVYGDYKVYDVRKMIAKSEQEIGKATAKYFFYSNIMNFFKTEITLANGEIRKRPLIETNGETGEIVWDKGRDFATVRKVLSMPQVNIVKKTEVQTGGFSKESILPKRNSDKLIARKKDWDPKKYGGFDSPTVAYSVLVVAKVEKGKSKKLKSVKELLGITIMERSSFEKNPIDFLEAKGYKEVKKDLIIKLPKYSLFELENGRKRMLASAGELQKGNELALPSKYVNFLYLASHYEKLKGSPEDNEQKQLFVEQHKHYLDEIIEQISEFSKRVILADANLDKVLSAYNKHRDKPIREQAENIIHLFTLTNLGAPAAFKYFDTTIDRKRYTSTKEVLDATLIHQSITGLYETRIDLSQLGGDGGGGSEAAAKPAPGGTLNIEDEHRLHETSKEPDVSLGSTWLSDFPQAWAETGGMGLAVRQAPLIIPLKATSTPVSIKQYPMSQEARLGIKPHIQRLLDQGILVPCQSPWNTPLLPVKKPGTNDYRPVQDLREVNKRVEDIHPTVPNPYNLLSGLPPSHQWYTVLDLKDAFFCLRLHPTSQPLFAFEWRDPEMGISGQLTWTRLPQGFKNSPTLFNEALHRDLADFRIQHPDLILLQYVDDLLLAATSELDCQQGTRALLQTLGNLGYRASAKKAQICQKQVKYLGYLLKEGQRWLTEARKETVMGQPTPKTPRQLREFLGTAGFCRLWIPGFAEMAAPLYPLTKPGTLFNWGPDQQKAYQEIKQALLTAPALGLPDLTKPFELFVDEKQGYAKGVLTQKLGPWRRPVAYLSKKLDPVAAGWPPCLRMVAAIAVLTKDAGKLTMGQPLVILAPHAVEALVKQPPDRWLSNARMTHYQALLLDTDRVQFGPVVALNPATLLPLPEEGLQHNCLDILAEAHGTRPDLTDQPLPDADHTWYTDGSSLLQEGQRKAGAAVTTETEVIWAKALPAGTSAQRAELIALTQALKMAEGKKLNVYTDSRYAFATAHIHGEIYRRRGWLTSEGKEIKNKDEILALLKALFLPKRLSIIHCPGHQKGHSAEARGNRMADQAARKAAITETPDTSTLLAGKRTADGSEFEKRTADGSEFESPKKKAKVE

SEQ ID NO: 2745 - protein, 2096 aa, synthetic construct
MPAAKRVKLDGGDKKYSIGLDIGTNSVGWAVITDEYKVPSKKFKVLGNTDRHSIKKNLIGALLFDSGETAEATRLKRTARRRYTRRKNRICYLQEIFSNEMAKVDDSFFHRLEESFLVEEDKKHERHPIFGNIVDEVAYHEKYPTIYHLRKKLVDSTDKADLRLIYLALAHMIKFRGHFLIEGDLNPDNSDVDKLFIQLVQTYNQLFEENPINASGVDAKAILSARLSKSRRLENLIAQLPGEKKNGLFGNLIALSLGLTPNFKSNFDLAEDAKLQLSKDTYDDDLDNLLAQIGDQYADLFLAAKNLSDAILLSDILRVNTEITKAPLSASMIKRYDEHHQDLTLLKALVRQQLPEKYKEIFFDQSKNGYAGYIDGGASQEEFYKFIKPILEKMDGTEELLVKLNREDLLRKQRTFDNGSIPHQIHLGELHAILRRQEDFYPFLKDNREKIEKILTFRIPYYVGPLARGNSRFAWMTRKSEETITPWNFEEVVDKGASAQSFIERMTNFDKNLPNEKVLPKHSLLYEYFTVYNELTKVKYVTEGMRKPAFLSGEQKKAIVDLLFKTNRKVTVKQLKEDYFKKIECFDSVEISGVEDRFNASLGTYHDLLKIIKDKDFLDNEENEDILEDIVLTLTLFEDREMIEERLKTYAHLFDDKVMKQLKRRRYTGWGRLSRKLINGIRDKQSGKTILDFLKSDGFANRNFMQLIHDDSLTFKEDIQKAQVSGQGDSLHEHIANLAGSPAIKKGILQTVKVVDELVKVMGRHKPENIVIEMARENQTTQKGQKNSRERMKRIEEGIKELGSQILKEHPVENTQLQNEKLYLYYLQNGRDMYVDQELDINRLSDYDVDHIVPQSFLKDDSIDNKVLTRSDKARGKSDNVPSEEVVKKMKNYWRQLLNAKLITQRKFDNLTKAERGGLSELDKAGFIKRQLVETRQITKHVAQILDSRMNTKYDENDKLIREVKVITLKSKLVSDFRKDFQFYKVREINNYHHAHDAYLNAVVGTALIKKYPKLESEFVYGDYKVYDVRKMIAKSEQEIGKATAKYFFYSNIMNFFKTEITLANGEIRKRPLIETNGETGEIVWDKGRDFATVRKVLSMPQVNIVKKTEVQTGGFSKESILPKRNSDKLIARKKDWDPKKYGGFDSPTVAYSVLVVAKVEKGKSKKLKSVKELLGITIMERSSFEKNPIDFLEAKGYKEVKKDLIIKLPKYSLFELENGRKRMLASAGELQKGNELALPSKYVNFLYLASHYEKLKGSPEDNEQKQLFVEQHKHYLDEIIEQISEFSKRVILADANLDKVLSAYNKHRDKPIREQAENIIHLFTLTNLGAPAAFKYFDTTIDRKRYTSTKEVLDATLIHQSITGLYETRIDLSQLGGDGGEAAAKGGGGGSGGTLNIEDEHRLHETSKEPDVSLGSTWLSDFPQAWAETGGMGLAVRQAPLIIPLKATSTPVSIKQYPMSQEARLGIKPHIQRLLDQGILVPCQSPWNTPLLPVKKPGTNDYRPVQDLREVNKRVEDIHPTVPNPYNLLSGLPPSHQWYTVLDLKDAFFCLRLHPTSQPLFAFEWRDPEMGISGQLTWTRLPQGFKNSPTLFNEALHRDLADFRIQHPDLILLQYVDDLLLAATSELDCQQGTRALLQTLGNLGYRASAKKAQICQKQVKYLGYLLKEGQRWLTEARKETVMGQPTPKTPRQLREFLGTAGFCRLWIPGFAEMAAPLYPLTKPGTLFNWGPDQQKAYQEIKQALLTAPALGLPDLTKPFELFVDEKQGYAKGVLTQKLGPWRRPVAYLSKKLDPVAAGWPPCLRMVAAIAVLTKDAGKLTMGQPLVILAPHAVEALVKQPPDRWLSNARMTHYQALLLDTDRVQFGPVVALNPATLLPLPEEGLQHNCLDILAEAHGTRPDLTDQPLPDADHTWYTDGSSLLQEGQRKAGAAVTTETEVIWAKALPAGTSAQRAELIALTQALKMAEGKKLNVYTDSRYAFATAHIHGEIYRRRGWLTSEGKEIKNKDEILALLKALFLPKRLSIIHCPGHQKGHSAEARGNRMADQAARKAAITETPDTSTLLAGKRTADGSEFEKRTADGSEFESPKKKAKVE

SEQ ID NO: 2746 - protein, 2093 aa, synthetic construct
MPAAKRVKLDGGDKKYSIGLDIGTNSVGWAVITDEYKVPSKKFKVLGNTDRHSIKKNLIGALLFDSGETAEATRLKRTARRRYTRRKNRICYLQEIFSNEMAKVDDSFFHRLEESFLVEEDKKHERHPIFGNIVDEVAYHEKYPTIYHLRKKLVDSTDKADLRLIYLALAHMIKFRGHFLIEGDLNPDNSDVDKLFIQLVQTYNQLFEENPINASGVDAKAILSARLSKSRRLENLIAQLPGEKKNGLFGNLIALSLGLTPNFKSNFDLAEDAKLQLSKDTYDDDLDNLLAQIGDQYADLFLAAKNLSDAILLSDILRVNTEITKAPLSASMIKRYDEHHQDLTLLKALVRQQLPEKYKEIFFDQSKNGYAGYIDGGASQEEFYKFIKPILEKMDGTEELLVKLNREDLLRKQRTFDNGSIPHQIHLGELHAILRRQEDFYPFLKDNREKIEKILTFRIPYYVGPLARGNSRFAWMTRKSEETITPWNFEEVVDKGASAQSFIERMTNFDKNLPNEKVLPKHSLLYEYFTVYNELTKVKYVTEGMRKPAFLSGEQKKAIVDLLFKTNRKVTVKQLKEDYFKKIECFDSVEISGVEDRFNASLGTYHDLLKIIKDKDFLDNEENEDILEDIVLTLTLFEDREMIEERLKTYAHLFDDKVMKQLKRRRYTGWGRLSRKLINGIRDKQSGKTILDFLKSDGFANRNFMQLIHDDSLTFKEDIQKAQVSGQGDSLHEHIANLAGSPAIKKGILQTVKVVDELVKVMGRHKPENIVIEMARENQTTQKGQKNSRERMKRIEEGIKELGSQILKEHPVENTQLQNEKLYLYYLQNGRDMYVDQELDINRLSDYDVDHIVPQSFLKDDSIDNKVLTRSDKARGKSDNVPSEEVVKKMKNYWRQLLNAKLITQRKFDNLTKAERGGLSELDKAGFIKRQLVETRQITKHVAQILDSRMNTKYDENDKLIREVKVITLKSKLVSDFRKDFQFYKVREINNYHHAHDAYLNAVVGTALIKKYPKLESEFVYGDYKVYDVRKMIAKSEQEIGKATAKYFFYSNIMNFFKTEITLANGEIRKRPLIETNGETGEIVWDKGRDFATVRKVLSMPQVNIVKKTEVQTGGFSKESILPKRNSDKLIARKKDWDPKKYGGFDSPTVAYSVLVVAKVEKGKSKKLKSVKELLGITIMERSSFEKNPIDFLEAKGYKEVKKDLIIKLPKYSLFELENGRKRMLASAGELQKGNELALPSKYVNFLYLASHYEKLKGSPEDNEQKQLFVEQHKHYLDEIIEQISEFSKRVILADANLDKVLSAYNKHRDKPIREQAENIIHLFTLTNLGAPAAFKYFDTTIDRKRYTSTKEVLDATLIHQSITGLYETRIDLSQLGGDGGGGGEAAAKGGTLNIEDEHRLHETSKEPDVSLGSTWLSDFPQAWAETGGMGLAVRQAPLIIPLKATSTPVSIKQYPMSQEARLGIKPHIQRLLDQGILVPCQSPWNTPLLPVKKPGTNDYRPVQDLREVNKRVEDIHPTVPNPYNLLSGLPPSHQWYTVLDLKDAFFCLRLHPTSQPLFAFEWRDPEMGISGQLTWTRLPQGFKNSPTLFNEALHRDLADFRIQHPDLILLQYVDDLLLAATSELDCQQGTRALLQTLGNLGYRASAKKAQICQKQVKYLGYLLKEGQRWLTEARKETVMGQPTPKTPRQLREFLGTAGFCRLWIPGFAEMAAPLYPLTKPGTLFNWGPDQQKAYQEIKQALLTAPALGLPDLTKPFELFVDEKQGYAKGVLTQKLGPWRRPVAYLSKKLDPVAAGWPPCLRMVAAIAVLTKDAGKLTMGQPLVILAPHAVEALVKQPPDRWLSNARMTHYQALLLDTDRVQFGPVVALNPATLLPLPEEGLQHNCLDILAEAHGTRPDLTDQPLPDADHTWYTDGSSLLQEGQRKAGAAVTTETEVIWAKALPAGTSAQRAELIALTQALKMAEGKKLNVYTDSRYAFATAHIHGEIYRRRGWLTSEGKEIKNKDEILALLKALFLPKRLSIIHCPGHQKGHSAEARGNRMADQAARKAAITETPDTSTLLAGKRTADGSEFEKRTADGSEFESPKKKAKVE

SEQ ID NO: 2747 - protein, 2096 aa, synthetic construct
MPAAKRVKLDGGDKKYSIGLDIGTNSVGWAVITDEYKVPSKKFKVLGNTDRHSIKKNLIGALLFDSGETAEATRLKRTARRRYTRRKNRICYLQEIFSNEMAKVDDSFFHRLEESFLVEEDKKHERHPIFGNIVDEVAYHEKYPTIYHLRKKLVDSTDKADLRLIYLALAHMIKFRGHFLIEGDLNPDNSDVDKLFIQLVQTYNQLFEENPINASGVDAKAILSARLSKSRRLENLIAQLPGEKKNGLFGNLIALSLGLTPNFKSNFDLAEDAKLQLSKDTYDDDLDNLLAQIGDQYADLFLAAKNLSDAILLSDILRVNTEITKAPLSASMIKRYDEHHQDLTLLKALVRQQLPEKYKEIFFDQSKNGYAGYIDGGASQEEFYKFIKPILEKMDGTEELLVKLNREDLLRKQRTFDNGSIPHQIHLGELHAILRRQEDFYPFLKDNREKIEKILTFRIPYYVGPLARGNSRFAWMTRKSEETITPWNFEEVVDKGASAQSFIERMTNFDKNLPNEKVLPKHSLLYEYFTVYNELTKVKYVTEGMRKPAFLSGEQKKAIVDLLFKTNRKVTVKQLKEDYFKKIECFDSVEISGVEDRFNASLGTYHDLLKIIKDKDFLDNEENEDILEDIVLTLTLFEDREMIEERLKTYAHLFDDKVMKQLKRRRYTGWGRLSRKLINGIRDKQSGKTILDFLKSDGFANRNFMQLIHDDSLTFKEDIQKAQVSGQGDSLHEHIANLAGSPAIKKGILQTVKVVDELVKVMGRHKPENIVIEMARENQTTQKGQKNSRERMKRIEEGIKELGSQILKEHPVENTQLQNEKLYLYYLQNGRDMYVDQELDINRLSDYDVDHIVPQSFLKDDSIDNKVLTRSDKARGKSDNVPSEEVVKKMKNYWRQLLNAKLITQRKFDNLTKAERGGLSELDKAGFIKRQLVETRQITKHVAQILDSRMNTKYDENDKLIREVKVITLKSKLVSDFRKDFQFYKVREINNYHHAHDAYLNAVVGTALIKKYPKLESEFVYGDYKVYDVRKMIAKSEQEIGKATAKYFFYSNIMNFFKTEITLANGEIRKRPLIETNGETGEIVWDKGRDFATVRKVLSMPQVNIVKKTEVQTGGFSKESILPKRNSDKLIARKKDWDPKKYGGFDSPTVAYSVLVVAKVEKGKSKKLKSVKELLGITIMERSSFEKNPIDFLEAKGYKEVKKDLIIKLPKYSLFELENGRKRMLASAGELQKGNELALPSKYVNFLYLASHYEKLKGSPEDNEQKQLFVEQHKHYLDEIIEQISEFSKRVILADANLDKVLSAYNKHRDKPIREQAENIIHLFTLTNLGAPAAFKYFDTTIDRKRYTSTKEVLDATLIHQSITGLYETRIDLSQLGGDGGGGSGSSEAAAKGGTLNIEDEHRLHETSKEPDVSLGSTWLSDFPQAWAETGGMGLAVRQAPLIIPLKATSTPVSIKQYPMSQEARLGIKPHIQRLLDQGILVPCQSPWNTPLLPVKKPGTNDYRPVQDLREVNKRVEDIHPTVPNPYNLLSGLPPSHQWYTVLDLKDAFFCLRLHPTSQPLFAFEWRDPEMGISGQLTWTRLPQGFKNSPTLFNEALHRDLADFRIQHPDLILLQYVDDLLLAATSELDCQQGTRALLQTLGNLGYRASAKKAQICQKQVKYLGYLLKEGQRWLTEARKETVMGQPTPKTPRQLREFLGTAGFCRLWIPGFAEMAAPLYPLTKPGTLFNWGPDQQKAYQEIKQALLTAPALGLPDLTKPFELFVDEKQGYAKGVLTQKLGPWRRPVAYLSKKLDPVAAGWPPCLRMVAAIAVLTKDAGKLTMGQPLVILAPHAVEALVKQPPDRWLSNARMTHYQALLLDTDRVQFGPVVALNPATLLPLPEEGLQHNCLDILAEAHGTRPDLTDQPLPDADHTWYTDGSSLLQEGQRKAGAAVTTETEVIWAKALPAGTSAQRAELIALTQALKMAEGKKLNVYTDSRYAFATAHIHGEIYRRRGWLTSEGKEIKNKDEILALLKALFLPKRLSIIHCPGHQKGHSAEARGNRMADQAARKAAITETPDTSTLLAGKRTADGSEFEKRTADGSEFESPKKKAKVE

SEQ ID NO: 2748 - protein, 2096 aa, synthetic construct
MPAAKRVKLDGGDKKYSIGLDIGTNSVGWAVITDEYKVPSKKFKVLGNTDRHSIKKNLIGALLFDSGETAEATRLKRTARRRYTRRKNRICYLQEIFSNEMAKVDDSFFHRLEESFLVEEDKKHERHPIFGNIVDEVAYHEKYPTIYHLRKKLVDSTDKADLRLIYLALAHMIKFRGHFLIEGDLNPDNSDVDKLFIQLVQTYNQLFEENPINASGVDAKAILSARLSKSRRLENLIAQLPGEKKNGLFGNLIALSLGLTPNFKSNFDLAEDAKLQLSKDTYDDDLDNLLAQIGDQYADLFLAAKNLSDAILLSDILRVNTEITKAPLSASMIKRYDEHHQDLTLLKALVRQQLPEKYKEIFFDQSKNGYAGYIDGGASQEEFYKFIKPILEKMDGTEELLVKLNREDLLRKQRTFDNGSIPHQIHLGELHAILRRQEDFYPFLKDNREKIEKILTFRIPYYVGPLARGNSRFAWMTRKSEETITPWNFEEVVDKGASAQSFIERMTNFDKNLPNEKVLPKHSLLYEYFTVYNELTKVKYVTEGMRKPAFLSGEQKKAIVDLLFKTNRKVTVKQLKEDYFKKIECFDSVEISGVEDRFNASLGTYHDLLKIIKDKDFLDNEENEDILEDIVLTLTLFEDREMIEERLKTYAHLFDDKVMKQLKRRRYTGWGRLSRKLINGIRDKQSGKTILDFLKSDGFANRNFMQLIHDDSLTFKEDIQKAQVSGQGDSLHEHIANLAGSPAIKKGILQTVKVVDELVKVMGRHKPENIVIEMARENQTTQKGQKNSRERMKRIEEGIKELGSQILKEHPVENTQLQNEKLYLYYLQNGRDMYVDQELDINRLSDYDVDHIVPQSFLKDDSIDNKVLTRSDKARGKSDNVPSEEVVKKMKNYWRQLLNAKLITQRKFDNLTKAERGGLSELDKAGFIKRQLVETRQITKHVAQILDSRMNTKYDENDKLIREVKVITLKSKLVSDFRKDFQFYKVREINNYHHAHDAYLNAVVGTALIKKYPKLESEFVYGDYKVYDVRKMIAKSEQEIGKATAKYFFYSNIMNFFKTEITLANGEIRKRPLIETNGETGEIVWDKGRDFATVRKVLSMPQVNIVKKTEVQTGGFSKESILPKRNSDKLIARKKDWDPKKYGGFDSPTVAYSVLVVAKVEKGKSKKLKSVKELLGITIMERSSFEKNPIDFLEAKGYKEVKKDLIIKLPKYSLFELENGRKRMLASAGELQKGNELALPSKYVNFLYLASHYEKLKGSPEDNEQKQLFVEQHKHYLDEIIEQISEFSKRVILADANLDKVLSAYNKHRDKPIREQAENIIHLFTLTNLGAPAAFKYFDTTIDRKRYTSTKEVLDATLIHQSITGLYETRIDLSQLGGDGGPAPGSSEAAAKGGTLNIEDEHRLHETSKEPDVSLGSTWLSDFPQAWAETGGMGLAVRQAPLIIPLKATSTPVSIKQYPMSQEARLGIKPHIQRLLDQGILVPCQSPWNTPLLPVKKPGTNDYRPVQDLREVNKRVEDIHPTVPNPYNLLSGLPPSHQWYTVLDLKDAFFCLRLHPTSQPLFAFEWRDPEMGISGQLTWTRLPQGFKNSPTLFNEALHRDLADFRIQHPDLILLQYVDDLLLAATSELDCQQGTRALLQTLGNLGYRASAKKAQICQKQVKYLGYLLKEGQRWLTEARKETVMGQPTPKTPRQLREFLGTAGFCRLWIPGFAEMAAPLYPLTKPGTLFNWGPDQQKAYQEIKQALLTAPALGLPDLTKPFELFVDEKQGYAKGVLTQKLGPWRRPVAYLSKKLDPVAAGWPPCLRMVAAIAVLTKDAGKLTMGQPLVILAPHAVEALVKQPPDRWLSNARMTHYQALLLDTDRVQFGPVVALNPATLLPLPEEGLQHNCLDILAEAHGTRPDLTDQPLPDADHTWYTDGSSLLQEGQRKAGAAVTTETEVIWAKALPAGTSAQRAELIALTQALKMAEGKKLNVYTDSRYAFATAHIHGEIYRRRGWLTSEGKEIKNKDEILALLKALFLPKRLSIIHCPGHQKGHSAEARGNRMADQAARKAAITETPDTSTLLAGKRTADGSEFEKRTADGSEFESPKKKAKVE

SEQ ID NO: 2749 - protein, 2095 aa, synthetic construct
MPAAKRVKLDGGDKKYSIGLDIGTNSVGWAVITDEYKVPSKKFKVLGNTDRHSIKKNLIGALLFDSGETAEATRLKRTARRRYTRRKNRICYLQEIFSNEMAKVDDSFFHRLEESFLVEEDKKHERHPIFGNIVDEVAYHEKYPTIYHLRKKLVDSTDKADLRLIYLALAHMIKFRGHFLIEGDLNPDNSDVDKLFIQLVQTYNQLFEENPINASGVDAKAILSARLSKSRRLENLIAQLPGEKKNGLFGNLIALSLGLTPNFKSNFDLAEDAKLQLSKDTYDDDLDNLLAQIGDQYADLFLAAKNLSDAILLSDILRVNTEITKAPLSASMIKRYDEHHQDLTLLKALVRQQLPEKYKEIFFDQSKNGYAGYIDGGASQEEFYKFIKPILEKMDGTEELLVKLNREDLLRKQRTFDNGSIPHQIHLGELHAILRRQEDFYPFLKDNREKIEKILTFRIPYYVGPLARGNSRFAWMTRKSEETITPWNFEEVVDKGASAQSFIERMTNFDKNLPNEKVLPKHSLLYEYFTVYNELTKVKYVTEGMRKPAFLSGEQKKAIVDLLFKTNRKVTVKQLKEDYFKKIECFDSVEISGVEDRFNASLGTYHDLLKIIKDKDFLDNEENEDILEDIVLTLTLFEDREMIEERLKTYAHLFDDKVMKQLKRRRYTGWGRLSRKLINGIRDKQSGKTILDFLKSDGFANRNFMQLIHDDSLTFKEDIQKAQVSGQGDSLHEHIANLAGSPAIKKGILQTVKVVDELVKVMGRHKPENIVIEMARENQTTQKGQKNSRERMKRIEEGIKELGSQILKEHPVENTQLQNEKLYLYYLQNGRDMYVDQELDINRLSDYDVDHIVPQSFLKDDSIDNKVLTRSDKARGKSDNVPSEEVVKKMKNYWRQLLNAKLITQRKFDNLTKAERGGLSELDKAGFIKRQLVETRQITKHVAQILDSRMNTKYDENDKLIREVKVITLKSKLVSDFRKDFQFYKVREINNYHHAHDAYLNAVVGTALIKKYPKLESEFVYGDYKVYDVRKMIAKSEQEIGKATAKYFFYSNIMNFFKTEITLANGEIRKRPLIETNGETGEIVWDKGRDFATVRKVLSMPQVNIVKKTEVQTGGFSKESILPKRNSDKLIARKKDWDPKKYGGFDSPTVAYSVLVVAKVEKGKSKKLKSVKELLGITIMERSSFEKNPIDFLEAKGYKEVKKDLIIKLPKYSLFELENGRKRMLASAGELQKGNELALPSKYVNFLYLASHYEKLKGSPEDNEQKQLFVEQHKHYLDEIIEQISEFSKRVILADANLDKVLSAYNKHRDKPIREQAENIIHLFTLTNLGAPAAFKYFDTTIDRKRYTSTKEVLDATLIHQSITGLYETRIDLSQLGGDGGGGGGSGGGGSGGTLNIEDEHRLHETSKEPDVSLGSTWLSDFPQAWAETGGMGLAVRQAPLIIPLKATSTPVSIKQYPMSQEARLGIKPHIQRLLDQGILVPCQSPWNTPLLPVKKPGTNDYRPVQDLREVNKRVEDIHPTVPNPYNLLSGLPPSHQWYTVLDLKDAFFCLRLHPTSQPLFAFEWRDPEMGISGQLTWTRLPQGFKNSPTLFNEALHRDLADFRIQHPDLILLQYVDDLLLAATSELDCQQGTRALLQTLGNLGYRASAKKAQICQKQVKYLGYLLKEGQRWLTEARKETVMGQPTPKTPRQLREFLGTAGFCRLWIPGFAEMAAPLYPLTKPGTLFNWGPDQQKAYQEIKQALLTAPALGLPDLTKPFELFVDEKQGYAKGVLTQKLGPWRRPVAYLSKKLDPVAAGWPPCLRMVAAIAVLTKDAGKLTMGQPLVILAPHAVEALVKQPPDRWLSNARMTHYQALLLDTDRVQFGPVVALNPATLLPLPEEGLQHNCLDILAEAHGTRPDLTDQPLPDADHTWYTDGSSLLQEGQRKAGAAVTTETEVIWAKALPAGTSAQRAELIALTQALKMAEGKKLNVYTDSRYAFATAHIHGEIYRRRGWLTSEGKEIKNKDEILALLKALFLPKRLSIIHCPGHQKGHSAEARGNRMADQAARKAAITETPDTSTLLAGKRTADGSEFEKRTADGSEFESPKKKAKVE

SEQ ID NO: 2750 - protein, 2091 aa, synthetic construct
MPAAKRVKLDGGDKKYSIGLDIGTNSVGWAVITDEYKVPSKKFKVLGNTDRHSIKKNLIGALLFDSGETAEATRLKRTARRRYTRRKNRICYLQEIFSNEMAKVDDSFFHRLEESFLVEEDKKHERHPIFGNIVDEVAYHEKYPTIYHLRKKLVDSTDKADLRLIYLALAHMIKFRGHFLIEGDLNPDNSDVDKLFIQLVQTYNQLFEENPINASGVDAKAILSARLSKSRRLENLIAQLPGEKKNGLFGNLIALSLGLTPNFKSNFDLAEDAKLQLSKDTYDDDLDNLLAQIGDQYADLFLAAKNLSDAILLSDILRVNTEITKAPLSASMIKRYDEHHQDLTLLKALVRQQLPEKYKEIFFDQSKNGYAGYIDGGASQEEFYKFIKPILEKMDGTEELLVKLNREDLLRKQRTFDNGSIPHQIHLGELHAILRRQEDFYPFLKDNREKIEKILTFRIPYYVGPLARGNSRFAWMTRKSEETITPWNFEEVVDKGASAQSFIERMTNFDKNLPNEKVLPKHSLLYEYFTVYNELTKVKYVTEGMRKPAFLSGEQKKAIVDLLFKTNRKVTVKQLKEDYFKKIECFDSVEISGVEDRFNASLGTYHDLLKIIKDKDFLDNEENEDILEDIVLTLTLFEDREMIEERLKTYAHLFDDKVMKQLKRRRYTGWGRLSRKLINGIRDKQSGKTILDFLKSDGFANRNFMQLIHDDSLTFKEDIQKAQVSGQGDSLHEHIANLAGSPAIKKGILQTVKVVDELVKVMGRHKPENIVIEMARENQTTQKGQKNSRERMKRIEEGIKELGSQILKEHPVENTQLQNEKLYLYYLQNGRDMYVDQELDINRLSDYDVDHIVPQSFLKDDSIDNKVLTRSDKARGKSDNVPSEEVVKKMKNYWRQLLNAKLITQRKFDNLTKAERGGLSELDKAGFIKRQLVETRQITKHVAQILDSRMNTKYDENDKLIREVKVITLKSKLVSDFRKDFQFYKVREINNYHHAHDAYLNAVVGTALIKKYPKLESEFVYGDYKVYDVRKMIAKSEQEIGKATAKYFFYSNIMNFFKTEITLANGEIRKRPLIETNGETGEIVWDKGRDFATVRKVLSMPQVNIVKKTEVQTGGFSKESILPKRNSDKLIARKKDWDPKKYGGFDSPTVAYSVLVVAKVEKGKSKKLKSVKELLGITIMERSSFEKNPIDFLEAKGYKEVKKDLIIKLPKYSLFELENGRKRMLASAGELQKGNELALPSKYVNFLYLASHYEKLKGSPEDNEQKQLFVEQHKHYLDEIIEQISEFSKRVILADANLDKVLSAYNKHRDKPIREQAENIIHLFTLTNLGAPAAFKYFDTTIDRKRYTSTKEVLDATLIHQSITGLYETRIDLSQLGGDGGGSSPAPGGTLNIEDEHRLHETSKEPDVSLGSTWLSDFPQAWAETGGMGLAVRQAPLIIPLKATSTPVSIKQYPMSQEARLGIKPHIQRLLDQGILVPCQSPWNTPLLPVKKPGTNDYRPVQDLREVNKRVEDIHPTVPNPYNLLSGLPPSHQWYTVLDLKDAFFCLRLHPTSQPLFAFEWRDPEMGISGQLTWTRLPQGFKNSPTLFNEALHRDLADFRIQHPDLILLQYVDDLLLAATSELDCQQGTRALLQTLGNLGYRASAKKAQICQKQVKYLGYLLKEGQRWLTEARKETVMGQPTPKTPRQLREFLGTAGFCRLWIPGFAEMAAPLYPLTKPGTLFNWGPDQQKAYQEIKQALLTAPALGLPDLTKPFELFVDEKQGYAKGVLTQKLGPWRRPVAYLSKKLDPVAAGWPPCLRMVAAIAVLTKDAGKLTMGQPLVILAPHAVEALVKQPPDRWLSNARMTHYQALLLDTDRVQFGPVVALNPATLLPLPEEGLQHNCLDILAEAHGTRPDLTDQPLPDADHTWYTDGSSLLQEGQRKAGAAVTTETEVIWAKALPAGTSAQRAELIALTQALKMAEGKKLNVYTDSRYAFATAHIHGEIYRRRGWLTSEGKEIKNKDEILALLKALFLPKRLSIIHCPGHQKGHSAEARGNRMADQAARKAAITETPDTSTLLAGKRTADGSEFEKRTADGSEFESPKKKAKVE

SEQ ID NO: 2751 - protein, 2096 aa, synthetic construct
MPAAKRVKLDGGDKKYSIGLDIGTNSVGWAVITDEYKVPSKKFKVLGNTDRHSIKKNLIGALLFDSGETAEATRLKRTARRRYTRRKNRICYLQEIFSNEMAKVDDSFFHRLEESFLVEEDKKHERHPIFGNIVDEVAYHEKYPTIYHLRKKLVDSTDKADLRLIYLALAHMIKFRGHFLIEGDLNPDNSDVDKLFIQLVQTYNQLFEENPINASGVDAKAILSARLSKSRRLENLIAQLPGEKKNGLFGNLIALSLGLTPNFKSNFDLAEDAKLQLSKDTYDDDLDNLLAQIGDQYADLFLAAKNLSDAILLSDILRVNTEITKAPLSASMIKRYDEHHQDLTLLKALVRQQLPEKYKEIFFDQSKNGYAGYIDGGASQEEFYKFIKPILEKMDGTEELLVKLNREDLLRKQRTFDNGSIPHQIHLGELHAILRRQEDFYPFLKDNREKIEKILTFRIPYYVGPLARGNSRFAWMTRKSEETITPWNFEEVVDKGASAQSFIERMTNFDKNLPNEKVLPKHSLLYEYFTVYNELTKVKYVTEGMRKPAFLSGEQKKAIVDLLFKTNRKVTVKQLKEDYFKKIECFDSVEISGVEDRFNASLGTYHDLLKIIKDKDFLDNEENEDILEDIVLTLTLFEDREMIEERLKTYAHLFDDKVMKQLKRRRYTGWGRLSRKLINGIRDKQSGKTILDFLKSDGFANRNFMQLIHDDSLTFKEDIQKAQVSGQGDSLHEHIANLAGSPAIKKGILQTVKVVDELVKVMGRHKPENIVIEMARENQTTQKGQKNSRERMKRIEEGIKELGSQILKEHPVENTQLQNEKLYLYYLQNGRDMYVDQELDINRLSDYDVDHIVPQSFLKDDSIDNKVLTRSDKARGKSDNVPSEEVVKKMKNYWRQLLNAKLITQRKFDNLTKAERGGLSELDKAGFIKRQLVETRQITKHVAQILDSRMNTKYDENDKLIREVKVITLKSKLVSDFRKDFQFYKVREINNYHHAHDAYLNAVVGTALIKKYPKLESEFVYGDYKVYDVRKMIAKSEQEIGKATAKYFFYSNIMNFFKTEITLANGEIRKRPLIETNGETGEIVWDKGRDFATVRKVLSMPQVNIVKKTEVQTGGFSKESILPKRNSDKLIARKKDWDPKKYGGFDSPTVAYSVLVVAKVEKGKSKKLKSVKELLGITIMERSSFEKNPIDFLEAKGYKEVKKDLIIKLPKYSLFELENGRKRMLASAGELQKGNELALPSKYVNFLYLASHYEKLKGSPEDNEQKQLFVEQHKHYLDEIIEQISEFSKRVILADANLDKVLSAYNKHRDKPIREQAENIIHLFTLTNLGAPAAFKYFDTTIDRKRYTSTKEVLDATLIHQSITGLYETRIDLSQLGGDGGGGSGGGEAAAKGGTLNIEDEHRLHETSKEPDVSLGSTWLSDFPQAWAETGGMGLAVRQAPLIIPLKATSTPVSIKQYPMSQEARLGIKPHIQRLLDQGILVPCQSPWNTPLLPVKKPGTNDYRPVQDLREVNKRVEDIHPTVPNPYNLLSGLPPSHQWYTVLDLKDAFFCLRLHPTSQPLFAFEWRDPEMGISGQLTWTRLPQGFKNSPTLFNEALHRDLADFRIQHPDLILLQYVDDLLLAATSELDCQQGTRALLQTLGNLGYRASAKKAQICQKQVKYLGYLLKEGQRWLTEARKETVMGQPTPKTPRQLREFLGTAGFCRLWIPGFAEMAAPLYPLTKPGTLFNWGPDQQKAYQEIKQALLTAPALGLPDLTKPFELFVDEKQGYAKGVLTQKLGPWRRPVAYLSKKLDPVAAGWPPCLRMVAAIAVLTKDAGKLTMGQPLVILAPHAVEALVKQPPDRWLSNARMTHYQALLLDTDRVQFGPVVALNPATLLPLPEEGLQHNCLDILAEAHGTRPDLTDQPLPDADHTWYTDGSSLLQEGQRKAGAAVTTETEVIWAKALPAGTSAQRAELIALTQALKMAEGKKLNVYTDSRYAFATAHIHGEIYRRRGWLTSEGKEIKNKDEILALLKALFLPKRLSIIHCPGHQKGHSAEARGNRMADQAARKAAITETPDTSTLLAGKRTADGSEFEKRTADGSEFESPKKKAKVE

SEQ ID NO: 2752 - protein, 2094 aa, synthetic construct
MPAAKRVKLDGGDKKYSIGLDIGTNSVGWAVITDEYKVPSKKFKVLGNTDRHSIKKNLIGALLFDSGETAEATRLKRTARRRYTRRKNRICYLQEIFSNEMAKVDDSFFHRLEESFLVEEDKKHERHPIFGNIVDEVAYHEKYPTIYHLRKKLVDSTDKADLRLIYLALAHMIKFRGHFLIEGDLNPDNSDVDKLFIQLVQTYNQLFEENPINASGVDAKAILSARLSKSRRLENLIAQLPGEKKNGLFGNLIALSLGLTPNFKSNFDLAEDAKLQLSKDTYDDDLDNLLAQIGDQYADLFLAAKNLSDAILLSDILRVNTEITKAPLSASMIKRYDEHHQDLTLLKALVRQQLPEKYKEIFFDQSKNGYAGYIDGGASQEEFYKFIKPILEKMDGTEELLVKLNREDLLRKQRTFDNGSIPHQIHLGELHAILRRQEDFYPFLKDNREKIEKILTFRIPYYVGPLARGNSRFAWMTRKSEETITPWNFEEVVDKGASAQSFIERMTNFDKNLPNEKVLPKHSLLYEYFTVYNELTKVKYVTEGMRKPAFLSGEQKKAIVDLLFKTNRKVTVKQLKEDYFKKIECFDSVEISGVEDRFNASLGTYHDLLKIIKDKDFLDNEENEDILEDIVLTLTLFEDREMIEERLKTYAHLFDDKVMKQLKRRRYTGWGRLSRKLINGIRDKQSGKTILDFLKSDGFANRNFMQLIHDDSLTFKEDIQKAQVSGQGDSLHEHIANLAGSPAIKKGILQTVKVVDELVKVMGRHKPENIVIEMARENQTTQKGQKNSRERMKRIEEGIKELGSQILKEHPVENTQLQNEKLYLYYLQNGRDMYVDQELDINRLSDYDVDHIVPQSFLKDDSIDNKVLTRSDKARGKSDNVPSEEVVKKMKNYWRQLLNAKLITQRKFDNLTKAERGGLSELDKAGFIKRQLVETRQITKHVAQILDSRMNTKYDENDKLIREVKVITLKSKLVSDFRKDFQFYKVREINNYHHAHDAYLNAVVGTALIKKYPKLESEFVYGDYKVYDVRKMIAKSEQEIGKATAKYFFYSNIMNFFKTEITLANGEIRKRPLIETNGETGEIVWDKGRDFATVRKVLSMPQVNIVKKTEVQTGGFSKESILPKRNSDKLIARKKDWDPKKYGGFDSPTVAYSVLVVAKVEKGKSKKLKSVKELLGITIMERSSFEKNPIDFLEAKGYKEVKKDLIIKLPKYSLFELENGRKRMLASAGELQKGNELALPSKYVNFLYLASHYEKLKGSPEDNEQKQLFVEQHKHYLDEIIEQISEFSKRVILADANLDKVLSAYNKHRDKPIREQAENIIHLFTLTNLGAPAAFKYFDTTIDRKRYTSTKEVLDATLIHQSITGLYETRIDLSQLGGDGGGGSPAPGSSGGTLNIEDEHRLHETSKEPDVSLGSTWLSDFPQAWAETGGMGLAVRQAPLIIPLKATSTPVSIKQYPMSQEARLGIKPHIQRLLDQGILVPCQSPWNTPLLPVKKPGTNDYRPVQDLREVNKRVEDIHPTVPNPYNLLSGLPPSHQWYTVLDLKDAFFCLRLHPTSQPLFAFEWRDPEMGISGQLTWTRLPQGFKNSPTLFNEALHRDLADFRIQHPDLILLQYVDDLLLAATSELDCQQGTRALLQTLGNLGYRASAKKAQICQKQVKYLGYLLKEGQRWLTEARKETVMGQPTPKTPRQLREFLGTAGFCRLWIPGFAEMAAPLYPLTKPGTLFNWGPDQQKAYQEIKQALLTAPALGLPDLTKPFELFVDEKQGYAKGVLTQKLGPWRRPVAYLSKKLDPVAAGWPPCLRMVAAIAVLTKDAGKLTMGQPLVILAPHAVEALVKQPPDRWLSNARMTHYQALLLDTDRVQFGPVVALNPATLLPLPEEGLQHNCLDILAEAHGTRPDLTDQPLPDADHTWYTDGSSLLQEGQRKAGAAVTTETEVIWAKALPAGTSAQRAELIALTQALKMAEGKKLNVYTDSRYAFATAHIHGEIYRRRGWLTSEGKEIKNKDEILALLKALFLPKRLSIIHCPGHQKGHSAEARGNRMADQAARKAAITETPDTSTLLAGKRTADGSEFEKRTADGSEFESPKKKAKVE

SEQ ID NO: 2753 - protein, 2096 aa, synthetic construct
MPAAKRVKLDGGDKKYSIGLDIGTNSVGWAVITDEYKVPSKKFKVLGNTDRHSIKKNLIGALLFDSGETAEATRLKRTARRRYTRRKNRICYLQEIFSNEMAKVDDSFFHRLEESFLVEEDKKHERHPIFGNIVDEVAYHEKYPTIYHLRKKLVDSTDKADLRLIYLALAHMIKFRGHFLIEGDLNPDNSDVDKLFIQLVQTYNQLFEENPINASGVDAKAILSARLSKSRRLENLIAQLPGEKKNGLFGNLIALSLGLTPNFKSNFDLAEDAKLQLSKDTYDDDLDNLLAQIGDQYADLFLAAKNLSDAILLSDILRVNTEITKAPLSASMIKRYDEHHQDLTLLKALVRQQLPEKYKEIFFDQSKNGYAGYIDGGASQEEFYKFIKPILEKMDGTEELLVKLNREDLLRKQRTFDNGSIPHQIHLGELHAILRRQEDFYPFLKDNREKIEKILTFRIPYYVGPLARGNSRFAWMTRKSEETITPWNFEEVVDKGASAQSFIERMTNFDKNLPNEKVLPKHSLLYEYFTVYNELTKVKYVTEGMRKPAFLSGEQKKAIVDLLFKTNRKVTVKQLKEDYFKKIECFDSVEISGVEDRFNASLGTYHDLLKIIKDKDFLDNEENEDILEDIVLTLTLFEDREMIEERLKTYAHLFDDKVMKQLKRRRYTGWGRLSRKLINGIRDKQSGKTILDFLKSDGFANRNFMQLIHDDSLTFKEDIQKAQVSGQGDSLHEHIANLAGSPAIKKGILQTVKVVDELVKVMGRHKPENIVIEMARENQTTQKGQKNSRERMKRIEEGIKELGSQILKEHPVENTQLQNEKLYLYYLQNGRDMYVDQELDINRLSDYDVDHIVPQSFLKDDSIDNKVLTRSDKARGKSDNVPSEEVVKKMKNYWRQLLNAKLITQRKFDNLTKAERGGLSELDKAGFIKRQLVETRQITKHVAQILDSRMNTKYDENDKLIREVKVITLKSKLVSDFRKDFQFYKVREINNYHHAHDAYLNAVVGTALIKKYPKLESEFVYGDYKVYDVRKMIAKSEQEIGKATAKYFFYSNIMNFFKTEITLANGEIRKRPLIETNGETGEIVWDKGRDFATVRKVLSMPQVNIVKKTEVQTGGFSKESILPKRNSDKLIARKKDWDPKKYGGFDSPTVAYSVLVVAKVEKGKSKKLKSVKELLGITIMERSSFEKNPIDFLEAKGYKEVKKDLIIKLPKYSLFELENGRKRMLASAGELQKGNELALPSKYVNFLYLASHYEKLKGSPEDNEQKQLFVEQHKHYLDEIIEQISEFSKRVILADANLDKVLSAYNKHRDKPIREQAENIIHLFTLTNLGAPAAFKYFDTTIDRKRYTSTKEVLDATLIHQSITGLYETRIDLSQLGGDGGPAPGGSEAAAKGGTLNIEDEHRLHETSKEPDVSLGSTWLSDFPQAWAETGGMGLAVRQAPLIIPLKATSTPVSIKQYPMSQEARLGIKPHIQRLLDQGILVPCQSPWNTPLLPVKKPGTNDYRPVQDLREVNKRVEDIHPTVPNPYNLLSGLPPSHQWYTVLDLKDAFFCLRLHPTSQPLFAFEWRDPEMGISGQLTWTRLPQGFKNSPTLFNEALHRDLADFRIQHPDLILLQYVDDLLLAATSELDCQQGTRALLQTLGNLGYRASAKKAQICQKQVKYLGYLLKEGQRWLTEARKETVMGQPTPKTPRQLREFLGTAGFCRLWIPGFAEMAAPLYPLTKPGTLFNWGPDQQKAYQEIKQALLTAPALGLPDLTKPFELFVDEKQGYAKGVLTQKLGPWRRPVAYLSKKLDPVAAGWPPCLRMVAAIAVLTKDAGKLTMGQPLVILAPHAVEALVKQPPDRWLSNARMTHYQALLLDTDRVQFGPVVALNPATLLPLPEEGLQHNCLDILAEAHGTRPDLTDQPLPDADHTWYTDGSSLLQEGQRKAGAAVTTETEVIWAKALPAGTSAQRAELIALTQALKMAEGKKLNVYTDSRYAFATAHIHGEIYRRRGWLTSEGKEIKNKDEILALLKALFLPKRLSIIHCPGHQKGHSAEARGNRMADQAARKAAITETPDTSTLLAGKRTADGSEFEKRTADGSEFESPKKKAKVE

SEQ ID NO: 2754 - protein, 2090 aa, synthetic construct
MPAAKRVKLDGGDKKYSIGLDIGTNSVGWAVITDEYKVPSKKFKVLGNTDRHSIKKNLIGALLFDSGETAEATRLKRTARRRYTRRKNRICYLQEIFSNEMAKVDDSFFHRLEESFLVEEDKKHERHPIFGNIVDEVAYHEKYPTIYHLRKKLVDSTDKADLRLIYLALAHMIKFRGHFLIEGDLNPDNSDVDKLFIQLVQTYNQLFEENPINASGVDAKAILSARLSKSRRLENLIAQLPGEKKNGLFGNLIALSLGLTPNFKSNFDLAEDAKLQLSKDTYDDDLDNLLAQIGDQYADLFLAAKNLSDAILLSDILRVNTEITKAPLSASMIKRYDEHHQDLTLLKALVRQQLPEKYKEIFFDQSKNGYAGYIDGGASQEEFYKFIKPILEKMDGTEELLVKLNREDLLRKQRTFDNGSIPHQIHLGELHAILRRQEDFYPFLKDNREKIEKILTFRIPYYVGPLARGNSRFAWMTRKSEETITPWNFEEVVDKGASAQSFIERMTNFDKNLPNEKVLPKHSLLYEYFTVYNELTKVKYVTEGMRKPAFLSGEQKKAIVDLLFKTNRKVTVKQLKEDYFKKIECFDSVEISGVEDRFNASLGTYHDLLKIIKDKDFLDNEENEDILEDIVLTLTLFEDREMIEERLKTYAHLFDDKVMKQLKRRRYTGWGRLSRKLINGIRDKQSGKTILDFLKSDGFANRNFMQLIHDDSLTFKEDIQKAQVSGQGDSLHEHIANLAGSPAIKKGILQTVKVVDELVKVMGRHKPENIVIEMARENQTTQKGQKNSRERMKRIEEGIKELGSQILKEHPVENTQLQNEKLYLYYLQNGRDMYVDQELDINRLSDYDVDHIVPQSFLKDDSIDNKVLTRSDKARGKSDNVPSEEVVKKMKNYWRQLLNAKLITQRKFDNLTKAERGGLSELDKAGFIKRQLVETRQITKHVAQILDSRMNTKYDENDKLIREVKVITLKSKLVSDFRKDFQFYKVREINNYHHAHDAYLNAVVGTALIKKYPKLESEFVYGDYKVYDVRKMIAKSEQEIGKATAKYFFYSNIMNFFKTEITLANGEIRKRPLIETNGETGEIVWDKGRDFATVRKVLSMPQVNIVKKTEVQTGGFSKESILPKRNSDKLIARKKDWDPKKYGGFDSPTVAYSVLVVAKVEKGKSKKLKSVKELLGITIMERSSFEKNPIDFLEAKGYKEVKKDLIIKLPKYSLFELENGRKRMLASAGELQKGNELALPSKYVNFLYLASHYEKLKGSPEDNEQKQLFVEQHKHYLDEIIEQISEFSKRVILADANLDKVLSAYNKHRDKPIREQAENIIHLFTLTNLGAPAAFKYFDTTIDRKRYTSTKEVLDATLIHQSITGLYETRIDLSQLGGDGGGGGGSGGTLNIEDEHRLHETSKEPDVSLGSTWLSDFPQAWAETGGMGLAVRQAPLIIPLKATSTPVSIKQYPMSQEARLGIKPHIQRLLDQGILVPCQSPWNTPLLPVKKPGTNDYRPVQDLREVNKRVEDIHPTVPNPYNLLSGLPPSHQWYTVLDLKDAFFCLRLHPTSQPLFAFEWRDPEMGISGQLTWTRLPQGFKNSPTLFNEALHRDLADFRIQHPDLILLQYVDDLLLAATSELDCQQGTRALLQTLGNLGYRASAKKAQICQKQVKYLGYLLKEGQRWLTEARKETVMGQPTPKTPRQLREFLGTAGFCRLWIPGFAEMAAPLYPLTKPGTLFNWGPDQQKAYQEIKQALLTAPALGLPDLTKPFELFVDEKQGYAKGVLTQKLGPWRRPVAYLSKKLDPVAAGWPPCLRMVAAIAVLTKDAGKLTMGQPLVILAPHAVEALVKQPPDRWLSNARMTHYQALLLDTDRVQFGPVVALNPATLLPLPEEGLQHNCLDILAEAHGTRPDLTDQPLPDADHTWYTDGSSLLQEGQRKAGAAVTTETEVIWAKALPAGTSAQRAELIALTQALKMAEGKKLNVYTDSRYAFATAHIHGEIYRRRGWLTSEGKEIKNKDEILALLKALFLPKRLSIIHCPGHQKGHSAEARGNRMADQAARKAAITETPDTSTLLAGKRTADGSEFEKRTADGSEFESPKKKAKVE

SEQ ID NO: 2755 - protein, 2096 aa, synthetic construct
MPAAKRVKLDGGDKKYSIGLDIGTNSVGWAVITDEYKVPSKKFKVLGNTDRHSIKKNLIGALLFDSGETAEATRLKRTARRRYTRRKNRICYLQEIFSNEMAKVDDSFFHRLEESFLVEEDKKHERHPIFGNIVDEVAYHEKYPTIYHLRKKLVDSTDKADLRLIYLALAHMIKFRGHFLIEGDLNPDNSDVDKLFIQLVQTYNQLFEENPINASGVDAKAILSARLSKSRRLENLIAQLPGEKKNGLFGNLIALSLGLTPNFKSNFDLAEDAKLQLSKDTYDDDLDNLLAQIGDQYADLFLAAKNLSDAILLSDILRVNTEITKAPLSASMIKRYDEHHQDLTLLKALVRQQLPEKYKEIFFDQSKNGYAGYIDGGASQEEFYKFIKPILEKMDGTEELLVKLNREDLLRKQRTFDNGSIPHQIHLGELHAILRRQEDFYPFLKDNREKIEKILTFRIPYYVGPLARGNSRFAWMTRKSEETITPWNFEEVVDKGASAQSFIERMTNFDKNLPNEKVLPKHSLLYEYFTVYNELTKVKYVTEGMRKPAFLSGEQKKAIVDLLFKTNRKVTVKQLKEDYFKKIECFDSVEISGVEDRFNASLGTYHDLLKIIKDKDFLDNEENEDILEDIVLTLTLFEDREMIEERLKTYAHLFDDKVMKQLKRRRYTGWGRLSRKLINGIRDKQSGKTILDFLKSDGFANRNFMQLIHDDSLTFKEDIQKAQVSGQGDSLHEHIANLAGSPAIKKGILQTVKVVDELVKVMGRHKPENIVIEMARENQTTQKGQKNSRERMKRIEEGIKELGSQILKEHPVENTQLQNEKLYLYYLQNGRDMYVDQELDINRLSDYDVDHIVPQSFLKDDSIDNKVLTRSDKARGKSDNVPSEEVVKKMKNYWRQLLNAKLITQRKFDNLTKAERGGLSELDKAGFIKRQLVETRQITKHVAQILDSRMNTKYDENDKLIREVKVITLKSKLVSDFRKDFQFYKVREINNYHHAHDAYLNAVVGTALIKKYPKLESEFVYGDYKVYDVRKMIAKSEQEIGKATAKYFFYSNIMNFFKTEITLANGEIRKRPLIETNGETGEIVWDKGRDFATVRKVLSMPQVNIVKKTEVQTGGFSKESILPKRNSDKLIARKKDWDPKKYGGFDSPTVAYSVLVVAKVEKGKSKKLKSVKELLGITIMERSSFEKNPIDFLEAKGYKEVKKDLIIKLPKYSLFELENGRKRMLASAGELQKGNELALPSKYVNFLYLASHYEKLKGSPEDNEQKQLFVEQHKHYLDEIIEQISEFSKRVILADANLDKVLSAYNKHRDKPIREQAENIIHLFTLTNLGAPAAFKYFDTTIDRKRYTSTKEVLDATLIHQSITGLYETRIDLSQLGGDGGEAAAKGGSPAPGGTLNIEDEHRLHETSKEPDVSLGSTWLSDFPQAWAETGGMGLAVRQAPLIIPLKATSTPVSIKQYPMSQEARLGIKPHIQRLLDQGILVPCQSPWNTPLLPVKKPGTNDYRPVQDLREVNKRVEDIHPTVPNPYNLLSGLPPSHQWYTVLDLKDAFFCLRLHPTSQPLFAFEWRDPEMGISGQLTWTRLPQGFKNSPTLFNEALHRDLADFRIQHPDLILLQYVDDLLLAATSELDCQQGTRALLQTLGNLGYRASAKKAQICQKQVKYLGYLLKEGQRWLTEARKETVMGQPTPKTPRQLREFLGTAGFCRLWIPGFAEMAAPLYPLTKPGTLFNWGPDQQKAYQEIKQALLTAPALGLPDLTKPFELFVDEKQGYAKGVLTQKLGPWRRPVAYLSKKLDPVAAGWPPCLRMVAAIAVLTKDAGKLTMGQPLVILAPHAVEALVKQPPDRWLSNARMTHYQALLLDTDRVQFGPVVALNPATLLPLPEEGLQHNCLDILAEAHGTRPDLTDQPLPDADHTWYTDGSSLLQEGQRKAGAAVTTETEVIWAKALPAGTSAQRAELIALTQALKMAEGKKLNVYTDSRYAFATAHIHGEIYRRRGWLTSEGKEIKNKDEILALLKALFLPKRLSIIHCPGHQKGHSAEARGNRMADQAARKAAITETPDTSTLLAGKRTADGSEFEKRTADGSEFESPKKKAKVE

SEQ ID NO: 2756 - protein, 2096 aa, synthetic construct
MPAAKRVKLDGGDKKYSIGLDIGTNSVGWAVITDEYKVPSKKFKVLGNTDRHSIKKNLIGALLFDSGETAEATRLKRTARRRYTRRKNRICYLQEIFSNEMAKVDDSFFHRLEESFLVEEDKKHERHPIFGNIVDEVAYHEKYPTIYHLRKKLVDSTDKADLRLIYLALAHMIKFRGHFLIEGDLNPDNSDVDKLFIQLVQTYNQLFEENPINASGVDAKAILSARLSKSRRLENLIAQLPGEKKNGLFGNLIALSLGLTPNFKSNFDLAEDAKLQLSKDTYDDDLDNLLAQIGDQYADLFLAAKNLSDAILLSDILRVNTEITKAPLSASMIKRYDEHHQDLTLLKALVRQQLPEKYKEIFFDQSKNGYAGYIDGGASQEEFYKFIKPILEKMDGTEELLVKLNREDLLRKQRTFDNGSIPHQIHLGELHAILRRQEDFYPFLKDNREKIEKILTFRIPYYVGPLARGNSRFAWMTRKSEETITPWNFEEVVDKGASAQSFIERMTNFDKNLPNEKVLPKHSLLYEYFTVYNELTKVKYVTEGMRKPAFLSGEQKKAIVDLLFKTNRKVTVKQLKEDYFKKIECFDSVEISGVEDRFNASLGTYHDLLKIIKDKDFLDNEENEDILEDIVLTLTLFEDREMIEERLKTYAHLFDDKVMKQLKRRRYTGWGRLSRKLINGIRDKQSGKTILDFLKSDGFANRNFMQLIHDDSLTFKEDIQKAQVSGQGDSLHEHIANLAGSPAIKKGILQTVKVVDELVKVMGRHKPENIVIEMARENQTTQKGQKNSRERMKRIEEGIKELGSQILKEHPVENTQLQNEKLYLYYLQNGRDMYVDQELDINRLSDYDVDHIVPQSFLKDDSIDNKVLTRSDKARGKSDNVPSEEVVKKMKNYWRQLLNAKLITQRKFDNLTKAERGGLSELDKAGFIKRQLVETRQITKHVAQILDSRMNTKYDENDKLIREVKVITLKSKLVSDFRKDFQFYKVREINNYHHAHDAYLNAVVGTALIKKYPKLESEFVYGDYKVYDVRKMIAKSEQEIGKATAKYFFYSNIMNFFKTEITLANGEIRKRPLIETNGETGEIVWDKGRDFATVRKVLSMPQVNIVKKTEVQTGGFSKESILPKRNSDKLIARKKDWDPKKYGGFDSPTVAYSVLVVAKVEKGKSKKLKSVKELLGITIMERSSFEKNPIDFLEAKGYKEVKKDLIIKLPKYSLFELENGRKRMLASAGELQKGNELALPSKYVNFLYLASHYEKLKGSPEDNEQKQLFVEQHKHYLDEIIEQISEFSKRVILADANLDKVLSAYNKHRDKPIREQAENIIHLFTLTNLGAPAAFKYFDTTIDRKRYTSTKEVLDATLIHQSITGLYETRIDLSQLGGDGGPAPEAAAKGGSGGTLNIEDEHRLHETSKEPDVSLGSTWLSDFPQAWAETGGMGLAVRQAPLIIPLKATSTPVSIKQYPMSQEARLGIKPHIQRLLDQGILVPCQSPWNTPLLPVKKPGTNDYRPVQDLREVNKRVEDIHPTVPNPYNLLSGLPPSHQWYTVLDLKDAFFCLRLHPTSQPLFAFEWRDPEMGISGQLTWTRLPQGFKNSPTLFNEALHRDLADFRIQHPDLILLQYVDDLLLAATSELDCQQGTRALLQTLGNLGYRASAKKAQICQKQVKYLGYLLKEGQRWLTEARKETVMGQPTPKTPRQLREFLGTAGFCRLWIPGFAEMAAPLYPLTKPGTLFNWGPDQQKAYQEIKQALLTAPALGLPDLTKPFELFVDEKQGYAKGVLTQKLGPWRRPVAYLSKKLDPVAAGWPPCLRMVAAIAVLTKDAGKLTMGQPLVILAPHAVEALVKQPPDRWLSNARMTHYQALLLDTDRVQFGPVVALNPATLLPLPEEGLQHNCLDILAEAHGTRPDLTDQPLPDADHTWYTDGSSLLQEGQRKAGAAVTTETEVIWAKALPAGTSAQRAELIALTQALKMAEGKKLNVYTDSRYAFATAHIHGEIYRRRGWLTSEGKEIKNKDEILALLKALFLPKRLSIIHCPGHQKGHSAEARGNRMADQAARKAAITETPDTSTLLAGKRTADGSEFEKRTADGSEFESPKKKAKVE

SEQ ID NO: 2757 - protein, 2094 aa, synthetic construct
MPAAKRVKLDGGDKKYSIGLDIGTNSVGWAVITDEYKVPSKKFKVLGNTDRHSIKKNLIGALLFDSGETAEATRLKRTARRRYTRRKNRICYLQEIFSNEMAKVDDSFFHRLEESFLVEEDKKHERHPIFGNIVDEVAYHEKYPTIYHLRKKLVDSTDKADLRLIYLALAHMIKFRGHFLIEGDLNPDNSDVDKLFIQLVQTYNQLFEENPINASGVDAKAILSARLSKSRRLENLIAQLPGEKKNGLFGNLIALSLGLTPNFKSNFDLAEDAKLQLSKDTYDDDLDNLLAQIGDQYADLFLAAKNLSDAILLSDILRVNTEITKAPLSASMIKRYDEHHQDLTLLKALVRQQLPEKYKEIFFDQSKNGYAGYIDGGASQEEFYKFIKPILEKMDGTEELLVKLNREDLLRKQRTFDNGSIPHQIHLGELHAILRRQEDFYPFLKDNREKIEKILTFRIPYYVGPLARGNSRFAWMTRKSEETITPWNFEEVVDKGASAQSFIERMTNFDKNLPNEKVLPKHSLLYEYFTVYNELTKVKYVTEGMRKPAFLSGEQKKAIVDLLFKTNRKVTVKQLKEDYFKKIECFDSVEISGVEDRFNASLGTYHDLLKIIKDKDFLDNEENEDILEDIVLTLTLFEDREMIEERLKTYAHLFDDKVMKQLKRRRYTGWGRLSRKLINGIRDKQSGKTILDFLKSDGFANRNFMQLIHDDSLTFKEDIQKAQVSGQGDSLHEHIANLAGSPAIKKGILQTVKVVDELVKVMGRHKPENIVIEMARENQTTQKGQKNSRERMKRIEEGIKELGSQILKEHPVENTQLQNEKLYLYYLQNGRDMYVDQELDINRLSDYDVDHIVPQSFLKDDSIDNKVLTRSDKARGKSDNVPSEEVVKKMKNYWRQLLNAKLITQRKFDNLTKAERGGLSELDKAGFIKRQLVETRQITKHVAQILDSRMNTKYDENDKLIREVKVITLKSKLVSDFRKDFQFYKVREINNYHHAHDAYLNAVVGTALIKKYPKLESEFVYGDYKVYDVRKMIAKSEQEIGKATAKYFFYSNIMNFFKTEITLANGEIRKRPLIETNGETGEIVWDKGRDFATVRKVLSMPQVNIVKKTEVQTGGFSKESILPKRNSDKLIARKKDWDPKKYGGFDSPTVAYSVLVVAKVEKGKSKKLKSVKELLGITIMERSSFEKNPIDFLEAKGYKEVKKDLIIKLPKYSLFELENGRKRMLASAGELQKGNELALPSKYVNFLYLASHYEKLKGSPEDNEQKQLFVEQHKHYLDEIIEQISEFSKRVILADANLDKVLSAYNKHRDKPIREQAENIIHLFTLTNLGAPAAFKYFDTTIDRKRYTSTKEVLDATLIHQSITGLYETRIDLSQLGGDGGPAPGSSGGSGGTLNIEDEHRLHETSKEPDVSLGSTWLSDFPQAWAETGGMGLAVRQAPLIIPLKATSTPVSIKQYPMSQEARLGIKPHIQRLLDQGILVPCQSPWNTPLLPVKKPGTNDYRPVQDLREVNKRVEDIHPTVPNPYNLLSGLPPSHQWYTVLDLKDAFFCLRLHPTSQPLFAFEWRDPEMGISGQLTWTRLPQGFKNSPTLFNEALHRDLADFRIQHPDLILLQYVDDLLLAATSELDCQQGTRALLQTLGNLGYRASAKKAQICQKQVKYLGYLLKEGQRWLTEARKETVMGQPTPKTPRQLREFLGTAGFCRLWIPGFAEMAAPLYPLTKPGTLFNWGPDQQKAYQEIKQALLTAPALGLPDLTKPFELFVDEKQGYAKGVLTQKLGPWRRPVAYLSKKLDPVAAGWPPCLRMVAAIAVLTKDAGKLTMGQPLVILAPHAVEALVKQPPDRWLSNARMTHYQALLLDTDRVQFGPVVALNPATLLPLPEEGLQHNCLDILAEAHGTRPDLTDQPLPDADHTWYTDGSSLLQEGQRKAGAAVTTETEVIWAKALPAGTSAQRAELIALTQALKMAEGKKLNVYTDSRYAFATAHIHGEIYRRRGWLTSEGKEIKNKDEILALLKALFLPKRLSIIHCPGHQKGHSAEARGNRMADQAARKAAITETPDTSTLLAGKRTADGSEFEKRTADGSEFESPKKKAKVE

SEQ ID NO: 2758 - protein, 2096 aa, synthetic construct
MPAAKRVKLDGGDKKYSIGLDIGTNSVGWAVITDEYKVPSKKFKVLGNTDRHSIKKNLIGALLFDSGETAEATRLKRTARRRYTRRKNRICYLQEIFSNEMAKVDDSFFHRLEESFLVEEDKKHERHPIFGNIVDEVAYHEKYPTIYHLRKKLVDSTDKADLRLIYLALAHMIKFRGHFLIEGDLNPDNSDVDKLFIQLVQTYNQLFEENPINASGVDAKAILSARLSKSRRLENLIAQLPGEKKNGLFGNLIALSLGLTPNFKSNFDLAEDAKLQLSKDTYDDDLDNLLAQIGDQYADLFLAAKNLSDAILLSDILRVNTEITKAPLSASMIKRYDEHHQDLTLLKALVRQQLPEKYKEIFFDQSKNGYAGYIDGGASQEEFYKFIKPILEKMDGTEELLVKLNREDLLRKQRTFDNGSIPHQIHLGELHAILRRQEDFYPFLKDNREKIEKILTFRIPYYVGPLARGNSRFAWMTRKSEETITPWNFEEVVDKGASAQSFIERMTNFDKNLPNEKVLPKHSLLYEYFTVYNELTKVKYVTEGMRKPAFLSGEQKKAIVDLLFKTNRKVTVKQLKEDYFKKIECFDSVEISGVEDRFNASLGTYHDLLKIIKDKDFLDNEENEDILEDIVLTLTLFEDREMIEERLKTYAHLFDDKVMKQLKRRRYTGWGRLSRKLINGIRDKQSGKTILDFLKSDGFANRNFMQLIHDDSLTFKEDIQKAQVSGQGDSLHEHIANLAGSPAIKKGILQTVKVVDELVKVMGRHKPENIVIEMARENQTTQKGQKNSRERMKRIEEGIKELGSQILKEHPVENTQLQNEKLYLYYLQNGRDMYVDQELDINRLSDYDVDHIVPQSFLKDDSIDNKVLTRSDKARGKSDNVPSEEVVKKMKNYWRQLLNAKLITQRKFDNLTKAERGGLSELDKAGFIKRQLVETRQITKHVAQILDSRMNTKYDENDKLIREVKVITLKSKLVSDFRKDFQFYKVREINNYHHAHDAYLNAVVGTALIKKYPKLESEFVYGDYKVYDVRKMIAKSEQEIGKATAKYFFYSNIMNFFKTEITLANGEIRKRPLIETNGETGEIVWDKGRDFATVRKVLSMPQVNIVKKTEVQTGGFSKESILPKRNSDKLIARKKDWDPKKYGGFDSPTVAYSVLVVAKVEKGKSKKLKSVKELLGITIMERSSFEKNPIDFLEAKGYKEVKKDLIIKLPKYSLFELENGRKRMLASAGELQKGNELALPSKYVNFLYLASHYEKLKGSPEDNEQKQLFVEQHKHYLDEIIEQISEFSKRVILADANLDKVLSAYNKHRDKPIREQAENIIHLFTLTNLGAPAAFKYFDTTIDRKRYTSTKEVLDATLIHQSITGLYETRIDLSQLGGDGGGSSPAPEAAAKGGTLNIEDEHRLHETSKEPDVSLGSTWLSDFPQAWAETGGMGLAVRQAPLIIPLKATSTPVSIKQYPMSQEARLGIKPHIQRLLDQGILVPCQSPWNTPLLPVKKPGTNDYRPVQDLREVNKRVEDIHPTVPNPYNLLSGLPPSHQWYTVLDLKDAFFCLRLHPTSQPLFAFEWRDPEMGISGQLTWTRLPQGFKNSPTLFNEALHRDLADFRIQHPDLILLQYVDDLLLAATSELDCQQGTRALLQTLGNLGYRASAKKAQICQKQVKYLGYLLKEGQRWLTEARKETVMGQPTPKTPRQLREFLGTAGFCRLWIPGFAEMAAPLYPLTKPGTLFNWGPDQQKAYQEIKQALLTAPALGLPDLTKPFELFVDEKQGYAKGVLTQKLGPWRRPVAYLSKKLDPVAAGWPPCLRMVAAIAVLTKDAGKLTMGQPLVILAPHAVEALVKQPPDRWLSNARMTHYQALLLDTDRVQFGPVVALNPATLLPLPEEGLQHNCLDILAEAHGTRPDLTDQPLPDADHTWYTDGSSLLQEGQRKAGAAVTTETEVIWAKALPAGTSAQRAELIALTQALKMAEGKKLNVYTDSRYAFATAHIHGEIYRRRGWLTSEGKEIKNKDEILALLKALFLPKRLSIIHCPGHQKGHSAEARGNRMADQAARKAAITETPDTSTLLAGKRTADGSEFEKRTADGSEFESPKKKAKVE

SEQ ID NO: 2759 - protein, 2096 aa, synthetic construct
MPAAKRVKLDGGDKKYSIGLDIGTNSVGWAVITDEYKVPSKKFKVLGNTDRHSIKKNLIGALLFDSGETAEATRLKRTARRRYTRRKNRICYLQEIFSNEMAKVDDSFFHRLEESFLVEEDKKHERHPIFGNIVDEVAYHEKYPTIYHLRKKLVDSTDKADLRLIYLALAHMIKFRGHFLIEGDLNPDNSDVDKLFIQLVQTYNQLFEENPINASGVDAKAILSARLSKSRRLENLIAQLPGEKKNGLFGNLIALSLGLTPNFKSNFDLAEDAKLQLSKDTYDDDLDNLLAQIGDQYADLFLAAKNLSDAILLSDILRVNTEITKAPLSASMIKRYDEHHQDLTLLKALVRQQLPEKYKEIFFDQSKNGYAGYIDGGASQEEFYKFIKPILEKMDGTEELLVKLNREDLLRKQRTFDNGSIPHQIHLGELHAILRRQEDFYPFLKDNREKIEKILTFRIPYYVGPLARGNSRFAWMTRKSEETITPWNFEEVVDKGASAQSFIERMTNFDKNLPNEKVLPKHSLLYEYFTVYNELTKVKYVTEGMRKPAFLSGEQKKAIVDLLFKTNRKVTVKQLKEDYFKKIECFDSVEISGVEDRFNASLGTYHDLLKIIKDKDFLDNEENEDILEDIVLTLTLFEDREMIEERLKTYAHLFDDKVMKQLKRRRYTGWGRLSRKLINGIRDKQSGKTILDFLKSDGFANRNFMQLIHDDSLTFKEDIQKAQVSGQGDSLHEHIANLAGSPAIKKGILQTVKVVDELVKVMGRHKPENIVIEMARENQTTQKGQKNSRERMKRIEEGIKELGSQILKEHPVENTQLQNEKLYLYYLQNGRDMYVDQELDINRLSDYDVDHIVPQSFLKDDSIDNKVLTRSDKARGKSDNVPSEEVVKKMKNYWRQLLNAKLITQRKFDNLTKAERGGLSELDKAGFIKRQLVETRQITKHVAQILDSRMNTKYDENDKLIREVKVITLKSKLVSDFRKDFQFYKVREINNYHHAHDAYLNAVVGTALIKKYPKLESEFVYGDYKVYDVRKMIAKSEQEIGKATAKYFFYSNIMNFFKTEITLANGEIRKRPLIETNGETGEIVWDKGRDFATVRKVLSMPQVNIVKKTEVQTGGFSKESILPKRNSDKLIARKKDWDPKKYGGFDSPTVAYSVLVVAKVEKGKSKKLKSVKELLGITIMERSSFEKNPIDFLEAKGYKEVKKDLIIKLPKYSLFELENGRKRMLASAGELQKGNELALPSKYVNFLYLASHYEKLKGSPEDNEQKQLFVEQHKHYLDEIIEQISEFSKRVILADANLDKVLSAYNKHRDKPIREQAENIIHLFTLTNLGAPAAFKYFDTTIDRKRYTSTKEVLDATLIHQSITGLYETRIDLSQLGGDGGPAPEAAAKGSSGGTLNIEDEHRLHETSKEPDVSLGSTWLSDFPQAWAETGGMGLAVRQAPLIIPLKATSTPVSIKQYPMSQEARLGIKPHIQRLLDQGILVPCQSPWNTPLLPVKKPGTNDYRPVQDLREVNKRVEDIHPTVPNPYNLLSGLPPSHQWYTVLDLKDAFFCLRLHPTSQPLFAFEWRDPEMGISGQLTWTRLPQGFKNSPTLFNEALHRDLADFRIQHPDLILLQYVDDLLLAATSELDCQQGTRALLQTLGNLGYRASAKKAQICQKQVKYLGYLLKEGQRWLTEARKETVMGQPTPKTPRQLREFLGTAGFCRLWIPGFAEMAAPLYPLTKPGTLFNWGPDQQKAYQEIKQALLTAPALGLPDLTKPFELFVDEKQGYAKGVLTQKLGPWRRPVAYLSKKLDPVAAGWPPCLRMVAAIAVLTKDAGKLTMGQPLVILAPHAVEALVKQPPDRWLSNARMTHYQALLLDTDRVQFGPVVALNPATLLPLPEEGLQHNCLDILAEAHGTRPDLTDQPLPDADHTWYTDGSSLLQEGQRKAGAAVTTETEVIWAKALPAGTSAQRAELIALTQALKMAEGKKLNVYTDSRYAFATAHIHGEIYRRRGWLTSEGKEIKNKDEILALLKALFLPKRLSIIHCPGHQKGHSAEARGNRMADQAARKAAITETPDTSTLLAGKRTADGSEFEKRTADGSEFESPKKKAKVE

SEQ ID NO: 2760 - protein, 2096 aa, synthetic construct
MPAAKRVKLDGGDKKYSIGLDIGTNSVGWAVITDEYKVPSKKFKVLGNTDRHSIKKNLIGALLFDSGETAEATRLKRTARRRYTRRKNRICYLQEIFSNEMAKVDDSFFHRLEESFLVEEDKKHERHPIFGNIVDEVAYHEKYPTIYHLRKKLVDSTDKADLRLIYLALAHMIKFRGHFLIEGDLNPDNSDVDKLFIQLVQTYNQLFEENPINASGVDAKAILSARLSKSRRLENLIAQLPGEKKNGLFGNLIALSLGLTPNFKSNFDLAEDAKLQLSKDTYDDDLDNLLAQIGDQYADLFLAAKNLSDAILLSDILRVNTEITKAPLSASMIKRYDEHHQDLTLLKALVRQQLPEKYKEIFFDQSKNGYAGYIDGGASQEEFYKFIKPILEKMDGTEELLVKLNREDLLRKQRTFDNGSIPHQIHLGELHAILRRQEDFYPFLKDNREKIEKILTFRIPYYVGPLARGNSRFAWMTRKSEETITPWNFEEVVDKGASAQSFIERMTNFDKNLPNEKVLPKHSLLYEYFTVYNELTKVKYVTEGMRKPAFLSGEQKKAIVDLLFKTNRKVTVKQLKEDYFKKIECFDSVEISGVEDRFNASLGTYHDLLKIIKDKDFLDNEENEDILEDIVLTLTLFEDREMIEERLKTYAHLFDDKVMKQLKRRRYTGWGRLSRKLINGIRDKQSGKTILDFLKSDGFANRNFMQLIHDDSLTFKEDIQKAQVSGQGDSLHEHIANLAGSPAIKKGILQTVKVVDELVKVMGRHKPENIVIEMARENQTTQKGQKNSRERMKRIEEGIKELGSQILKEHPVENTQLQNEKLYLYYLQNGRDMYVDQELDINRLSDYDVDHIVPQSFLKDDSIDNKVLTRSDKARGKSDNVPSEEVVKKMKNYWRQLLNAKLITQRKFDNLTKAERGGLSELDKAGFIKRQLVETRQITKHVAQILDSRMNTKYDENDKLIREVKVITLKSKLVSDFRKDFQFYKVREINNYHHAHDAYLNAVVGTALIKKYPKLESEFVYGDYKVYDVRKMIAKSEQEIGKATAKYFFYSNIMNFFKTEITLANGEIRKRPLIETNGETGEIVWDKGRDFATVRKVLSMPQVNIVKKTEVQTGGFSKESILPKRNSDKLIARKKDWDPKKYGGFDSPTVAYSVLVVAKVEKGKSKKLKSVKELLGITIMERSSFEKNPIDFLEAKGYKEVKKDLIIKLPKYSLFELENGRKRMLASAGELQKGNELALPSKYVNFLYLASHYEKLKGSPEDNEQKQLFVEQHKHYLDEIIEQISEFSKRVILADANLDKVLSAYNKHRDKPIREQAENIIHLFTLTNLGAPAAFKYFDTTIDRKRYTSTKEVLDATLIHQSITGLYETRIDLSQLGGDGGGSSGGSEAAAKGGTLNIEDEHRLHETSKEPDVSLGSTWLSDFPQAWAETGGMGLAVRQAPLIIPLKATSTPVSIKQYPMSQEARLGIKPHIQRLLDQGILVPCQSPWNTPLLPVKKPGTNDYRPVQDLREVNKRVEDIHPTVPNPYNLLSGLPPSHQWYTVLDLKDAFFCLRLHPTSQPLFAFEWRDPEMGISGQLTWTRLPQGFKNSPTLFNEALHRDLADFRIQHPDLILLQYVDDLLLAATSELDCQQGTRALLQTLGNLGYRASAKKAQICQKQVKYLGYLLKEGQRWLTEARKETVMGQPTPKTPRQLREFLGTAGFCRLWIPGFAEMAAPLYPLTKPGTLFNWGPDQQKAYQEIKQALLTAPALGLPDLTKPFELFVDEKQGYAKGVLTQKLGPWRRPVAYLSKKLDPVAAGWPPCLRMVAAIAVLTKDAGKLTMGQPLVILAPHAVEALVKQPPDRWLSNARMTHYQALLLDTDRVQFGPVVALNPATLLPLPEEGLQHNCLDILAEAHGTRPDLTDQPLPDADHTWYTDGSSLLQEGQRKAGAAVTTETEVIWAKALPAGTSAQRAELIALTQALKMAEGKKLNVYTDSRYAFATAHIHGEIYRRRGWLTSEGKEIKNKDEILALLKALFLPKRLSIIHCPGHQKGHSAEARGNRMADQAARKAAITETPDTSTLLAGKRTADGSEFEKRTADGSEFESPKKKAKVE

SEQ ID NO: 2761 - protein, 2096 aa, synthetic construct
MPAAKRVKLDGGDKKYSIGLDIGTNSVGWAVITDEYKVPSKKFKVLGNTDRHSIKKNLIGALLFDSGETAEATRLKRTARRRYTRRKNRICYLQEIFSNEMAKVDDSFFHRLEESFLVEEDKKHERHPIFGNIVDEVAYHEKYPTIYHLRKKLVDSTDKADLRLIYLALAHMIKFRGHFLIEGDLNPDNSDVDKLFIQLVQTYNQLFEENPINASGVDAKAILSARLSKSRRLENLIAQLPGEKKNGLFGNLIALSLGLTPNFKSNFDLAEDAKLQLSKDTYDDDLDNLLAQIGDQYADLFLAAKNLSDAILLSDILRVNTEITKAPLSASMIKRYDEHHQDLTLLKALVRQQLPEKYKEIFFDQSKNGYAGYIDGGASQEEFYKFIKPILEKMDGTEELLVKLNREDLLRKQRTFDNGSIPHQIHLGELHAILRRQEDFYPFLKDNREKIEKILTFRIPYYVGPLARGNSRFAWMTRKSEETITPWNFEEVVDKGASAQSFIERMTNFDKNLPNEKVLPKHSLLYEYFTVYNELTKVKYVTEGMRKPAFLSGEQKKAIVDLLFKTNRKVTVKQLKEDYFKKIECFDSVEISGVEDRFNASLGTYHDLLKIIKDKDFLDNEENEDILEDIVLTLTLFEDREMIEERLKTYAHLFDDKVMKQLKRRRYTGWGRLSRKLINGIRDKQSGKTILDFLKSDGFANRNFMQLIHDDSLTFKEDIQKAQVSGQGDSLHEHIANLAGSPAIKKGILQTVKVVDELVKVMGRHKPENIVIEMARENQTTQKGQKNSRERMKRIEEGIKELGSQILKEHPVENTQLQNEKLYLYYLQNGRDMYVDQELDINRLSDYDVDHIVPQSFLKDDSIDNKVLTRSDKARGKSDNVPSEEVVKKMKNYWRQLLNAKLITQRKFDNLTKAERGGLSELDKAGFIKRQLVETRQITKHVAQILDSRMNTKYDENDKLIREVKVITLKSKLVSDFRKDFQFYKVREINNYHHAHDAYLNAVVGTALIKKYPKLESEFVYGDYKVYDVRKMIAKSEQEIGKATAKYFFYSNIMNFFKTEITLANGEIRKRPLIETNGETGEIVWDKGRDFATVRKVLSMPQVNIVKKTEVQTGGFSKESILPKRNSDKLIARKKDWDPKKYGGFDSPTVAYSVLVVAKVEKGKSKKLKSVKELLGITIMERSSFEKNPIDFLEAKGYKEVKKDLIIKLPKYSLFELENGRKRMLASAGELQKGNELALPSKYVNFLYLASHYEKLKGSPEDNEQKQLFVEQHKHYLDEIIEQISEFSKRVILADANLDKVLSAYNKHRDKPIREQAENIIHLFTLTNLGAPAAFKYFDTTIDRKRYTSTKEVLDATLIHQSITGLYETRIDLSQLGGDGGGGSEAAAKGSSGGTLNIEDEHRLHETSKEPDVSLGSTWLSDFPQAWAETGGMGLAVRQAPLIIPLKATSTPVSIKQYPMSQEARLGIKPHIQRLLDQGILVPCQSPWNTPLLPVKKPGTNDYRPVQDLREVNKRVEDIHPTVPNPYNLLSGLPPSHQWYTVLDLKDAFFCLRLHPTSQPLFAFEWRDPEMGISGQLTWTRLPQGFKNSPTLFNEALHRDLADFRIQHPDLILLQYVDDLLLAATSELDCQQGTRALLQTLGNLGYRASAKKAQICQKQVKYLGYLLKEGQRWLTEARKETVMGQPTPKTPRQLREFLGTAGFCRLWIPGFAEMAAPLYPLTKPGTLFNWGPDQQKAYQEIKQALLTAPALGLPDLTKPFELFVDEKQGYAKGVLTQKLGPWRRPVAYLSKKLDPVAAGWPPCLRMVAAIAVLTKDAGKLTMGQPLVILAPHAVEALVKQPPDRWLSNARMTHYQALLLDTDRVQFGPVVALNPATLLPLPEEGLQHNCLDILAEAHGTRPDLTDQPLPDADHTWYTDGSSLLQEGQRKAGAAVTTETEVIWAKALPAGTSAQRAELIALTQALKMAEGKKLNVYTDSRYAFATAHIHGEIYRRRGWLTSEGKEIKNKDEILALLKALFLPKRLSIIHCPGHQKGHSAEARGNRMADQAARKAAITETPDTSTLLAGKRTADGSEFEKRTADGSEFESPKKKAKVE

SEQ ID NO: 2762 - protein, 2094 aa, synthetic construct
MPAAKRVKLDGGDKKYSIGLDIGTNSVGWAVITDEYKVPSKKFKVLGNTDRHSIKKNLIGALLFDSGETAEATRLKRTARRRYTRRKNRICYLQEIFSNEMAKVDDSFFHRLEESFLVEEDKKHERHPIFGNIVDEVAYHEKYPTIYHLRKKLVDSTDKADLRLIYLALAHMIKFRGHFLIEGDLNPDNSDVDKLFIQLVQTYNQLFEENPINASGVDAKAILSARLSKSRRLENLIAQLPGEKKNGLFGNLIALSLGLTPNFKSNFDLAEDAKLQLSKDTYDDDLDNLLAQIGDQYADLFLAAKNLSDAILLSDILRVNTEITKAPLSASMIKRYDEHHQDLTLLKALVRQQLPEKYKEIFFDQSKNGYAGYIDGGASQEEFYKFIKPILEKMDGTEELLVKLNREDLLRKQRTFDNGSIPHQIHLGELHAILRRQEDFYPFLKDNREKIEKILTFRIPYYVGPLARGNSRFAWMTRKSEETITPWNFEEVVDKGASAQSFIERMTNFDKNLPNEKVLPKHSLLYEYFTVYNELTKVKYVTEGMRKPAFLSGEQKKAIVDLLFKTNRKVTVKQLKEDYFKKIECFDSVEISGVEDRFNASLGTYHDLLKIIKDKDFLDNEENEDILEDIVLTLTLFEDREMIEERLKTYAHLFDDKVMKQLKRRRYTGWGRLSRKLINGIRDKQSGKTILDFLKSDGFANRNFMQLIHDDSLTFKEDIQKAQVSGQGDSLHEHIANLAGSPAIKKGILQTVKVVDELVKVMGRHKPENIVIEMARENQTTQKGQKNSRERMKRIEEGIKELGSQILKEHPVENTQLQNEKLYLYYLQNGRDMYVDQELDINRLSDYDVDHIVPQSFLKDDSIDNKVLTRSDKARGKSDNVPSEEVVKKMKNYWRQLLNAKLITQRKFDNLTKAERGGLSELDKAGFIKRQLVETRQITKHVAQILDSRMNTKYDENDKLIREVKVITLKSKLVSDFRKDFQFYKVREINNYHHAHDAYLNAVVGTALIKKYPKLESEFVYGDYKVYDVRKMIAKSEQEIGKATAKYFFYSNIMNFFKTEITLANGEIRKRPLIETNGETGEIVWDKGRDFATVRKVLSMPQVNIVKKTEVQTGGFSKESILPKRNSDKLIARKKDWDPKKYGGFDSPTVAYSVLVVAKVEKGKSKKLKSVKELLGITIMERSSFEKNPIDFLEAKGYKEVKKDLIIKLPKYSLFELENGRKRMLASAGELQKGNELALPSKYVNFLYLASHYEKLKGSPEDNEQKQLFVEQHKHYLDEIIEQISEFSKRVILADANLDKVLSAYNKHRDKPIREQAENIIHLFTLTNLGAPAAFKYFDTTIDRKRYTSTKEVLDATLIHQSITGLYETRIDLSQLGGDGGGGSPAPGGGGGTLNIEDEHRLHETSKEPDVSLGSTWLSDFPQAWAETGGMGLAVRQAPLIIPLKATSTPVSIKQYPMSQEARLGIKPHIQRLLDQGILVPCQSPWNTPLLPVKKPGTNDYRPVQDLREVNKRVEDIHPTVPNPYNLLSGLPPSHQWYTVLDLKDAFFCLRLHPTSQPLFAFEWRDPEMGISGQLTWTRLPQGFKNSPTLFNEALHRDLADFRIQHPDLILLQYVDDLLLAATSELDCQQGTRALLQTLGNLGYRASAKKAQICQKQVKYLGYLLKEGQRWLTEARKETVMGQPTPKTPRQLREFLGTAGFCRLWIPGFAEMAAPLYPLTKPGTLFNWGPDQQKAYQEIKQALLTAPALGLPDLTKPFELFVDEKQGYAKGVLTQKLGPWRRPVAYLSKKLDPVAAGWPPCLRMVAAIAVLTKDAGKLTMGQPLVILAPHAVEALVKQPPDRWLSNARMTHYQALLLDTDRVQFGPVVALNPATLLPLPEEGLQHNCLDILAEAHGTRPDLTDQPLPDADHTWYTDGSSLLQEGQRKAGAAVTTETEVIWAKALPAGTSAQRAELIALTQALKMAEGKKLNVYTDSRYAFATAHIHGEIYRRRGWLTSEGKEIKNKDEILALLKALFLPKRLSIIHCPGHQKGHSAEARGNRMADQAARKAAITETPDTSTLLAGKRTADGSEFEKRTADGSEFESPKKKAKVE

SEQ ID NO: 2763 - protein, 2097 aa, synthetic construct
MPAAKRVKLDGGDKKYSIGLDIGTNSVGWAVITDEYKVPSKKFKVLGNTDRHSIKKNLIGALLFDSGETAEATRLKRTARRRYTRRKNRICYLQEIFSNEMAKVDDSFFHRLEESFLVEEDKKHERHPIFGNIVDEVAYHEKYPTIYHLRKKLVDSTDKADLRLIYLALAHMIKFRGHFLIEGDLNPDNSDVDKLFIQLVQTYNQLFEENPINASGVDAKAILSARLSKSRRLENLIAQLPGEKKNGLFGNLIALSLGLTPNFKSNFDLAEDAKLQLSKDTYDDDLDNLLAQIGDQYADLFLAAKNLSDAILLSDILRVNTEITKAPLSASMIKRYDEHHQDLTLLKALVRQQLPEKYKEIFFDQSKNGYAGYIDGGASQEEFYKFIKPILEKMDGTEELLVKLNREDLLRKQRTFDNGSIPHQIHLGELHAILRRQEDFYPFLKDNREKIEKILTFRIPYYVGPLARGNSRFAWMTRKSEETITPWNFEEVVDKGASAQSFIERMTNFDKNLPNEKVLPKHSLLYEYFTVYNELTKVKYVTEGMRKPAFLSGEQKKAIVDLLFKTNRKVTVKQLKEDYFKKIECFDSVEISGVEDRFNASLGTYHDLLKIIKDKDFLDNEENEDILEDIVLTLTLFEDREMIEERLKTYAHLFDDKVMKQLKRRRYTGWGRLSRKLINGIRDKQSGKTILDFLKSDGFANRNFMQLIHDDSLTFKEDIQKAQVSGQGDSLHEHIANLAGSPAIKKGILQTVKVVDELVKVMGRHKPENIVIEMARENQTTQKGQKNSRERMKRIEEGIKELGSQILKEHPVENTQLQNEKLYLYYLQNGRDMYVDQELDINRLSDYDVDHIVPQSFLKDDSIDNKVLTRSDKARGKSDNVPSEEVVKKMKNYWRQLLNAKLITQRKFDNLTKAERGGLSELDKAGFIKRQLVETRQITKHVAQILDSRMNTKYDENDKLIREVKVITLKSKLVSDFRKDFQFYKVREINNYHHAHDAYLNAVVGTALIKKYPKLESEFVYGDYKVYDVRKMIAKSEQEIGKATAKYFFYSNIMNFFKTEITLANGEIRKRPLIETNGETGEIVWDKGRDFATVRKVLSMPQVNIVKKTEVQTGGFSKESILPKRNSDKLIARKKDWDPKKYGGFDSPTVAYSVLVVAKVEKGKSKKLKSVKELLGITIMERSSFEKNPIDFLEAKGYKEVKKDLIIKLPKYSLFELENGRKRMLASAGELQKGNELALPSKYVNFLYLASHYEKLKGSPEDNEQKQLFVEQHKHYLDEIIEQISEFSKRVILADANLDKVLSAYNKHRDKPIREQAENIIHLFTLTNLGAPAAFKYFDTTIDRKRYTSTKEVLDATLIHQSITGLYETRIDLSQLGGDGGGGSGGSGGSGGSGGTLNIEDEHRLHETSKEPDVSLGSTWLSDFPQAWAETGGMGLAVRQAPLIIPLKATSTPVSIKQYPMSQEARLGIKPHIQRLLDQGILVPCQSPWNTPLLPVKKPGTNDYRPVQDLREVNKRVEDIHPTVPNPYNLLSGLPPSHQWYTVLDLKDAFFCLRLHPTSQPLFAFEWRDPEMGISGQLTWTRLPQGFKNSPTLFNEALHRDLADFRIQHPDLILLQYVDDLLLAATSELDCQQGTRALLQTLGNLGYRASAKKAQICQKQVKYLGYLLKEGQRWLTEARKETVMGQPTPKTPRQLREFLGTAGFCRLWIPGFAEMAAPLYPLTKPGTLFNWGPDQQKAYQEIKQALLTAPALGLPDLTKPFELFVDEKQGYAKGVLTQKLGPWRRPVAYLSKKLDPVAAGWPPCLRMVAAIAVLTKDAGKLTMGQPLVILAPHAVEALVKQPPDRWLSNARMTHYQALLLDTDRVQFGPVVALNPATLLPLPEEGLQHNCLDILAEAHGTRPDLTDQPLPDADHTWYTDGSSLLQEGQRKAGAAVTTETEVIWAKALPAGTSAQRAELIALTQALKMAEGKKLNVYTDSRYAFATAHIHGEIYRRRGWLTSEGKEIKNKDEILALLKALFLPKRLSIIHCPGHQKGHSAEARGNRMADQAARKAAITETPDTSTLLAGKRTADGSEFEKRTADGSEFESPKKKAKVE

SEQ ID NO: 2764 - protein, 2096 aa, synthetic construct
MPAAKRVKLDGGDKKYSIGLDIGTNSVGWAVITDEYKVPSKKFKVLGNTDRHSIKKNLIGALLFDSGETAEATRLKRTARRRYTRRKNRICYLQEIFSNEMAKVDDSFFHRLEESFLVEEDKKHERHPIFGNIVDEVAYHEKYPTIYHLRKKLVDSTDKADLRLIYLALAHMIKFRGHFLIEGDLNPDNSDVDKLFIQLVQTYNQLFEENPINASGVDAKAILSARLSKSRRLENLIAQLPGEKKNGLFGNLIALSLGLTPNFKSNFDLAEDAKLQLSKDTYDDDLDNLLAQIGDQYADLFLAAKNLSDAILLSDILRVNTEITKAPLSASMIKRYDEHHQDLTLLKALVRQQLPEKYKEIFFDQSKNGYAGYIDGGASQEEFYKFIKPILEKMDGTEELLVKLNREDLLRKQRTFDNGSIPHQIHLGELHAILRRQEDFYPFLKDNREKIEKILTFRIPYYVGPLARGNSRFAWMTRKSEETITPWNFEEVVDKGASAQSFIERMTNFDKNLPNEKVLPKHSLLYEYFTVYNELTKVKYVTEGMRKPAFLSGEQKKAIVDLLFKTNRKVTVKQLKEDYFKKIECFDSVEISGVEDRFNASLGTYHDLLKIIKDKDFLDNEENEDILEDIVLTLTLFEDREMIEERLKTYAHLFDDKVMKQLKRRRYTGWGRLSRKLINGIRDKQSGKTILDFLKSDGFANRNFMQLIHDDSLTFKEDIQKAQVSGQGDSLHEHIANLAGSPAIKKGILQTVKVVDELVKVMGRHKPENIVIEMARENQTTQKGQKNSRERMKRIEEGIKELGSQILKEHPVENTQLQNEKLYLYYLQNGRDMYVDQELDINRLSDYDVDHIVPQSFLKDDSIDNKVLTRSDKARGKSDNVPSEEVVKKMKNYWRQLLNAKLITQRKFDNLTKAERGGLSELDKAGFIKRQLVETRQITKHVAQILDSRMNTKYDENDKLIREVKVITLKSKLVSDFRKDFQFYKVREINNYHHAHDAYLNAVVGTALIKKYPKLESEFVYGDYKVYDVRKMIAKSEQEIGKATAKYFFYSNIMNFFKTEITLANGEIRKRPLIETNGETGEIVWDKGRDFATVRKVLSMPQVNIVKKTEVQTGGFSKESILPKRNSDKLIARKKDWDPKKYGGFDSPTVAYSVLVVAKVEKGKSKKLKSVKELLGITIMERSSFEKNPIDFLEAKGYKEVKKDLIIKLPKYSLFELENGRKRMLASAGELQKGNELALPSKYVNFLYLASHYEKLKGSPEDNEQKQLFVEQHKHYLDEIIEQISEFSKRVILADANLDKVLSAYNKHRDKPIREQAENIIHLFTLTNLGAPAAFKYFDTTIDRKRYTSTKEVLDATLIHQSITGLYETRIDLSQLGGDGGGGGGSSEAAAKGGTLNIEDEHRLHETSKEPDVSLGSTWLSDFPQAWAETGGMGLAVRQAPLIIPLKATSTPVSIKQYPMSQEARLGIKPHIQRLLDQGILVPCQSPWNTPLLPVKKPGTNDYRPVQDLREVNKRVEDIHPTVPNPYNLLSGLPPSHQWYTVLDLKDAFFCLRLHPTSQPLFAFEWRDPEMGISGQLTWTRLPQGFKNSPTLFNEALHRDLADFRIQHPDLILLQYVDDLLLAATSELDCQQGTRALLQTLGNLGYRASAKKAQICQKQVKYLGYLLKEGQRWLTEARKETVMGQPTPKTPRQLREFLGTAGFCRLWIPGFAEMAAPLYPLTKPGTLFNWGPDQQKAYQEIKQALLTAPALGLPDLTKPFELFVDEKQGYAKGVLTQKLGPWRRPVAYLSKKLDPVAAGWPPCLRMVAAIAVLTKDAGKLTMGQPLVILAPHAVEALVKQPPDRWLSNARMTHYQALLLDTDRVQFGPVVALNPATLLPLPEEGLQHNCLDILAEAHGTRPDLTDQPLPDADHTWYTDGSSLLQEGQRKAGAAVTTETEVIWAKALPAGTSAQRAELIALTQALKMAEGKKLNVYTDSRYAFATAHIHGEIYRRRGWLTSEGKEIKNKDEILALLKALFLPKRLSIIHCPGHQKGHSAEARGNRMADQAARKAAITETPDTSTLLAGKRTADGSEFEKRTADGSEFESPKKKAKVE

SEQ ID NO: 2765 - protein, 2096 aa, synthetic construct
MPAAKRVKLDGGDKKYSIGLDIGTNSVGWAVITDEYKVPSKKFKVLGNTDRHSIKKNLIGALLFDSGETAEATRLKRTARRRYTRRKNRICYLQEIFSNEMAKVDDSFFHRLEESFLVEEDKKHERHPIFGNIVDEVAYHEKYPTIYHLRKKLVDSTDKADLRLIYLALAHMIKFRGHFLIEGDLNPDNSDVDKLFIQLVQTYNQLFEENPINASGVDAKAILSARLSKSRRLENLIAQLPGEKKNGLFGNLIALSLGLTPNFKSNFDLAEDAKLQLSKDTYDDDLDNLLAQIGDQYADLFLAAKNLSDAILLSDILRVNTEITKAPLSASMIKRYDEHHQDLTLLKALVRQQLPEKYKEIFFDQSKNGYAGYIDGGASQEEFYKFIKPILEKMDGTEELLVKLNREDLLRKQRTFDNGSIPHQIHLGELHAILRRQEDFYPFLKDNREKIEKILTFRIPYYVGPLARGNSRFAWMTRKSEETITPWNFEEVVDKGASAQSFIERMTNFDKNLPNEKVLPKHSLLYEYFTVYNELTKVKYVTEGMRKPAFLSGEQKKAIVDLLFKTNRKVTVKQLKEDYFKKIECFDSVEISGVEDRFNASLGTYHDLLKIIKDKDFLDNEENEDILEDIVLTLTLFEDREMIEERLKTYAHLFDDKVMKQLKRRRYTGWGRLSRKLINGIRDKQSGKTILDFLKSDGFANRNFMQLIHDDSLTFKEDIQKAQVSGQGDSLHEHIANLAGSPAIKKGILQTVKVVDELVKVMGRHKPENIVIEMARENQTTQKGQKNSRERMKRIEEGIKELGSQILKEHPVENTQLQNEKLYLYYLQNGRDMYVDQELDINRLSDYDVDHIVPQSFLKDDSIDNKVLTRSDKARGKSDNVPSEEVVKKMKNYWRQLLNAKLITQRKFDNLTKAERGGLSELDKAGFIKRQLVETRQITKHVAQILDSRMNTKYDENDKLIREVKVITLKSKLVSDFRKDFQFYKVREINNYHHAHDAYLNAVVGTALIKKYPKLESEFVYGDYKVYDVRKMIAKSEQEIGKATAKYFFYSNIMNFFKTEITLANGEIRKRPLIETNGETGEIVWDKGRDFATVRKVLSMPQVNIVKKTEVQTGGFSKESILPKRNSDKLIARKKDWDPKKYGGFDSPTVAYSVLVVAKVEKGKSKKLKSVKELLGITIMERSSFEKNPIDFLEAKGYKEVKKDLIIKLPKYSLFELENGRKRMLASAGELQKGNELALPSKYVNFLYLASHYEKLKGSPEDNEQKQLFVEQHKHYLDEIIEQISEFSKRVILADANLDKVLSAYNKHRDKPIREQAENIIHLFTLTNLGAPAAFKYFDTTIDRKRYTSTKEVLDATLIHQSITGLYETRIDLSQLGGDGGEAAAKPAPGGGGGTLNIEDEHRLHETSKEPDVSLGSTWLSDFPQAWAETGGMGLAVRQAPLIIPLKATSTPVSIKQYPMSQEARLGIKPHIQRLLDQGILVPCQSPWNTPLLPVKKPGTNDYRPVQDLREVNKRVEDIHPTVPNPYNLLSGLPPSHQWYTVLDLKDAFFCLRLHPTSQPLFAFEWRDPEMGISGQLTWTRLPQGFKNSPTLFNEALHRDLADFRIQHPDLILLQYVDDLLLAATSELDCQQGTRALLQTLGNLGYRASAKKAQICQKQVKYLGYLLKEGQRWLTEARKETVMGQPTPKTPRQLREFLGTAGFCRLWIPGFAEMAAPLYPLTKPGTLFNWGPDQQKAYQEIKQALLTAPALGLPDLTKPFELFVDEKQGYAKGVLTQKLGPWRRPVAYLSKKLDPVAAGWPPCLRMVAAIAVLTKDAGKLTMGQPLVILAPHAVEALVKQPPDRWLSNARMTHYQALLLDTDRVQFGPVVALNPATLLPLPEEGLQHNCLDILAEAHGTRPDLTDQPLPDADHTWYTDGSSLLQEGQRKAGAAVTTETEVIWAKALPAGTSAQRAELIALTQALKMAEGKKLNVYTDSRYAFATAHIHGEIYRRRGWLTSEGKEIKNKDEILALLKALFLPKRLSIIHCPGHQKGHSAEARGNRMADQAARKAAITETPDTSTLLAGKRTADGSEFEKRTADGSEFESPKKKAKVE

SEQ ID NO: 2766 - protein, 2094 aa, synthetic construct
MPAAKRVKLDGGDKKYSIGLDIGTNSVGWAVITDEYKVPSKKFKVLGNTDRHSIKKNLIGALLFDSGETAEATRLKRTARRRYTRRKNRICYLQEIFSNEMAKVDDSFFHRLEESFLVEEDKKHERHPIFGNIVDEVAYHEKYPTIYHLRKKLVDSTDKADLRLIYLALAHMIKFRGHFLIEGDLNPDNSDVDKLFIQLVQTYNQLFEENPINASGVDAKAILSARLSKSRRLENLIAQLPGEKKNGLFGNLIALSLGLTPNFKSNFDLAEDAKLQLSKDTYDDDLDNLLAQIGDQYADLFLAAKNLSDAILLSDILRVNTEITKAPLSASMIKRYDEHHQDLTLLKALVRQQLPEKYKEIFFDQSKNGYAGYIDGGASQEEFYKFIKPILEKMDGTEELLVKLNREDLLRKQRTFDNGSIPHQIHLGELHAILRRQEDFYPFLKDNREKIEKILTFRIPYYVGPLARGNSRFAWMTRKSEETITPWNFEEVVDKGASAQSFIERMTNFDKNLPNEKVLPKHSLLYEYFTVYNELTKVKYVTEGMRKPAFLSGEQKKAIVDLLFKTNRKVTVKQLKEDYFKKIECFDSVEISGVEDRFNASLGTYHDLLKIIKDKDFLDNEENEDILEDIVLTLTLFEDREMIEERLKTYAHLFDDKVMKQLKRRRYTGWGRLSRKLINGIRDKQSGKTILDFLKSDGFANRNFMQLIHDDSLTFKEDIQKAQVSGQGDSLHEHIANLAGSPAIKKGILQTVKVVDELVKVMGRHKPENIVIEMARENQTTQKGQKNSRERMKRIEEGIKELGSQILKEHPVENTQLQNEKLYLYYLQNGRDMYVDQELDINRLSDYDVDHIVPQSFLKDDSIDNKVLTRSDKARGKSDNVPSEEVVKKMKNYWRQLLNAKLITQRKFDNLTKAERGGLSELDKAGFIKRQLVETRQITKHVAQILDSRMNTKYDENDKLIREVKVITLKSKLVSDFRKDFQFYKVREINNYHHAHDAYLNAVVGTALIKKYPKLESEFVYGDYKVYDVRKMIAKSEQEIGKATAKYFFYSNIMNFFKTEITLANGEIRKRPLIETNGETGEIVWDKGRDFATVRKVLSMPQVNIVKKTEVQTGGFSKESILPKRNSDKLIARKKDWDPKKYGGFDSPTVAYSVLVVAKVEKGKSKKLKSVKELLGITIMERSSFEKNPIDFLEAKGYKEVKKDLIIKLPKYSLFELENGRKRMLASAGELQKGNELALPSKYVNFLYLASHYEKLKGSPEDNEQKQLFVEQHKHYLDEIIEQISEFSKRVILADANLDKVLSAYNKHRDKPIREQAENIIHLFTLTNLGAPAAFKYFDTTIDRKRYTSTKEVLDATLIHQSITGLYETRIDLSQLGGDGGGGSGGGPAPGGTLNIEDEHRLHETSKEPDVSLGSTWLSDFPQAWAETGGMGLAVRQAPLIIPLKATSTPVSIKQYPMSQEARLGIKPHIQRLLDQGILVPCQSPWNTPLLPVKKPGTNDYRPVQDLREVNKRVEDIHPTVPNPYNLLSGLPPSHQWYTVLDLKDAFFCLRLHPTSQPLFAFEWRDPEMGISGQLTWTRLPQGFKNSPTLFNEALHRDLADFRIQHPDLILLQYVDDLLLAATSELDCQQGTRALLQTLGNLGYRASAKKAQICQKQVKYLGYLLKEGQRWLTEARKETVMGQPTPKTPRQLREFLGTAGFCRLWIPGFAEMAAPLYPLTKPGTLFNWGPDQQKAYQEIKQALLTAPALGLPDLTKPFELFVDEKQGYAKGVLTQKLGPWRRPVAYLSKKLDPVAAGWPPCLRMVAAIAVLTKDAGKLTMGQPLVILAPHAVEALVKQPPDRWLSNARMTHYQALLLDTDRVQFGPVVALNPATLLPLPEEGLQHNCLDILAEAHGTRPDLTDQPLPDADHTWYTDGSSLLQEGQRKAGAAVTTETEVIWAKALPAGTSAQRAELIALTQALKMAEGKKLNVYTDSRYAFATAHIHGEIYRRRGWLTSEGKEIKNKDEILALLKALFLPKRLSIIHCPGHQKGHSAEARGNRMADQAARKAAITETPDTSTLLAGKRTADGSEFEKRTADGSEFESPKKKAKVE

SEQ ID NO: 2767 - protein, 2096 aa, synthetic construct
MPAAKRVKLDGGDKKYSIGLDIGTNSVGWAVITDEYKVPSKKFKVLGNTDRHSIKKNLIGALLFDSGETAEATRLKRTARRRYTRRKNRICYLQEIFSNEMAKVDDSFFHRLEESFLVEEDKKHERHPIFGNIVDEVAYHEKYPTIYHLRKKLVDSTDKADLRLIYLALAHMIKFRGHFLIEGDLNPDNSDVDKLFIQLVQTYNQLFEENPINASGVDAKAILSARLSKSRRLENLIAQLPGEKKNGLFGNLIALSLGLTPNFKSNFDLAEDAKLQLSKDTYDDDLDNLLAQIGDQYADLFLAAKNLSDAILLSDILRVNTEITKAPLSASMIKRYDEHHQDLTLLKALVRQQLPEKYKEIFFDQSKNGYAGYIDGGASQEEFYKFIKPILEKMDGTEELLVKLNREDLLRKQRTFDNGSIPHQIHLGELHAILRRQEDFYPFLKDNREKIEKILTFRIPYYVGPLARGNSRFAWMTRKSEETITPWNFEEVVDKGASAQSFIERMTNFDKNLPNEKVLPKHSLLYEYFTVYNELTKVKYVTEGMRKPAFLSGEQKKAIVDLLFKTNRKVTVKQLKEDYFKKIECFDSVEISGVEDRFNASLGTYHDLLKIIKDKDFLDNEENEDILEDIVLTLTLFEDREMIEERLKTYAHLFDDKVMKQLKRRRYTGWGRLSRKLINGIRDKQSGKTILDFLKSDGFANRNFMQLIHDDSLTFKEDIQKAQVSGQGDSLHEHIANLAGSPAIKKGILQTVKVVDELVKVMGRHKPENIVIEMARENQTTQKGQKNSRERMKRIEEGIKELGSQILKEHPVENTQLQNEKLYLYYLQNGRDMYVDQELDINRLSDYDVDHIVPQSFLKDDSIDNKVLTRSDKARGKSDNVPSEEVVKKMKNYWRQLLNAKLITQRKFDNLTKAERGGLSELDKAGFIKRQLVETRQITKHVAQILDSRMNTKYDENDKLIREVKVITLKSKLVSDFRKDFQFYKVREINNYHHAHDAYLNAVVGTALIKKYPKLESEFVYGDYKVYDVRKMIAKSEQEIGKATAKYFFYSNIMNFFKTEITLANGEIRKRPLIETNGETGEIVWDKGRDFATVRKVLSMPQVNIVKKTEVQTGGFSKESILPKRNSDKLIARKKDWDPKKYGGFDSPTVAYSVLVVAKVEKGKSKKLKSVKELLGITIMERSSFEKNPIDFLEAKGYKEVKKDLIIKLPKYSLFELENGRKRMLASAGELQKGNELALPSKYVNFLYLASHYEKLKGSPEDNEQKQLFVEQHKHYLDEIIEQISEFSKRVILADANLDKVLSAYNKHRDKPIREQAENIIHLFTLTNLGAPAAFKYFDTTIDRKRYTSTKEVLDATLIHQSITGLYETRIDLSQLGGDGGEAAAKGGSGGGGGTLNIEDEHRLHETSKEPDVSLGSTWLSDFPQAWAETGGMGLAVRQAPLIIPLKATSTPVSIKQYPMSQEARLGIKPHIQRLLDQGILVPCQSPWNTPLLPVKKPGTNDYRPVQDLREVNKRVEDIHPTVPNPYNLLSGLPPSHQWYTVLDLKDAFFCLRLHPTSQPLFAFEWRDPEMGISGQLTWTRLPQGFKNSPTLFNEALHRDLADFRIQHPDLILLQYVDDLLLAATSELDCQQGTRALLQTLGNLGYRASAKKAQICQKQVKYLGYLLKEGQRWLTEARKETVMGQPTPKTPRQLREFLGTAGFCRLWIPGFAEMAAPLYPLTKPGTLFNWGPDQQKAYQEIKQALLTAPALGLPDLTKPFELFVDEKQGYAKGVLTQKLGPWRRPVAYLSKKLDPVAAGWPPCLRMVAAIAVLTKDAGKLTMGQPLVILAPHAVEALVKQPPDRWLSNARMTHYQALLLDTDRVQFGPVVALNPATLLPLPEEGLQHNCLDILAEAHGTRPDLTDQPLPDADHTWYTDGSSLLQEGQRKAGAAVTTETEVIWAKALPAGTSAQRAELIALTQALKMAEGKKLNVYTDSRYAFATAHIHGEIYRRRGWLTSEGKEIKNKDEILALLKALFLPKRLSIIHCPGHQKGHSAEARGNRMADQAARKAAITETPDTSTLLAGKRTADGSEFEKRTADGSEFESPKKKAKVE

SEQ ID NO: 2768 - protein, 2094 aa, synthetic construct
MPAAKRVKLDGGDKKYSIGLDIGTNSVGWAVITDEYKVPSKKFKVLGNTDRHSIKKNLIGALLFDSGETAEATRLKRTARRRYTRRKNRICYLQEIFSNEMAKVDDSFFHRLEESFLVEEDKKHERHPIFGNIVDEVAYHEKYPTIYHLRKKLVDSTDKADLRLIYLALAHMIKFRGHFLIEGDLNPDNSDVDKLFIQLVQTYNQLFEENPINASGVDAKAILSARLSKSRRLENLIAQLPGEKKNGLFGNLIALSLGLTPNFKSNFDLAEDAKLQLSKDTYDDDLDNLLAQIGDQYADLFLAAKNLSDAILLSDILRVNTEITKAPLSASMIKRYDEHHQDLTLLKALVRQQLPEKYKEIFFDQSKNGYAGYIDGGASQEEFYKFIKPILEKMDGTEELLVKLNREDLLRKQRTFDNGSIPHQIHLGELHAILRRQEDFYPFLKDNREKIEKILTFRIPYYVGPLARGNSRFAWMTRKSEETITPWNFEEVVDKGASAQSFIERMTNFDKNLPNEKVLPKHSLLYEYFTVYNELTKVKYVTEGMRKPAFLSGEQKKAIVDLLFKTNRKVTVKQLKEDYFKKIECFDSVEISGVEDRFNASLGTYHDLLKIIKDKDFLDNEENEDILEDIVLTLTLFEDREMIEERLKTYAHLFDDKVMKQLKRRRYTGWGRLSRKLINGIRDKQSGKTILDFLKSDGFANRNFMQLIHDDSLTFKEDIQKAQVSGQGDSLHEHIANLAGSPAIKKGILQTVKVVDELVKVMGRHKPENIVIEMARENQTTQKGQKNSRERMKRIEEGIKELGSQILKEHPVENTQLQNEKLYLYYLQNGRDMYVDQELDINRLSDYDVDHIVPQSFLKDDSIDNKVLTRSDKARGKSDNVPSEEVVKKMKNYWRQLLNAKLITQRKFDNLTKAERGGLSELDKAGFIKRQLVETRQITKHVAQILDSRMNTKYDENDKLIREVKVITLKSKLVSDFRKDFQFYKVREINNYHHAHDAYLNAVVGTALIKKYPKLESEFVYGDYKVYDVRKMIAKSEQEIGKATAKYFFYSNIMNFFKTEITLANGEIRKRPLIETNGETGEIVWDKGRDFATVRKVLSMPQVNIVKKTEVQTGGFSKESILPKRNSDKLIARKKDWDPKKYGGFDSPTVAYSVLVVAKVEKGKSKKLKSVKELLGITIMERSSFEKNPIDFLEAKGYKEVKKDLIIKLPKYSLFELENGRKRMLASAGELQKGNELALPSKYVNFLYLASHYEKLKGSPEDNEQKQLFVEQHKHYLDEIIEQISEFSKRVILADANLDKVLSAYNKHRDKPIREQAENIIHLFTLTNLGAPAAFKYFDTTIDRKRYTSTKEVLDATLIHQSITGLYETRIDLSQLGGDGGGSSGGSPAPGGTLNIEDEHRLHETSKEPDVSLGSTWLSDFPQAWAETGGMGLAVRQAPLIIPLKATSTPVSIKQYPMSQEARLGIKPHIQRLLDQGILVPCQSPWNTPLLPVKKPGTNDYRPVQDLREVNKRVEDIHPTVPNPYNLLSGLPPSHQWYTVLDLKDAFFCLRLHPTSQPLFAFEWRDPEMGISGQLTWTRLPQGFKNSPTLFNEALHRDLADFRIQHPDLILLQYVDDLLLAATSELDCQQGTRALLQTLGNLGYRASAKKAQICQKQVKYLGYLLKEGQRWLTEARKETVMGQPTPKTPRQLREFLGTAGFCRLWIPGFAEMAAPLYPLTKPGTLFNWGPDQQKAYQEIKQALLTAPALGLPDLTKPFELFVDEKQGYAKGVLTQKLGPWRRPVAYLSKKLDPVAAGWPPCLRMVAAIAVLTKDAGKLTMGQPLVILAPHAVEALVKQPPDRWLSNARMTHYQALLLDTDRVQFGPVVALNPATLLPLPEEGLQHNCLDILAEAHGTRPDLTDQPLPDADHTWYTDGSSLLQEGQRKAGAAVTTETEVIWAKALPAGTSAQRAELIALTQALKMAEGKKLNVYTDSRYAFATAHIHGEIYRRRGWLTSEGKEIKNKDEILALLKALFLPKRLSIIHCPGHQKGHSAEARGNRMADQAARKAAITETPDTSTLLAGKRTADGSEFEKRTADGSEFESPKKKAKVE

SEQ ID NO: 2769 - protein, 2094 aa, synthetic construct
MPAAKRVKLDGGDKKYSIGLDIGTNSVGWAVITDEYKVPSKKFKVLGNTDRHSIKKNLIGALLFDSGETAEATRLKRTARRRYTRRKNRICYLQEIFSNEMAKVDDSFFHRLEESFLVEEDKKHERHPIFGNIVDEVAYHEKYPTIYHLRKKLVDSTDKADLRLIYLALAHMIKFRGHFLIEGDLNPDNSDVDKLFIQLVQTYNQLFEENPINASGVDAKAILSARLSKSRRLENLIAQLPGEKKNGLFGNLIALSLGLTPNFKSNFDLAEDAKLQLSKDTYDDDLDNLLAQIGDQYADLFLAAKNLSDAILLSDILRVNTEITKAPLSASMIKRYDEHHQDLTLLKALVRQQLPEKYKEIFFDQSKNGYAGYIDGGASQEEFYKFIKPILEKMDGTEELLVKLNREDLLRKQRTFDNGSIPHQIHLGELHAILRRQEDFYPFLKDNREKIEKILTFRIPYYVGPLARGNSRFAWMTRKSEETITPWNFEEVVDKGASAQSFIERMTNFDKNLPNEKVLPKHSLLYEYFTVYNELTKVKYVTEGMRKPAFLSGEQKKAIVDLLFKTNRKVTVKQLKEDYFKKIECFDSVEISGVEDRFNASLGTYHDLLKIIKDKDFLDNEENEDILEDIVLTLTLFEDREMIEERLKTYAHLFDDKVMKQLKRRRYTGWGRLSRKLINGIRDKQSGKTILDFLKSDGFANRNFMQLIHDDSLTFKEDIQKAQVSGQGDSLHEHIANLAGSPAIKKGILQTVKVVDELVKVMGRHKPENIVIEMARENQTTQKGQKNSRERMKRIEEGIKELGSQILKEHPVENTQLQNEKLYLYYLQNGRDMYVDQELDINRLSDYDVDHIVPQSFLKDDSIDNKVLTRSDKARGKSDNVPSEEVVKKMKNYWRQLLNAKLITQRKFDNLTKAERGGLSELDKAGFIKRQLVETRQITKHVAQILDSRMNTKYDENDKLIREVKVITLKSKLVSDFRKDFQFYKVREINNYHHAHDAYLNAVVGTALIKKYPKLESEFVYGDYKVYDVRKMIAKSEQEIGKATAKYFFYSNIMNFFKTEITLANGEIRKRPLIETNGETGEIVWDKGRDFATVRKVLSMPQVNIVKKTEVQTGGFSKESILPKRNSDKLIARKKDWDPKKYGGFDSPTVAYSVLVVAKVEKGKSKKLKSVKELLGITIMERSSFEKNPIDFLEAKGYKEVKKDLIIKLPKYSLFELENGRKRMLASAGELQKGNELALPSKYVNFLYLASHYEKLKGSPEDNEQKQLFVEQHKHYLDEIIEQISEFSKRVILADANLDKVLSAYNKHRDKPIREQAENIIHLFTLTNLGAPAAFKYFDTTIDRKRYTSTKEVLDATLIHQSITGLYETRIDLSQLGGDGGGGGGGSPAPGGTLNIEDEHRLHETSKEPDVSLGSTWLSDFPQAWAETGGMGLAVRQAPLIIPLKATSTPVSIKQYPMSQEARLGIKPHIQRLLDQGILVPCQSPWNTPLLPVKKPGTNDYRPVQDLREVNKRVEDIHPTVPNPYNLLSGLPPSHQWYTVLDLKDAFFCLRLHPTSQPLFAFEWRDPEMGISGQLTWTRLPQGFKNSPTLFNEALHRDLADFRIQHPDLILLQYVDDLLLAATSELDCQQGTRALLQTLGNLGYRASAKKAQICQKQVKYLGYLLKEGQRWLTEARKETVMGQPTPKTPRQLREFLGTAGFCRLWIPGFAEMAAPLYPLTKPGTLFNWGPDQQKAYQEIKQALLTAPALGLPDLTKPFELFVDEKQGYAKGVLTQKLGPWRRPVAYLSKKLDPVAAGWPPCLRMVAAIAVLTKDAGKLTMGQPLVILAPHAVEALVKQPPDRWLSNARMTHYQALLLDTDRVQFGPVVALNPATLLPLPEEGLQHNCLDILAEAHGTRPDLTDQPLPDADHTWYTDGSSLLQEGQRKAGAAVTTETEVIWAKALPAGTSAQRAELIALTQALKMAEGKKLNVYTDSRYAFATAHIHGEIYRRRGWLTSEGKEIKNKDEILALLKALFLPKRLSIIHCPGHQKGHSAEARGNRMADQAARKAAITETPDTSTLLAGKRTADGSEFEKRTADGSEFESPKKKAKVE

SEQ ID NO: 2770 - protein, 2094 aa, synthetic construct
MPAAKRVKLDGGDKKYSIGLDIGTNSVGWAVITDEYKVPSKKFKVLGNTDRHSIKKNLIGALLFDSGETAEATRLKRTARRRYTRRKNRICYLQEIFSNEMAKVDDSFFHRLEESFLVEEDKKHERHPIFGNIVDEVAYHEKYPTIYHLRKKLVDSTDKADLRLIYLALAHMIKFRGHFLIEGDLNPDNSDVDKLFIQLVQTYNQLFEENPINASGVDAKAILSARLSKSRRLENLIAQLPGEKKNGLFGNLIALSLGLTPNFKSNFDLAEDAKLQLSKDTYDDDLDNLLAQIGDQYADLFLAAKNLSDAILLSDILRVNTEITKAPLSASMIKRYDEHHQDLTLLKALVRQQLPEKYKEIFFDQSKNGYAGYIDGGASQEEFYKFIKPILEKMDGTEELLVKLNREDLLRKQRTFDNGSIPHQIHLGELHAILRRQEDFYPFLKDNREKIEKILTFRIPYYVGPLARGNSRFAWMTRKSEETITPWNFEEVVDKGASAQSFIERMTNFDKNLPNEKVLPKHSLLYEYFTVYNELTKVKYVTEGMRKPAFLSGEQKKAIVDLLFKTNRKVTVKQLKEDYFKKIECFDSVEISGVEDRFNASLGTYHDLLKIIKDKDFLDNEENEDILEDIVLTLTLFEDREMIEERLKTYAHLFDDKVMKQLKRRRYTGWGRLSRKLINGIRDKQSGKTILDFLKSDGFANRNFMQLIHDDSLTFKEDIQKAQVSGQGDSLHEHIANLAGSPAIKKGILQTVKVVDELVKVMGRHKPENIVIEMARENQTTQKGQKNSRERMKRIEEGIKELGSQILKEHPVENTQLQNEKLYLYYLQNGRDMYVDQELDINRLSDYDVDHIVPQSFLKDDSIDNKVLTRSDKARGKSDNVPSEEVVKKMKNYWRQLLNAKLITQRKFDNLTKAERGGLSELDKAGFIKRQLVETRQITKHVAQILDSRMNTKYDENDKLIREVKVITLKSKLVSDFRKDFQFYKVREINNYHHAHDAYLNAVVGTALIKKYPKLESEFVYGDYKVYDVRKMIAKSEQEIGKATAKYFFYSNIMNFFKTEITLANGEIRKRPLIETNGETGEIVWDKGRDFATVRKVLSMPQVNIVKKTEVQTGGFSKESILPKRNSDKLIARKKDWDPKKYGGFDSPTVAYSVLVVAKVEKGKSKKLKSVKELLGITIMERSSFEKNPIDFLEAKGYKEVKKDLIIKLPKYSLFELENGRKRMLASAGELQKGNELALPSKYVNFLYLASHYEKLKGSPEDNEQKQLFVEQHKHYLDEIIEQISEFSKRVILADANLDKVLSAYNKHRDKPIREQAENIIHLFTLTNLGAPAAFKYFDTTIDRKRYTSTKEVLDATLIHQSITGLYETRIDLSQLGGDGGGGGGSSPAPGGTLNIEDEHRLHETSKEPDVSLGSTWLSDFPQAWAETGGMGLAVRQAPLIIPLKATSTPVSIKQYPMSQEARLGIKPHIQRLLDQGILVPCQSPWNTPLLPVKKPGTNDYRPVQDLREVNKRVEDIHPTVPNPYNLLSGLPPSHQWYTVLDLKDAFFCLRLHPTSQPLFAFEWRDPEMGISGQLTWTRLPQGFKNSPTLFNEALHRDLADFRIQHPDLILLQYVDDLLLAATSELDCQQGTRALLQTLGNLGYRASAKKAQICQKQVKYLGYLLKEGQRWLTEARKETVMGQPTPKTPRQLREFLGTAGFCRLWIPGFAEMAAPLYPLTKPGTLFNWGPDQQKAYQEIKQALLTAPALGLPDLTKPFELFVDEKQGYAKGVLTQKLGPWRRPVAYLSKKLDPVAAGWPPCLRMVAAIAVLTKDAGKLTMGQPLVILAPHAVEALVKQPPDRWLSNARMTHYQALLLDTDRVQFGPVVALNPATLLPLPEEGLQHNCLDILAEAHGTRPDLTDQPLPDADHTWYTDGSSLLQEGQRKAGAAVTTETEVIWAKALPAGTSAQRAELIALTQALKMAEGKKLNVYTDSRYAFATAHIHGEIYRRRGWLTSEGKEIKNKDEILALLKALFLPKRLSIIHCPGHQKGHSAEARGNRMADQAARKAAITETPDTSTLLAGKRTADGSEFEKRTADGSEFESPKKKAKVE

SEQ ID NO: 2771 - protein, 2105 aa, synthetic construct
MPAAKRVKLDGGDKKYSIGLDIGTNSVGWAVITDEYKVPSKKFKVLGNTDRHSIKKNLIGALLFDSGETAEATRLKRTARRRYTRRKNRICYLQEIFSNEMAKVDDSFFHRLEESFLVEEDKKHERHPIFGNIVDEVAYHEKYPTIYHLRKKLVDSTDKADLRLIYLALAHMIKFRGHFLIEGDLNPDNSDVDKLFIQLVQTYNQLFEENPINASGVDAKAILSARLSKSRRLENLIAQLPGEKKNGLFGNLIALSLGLTPNFKSNFDLAEDAKLQLSKDTYDDDLDNLLAQIGDQYADLFLAAKNLSDAILLSDILRVNTEITKAPLSASMIKRYDEHHQDLTLLKALVRQQLPEKYKEIFFDQSKNGYAGYIDGGASQEEFYKFIKPILEKMDGTEELLVKLNREDLLRKQRTFDNGSIPHQIHLGELHAILRRQEDFYPFLKDNREKIEKILTFRIPYYVGPLARGNSRFAWMTRKSEETITPWNFEEVVDKGASAQSFIERMTNFDKNLPNEKVLPKHSLLYEYFTVYNELTKVKYVTEGMRKPAFLSGEQKKAIVDLLFKTNRKVTVKQLKEDYFKKIECFDSVEISGVEDRFNASLGTYHDLLKIIKDKDFLDNEENEDILEDIVLTLTLFEDREMIEERLKTYAHLFDDKVMKQLKRRRYTGWGRLSRKLINGIRDKQSGKTILDFLKSDGFANRNFMQLIHDDSLTFKEDIQKAQVSGQGDSLHEHIANLAGSPAIKKGILQTVKVVDELVKVMGRHKPENIVIEMARENQTTQKGQKNSRERMKRIEEGIKELGSQILKEHPVENTQLQNEKLYLYYLQNGRDMYVDQELDINRLSDYDVDHIVPQSFLKDDSIDNKVLTRSDKARGKSDNVPSEEVVKKMKNYWRQLLNAKLITQRKFDNLTKAERGGLSELDKAGFIKRQLVETRQITKHVAQILDSRMNTKYDENDKLIREVKVITLKSKLVSDFRKDFQFYKVREINNYHHAHDAYLNAVVGTALIKKYPKLESEFVYGDYKVYDVRKMIAKSEQEIGKATAKYFFYSNIMNFFKTEITLANGEIRKRPLIETNGETGEIVWDKGRDFATVRKVLSMPQVNIVKKTEVQTGGFSKESILPKRNSDKLIARKKDWDPKKYGGFDSPTVAYSVLVVAKVEKGKSKKLKSVKELLGITIMERSSFEKNPIDFLEAKGYKEVKKDLIIKLPKYSLFELENGRKRMLASAGELQKGNELALPSKYVNFLYLASHYEKLKGSPEDNEQKQLFVEQHKHYLDEIIEQISEFSKRVILADANLDKVLSAYNKHRDKPIREQAENIIHLFTLTNLGAPAAFKYFDTTIDRKRYTSTKEVLDATLIHQSITGLYETRIDLSQLGGDGGGGGGSGGGGSGGGGSGGGGSGGTLNIEDEHRLHETSKEPDVSLGSTWLSDFPQAWAETGGMGLAVRQAPLIIPLKATSTPVSIKQYPMSQEARLGIKPHIQRLLDQGILVPCQSPWNTPLLPVKKPGTNDYRPVQDLREVNKRVEDIHPTVPNPYNLLSGLPPSHQWYTVLDLKDAFFCLRLHPTSQPLFAFEWRDPEMGISGQLTWTRLPQGFKNSPTLFNEALHRDLADFRIQHPDLILLQYVDDLLLAATSELDCQQGTRALLQTLGNLGYRASAKKAQICQKQVKYLGYLLKEGQRWLTEARKETVMGQPTPKTPRQLREFLGTAGFCRLWIPGFAEMAAPLYPLTKPGTLFNWGPDQQKAYQEIKQALLTAPALGLPDLTKPFELFVDEKQGYAKGVLTQKLGPWRRPVAYLSKKLDPVAAGWPPCLRMVAAIAVLTKDAGKLTMGQPLVILAPHAVEALVKQPPDRWLSNARMTHYQALLLDTDRVQFGPVVALNPATLLPLPEEGLQHNCLDILAEAHGTRPDLTDQPLPDADHTWYTDGSSLLQEGQRKAGAAVTTETEVIWAKALPAGTSAQRAELIALTQALKMAEGKKLNVYTDSRYAFATAHIHGEIYRRRGWLTSEGKEIKNKDEILALLKALFLPKRLSIIHCPGHQKGHSAEARGNRMADQAARKAAITETPDTSTLLAGKRTADGSEFEKRTADGSEFESPKKKAKVE

SEQ ID NO: 2772 - protein, 2100 aa, synthetic construct
MPAAKRVKLDGGDKKYSIGLDIGTNSVGWAVITDEYKVPSKKFKVLGNTDRHSIKKNLIGALLFDSGETAEATRLKRTARRRYTRRKNRICYLQEIFSNEMAKVDDSFFHRLEESFLVEEDKKHERHPIFGNIVDEVAYHEKYPTIYHLRKKLVDSTDKADLRLIYLALAHMIKFRGHFLIEGDLNPDNSDVDKLFIQLVQTYNQLFEENPINASGVDAKAILSARLSKSRRLENLIAQLPGEKKNGLFGNLIALSLGLTPNFKSNFDLAEDAKLQLSKDTYDDDLDNLLAQIGDQYADLFLAAKNLSDAILLSDILRVNTEITKAPLSASMIKRYDEHHQDLTLLKALVRQQLPEKYKEIFFDQSKNGYAGYIDGGASQEEFYKFIKPILEKMDGTEELLVKLNREDLLRKQRTFDNGSIPHQIHLGELHAILRRQEDFYPFLKDNREKIEKILTFRIPYYVGPLARGNSRFAWMTRKSEETITPWNFEEVVDKGASAQSFIERMTNFDKNLPNEKVLPKHSLLYEYFTVYNELTKVKYVTEGMRKPAFLSGEQKKAIVDLLFKTNRKVTVKQLKEDYFKKIECFDSVEISGVEDRFNASLGTYHDLLKIIKDKDFLDNEENEDILEDIVLTLTLFEDREMIEERLKTYAHLFDDKVMKQLKRRRYTGWGRLSRKLINGIRDKQSGKTILDFLKSDGFANRNFMQLIHDDSLTFKEDIQKAQVSGQGDSLHEHIANLAGSPAIKKGILQTVKVVDELVKVMGRHKPENIVIEMARENQTTQKGQKNSRERMKRIEEGIKELGSQILKEHPVENTQLQNEKLYLYYLQNGRDMYVDQELDINRLSDYDVDHIVPQSFLKDDSIDNKVLTRSDKARGKSDNVPSEEVVKKMKNYWRQLLNAKLITQRKFDNLTKAERGGLSELDKAGFIKRQLVETRQITKHVAQILDSRMNTKYDENDKLIREVKVITLKSKLVSDFRKDFQFYKVREINNYHHAHDAYLNAVVGTALIKKYPKLESEFVYGDYKVYDVRKMIAKSEQEIGKATAKYFFYSNIMNFFKTEITLANGEIRKRPLIETNGETGEIVWDKGRDFATVRKVLSMPQVNIVKKTEVQTGGFSKESILPKRNSDKLIARKKDWDPKKYGGFDSPTVAYSVLVVAKVEKGKSKKLKSVKELLGITIMERSSFEKNPIDFLEAKGYKEVKKDLIIKLPKYSLFELENGRKRMLASAGELQKGNELALPSKYVNFLYLASHYEKLKGSPEDNEQKQLFVEQHKHYLDEIIEQISEFSKRVILADANLDKVLSAYNKHRDKPIREQAENIIHLFTLTNLGAPAAFKYFDTTIDRKRYTSTKEVLDATLIHQSITGLYETRIDLSQLGGDGGEAAAKEAAAKEAAAKGGTLNIEDEHRLHETSKEPDVSLGSTWLSDFPQAWAETGGMGLAVRQAPLIIPLKATSTPVSIKQYPMSQEARLGIKPHIQRLLDQGILVPCQSPWNTPLLPVKKPGTNDYRPVQDLREVNKRVEDIHPTVPNPYNLLSGLPPSHQWYTVLDLKDAFFCLRLHPTSQPLFAFEWRDPEMGISGQLTWTRLPQGFKNSPTLFNEALHRDLADFRIQHPDLILLQYVDDLLLAATSELDCQQGTRALLQTLGNLGYRASAKKAQICQKQVKYLGYLLKEGQRWLTEARKETVMGQPTPKTPRQLREFLGTAGFCRLWIPGFAEMAAPLYPLTKPGTLFNWGPDQQKAYQEIKQALLTAPALGLPDLTKPFELFVDEKQGYAKGVLTQKLGPWRRPVAYLSKKLDPVAAGWPPCLRMVAAIAVLTKDAGKLTMGQPLVILAPHAVEALVKQPPDRWLSNARMTHYQALLLDTDRVQFGPVVALNPATLLPLPEEGLQHNCLDILAEAHGTRPDLTDQPLPDADHTWYTDGSSLLQEGQRKAGAAVTTETEVIWAKALPAGTSAQRAELIALTQALKMAEGKKLNVYTDSRYAFATAHIHGEIYRRRGWLTSEGKEIKNKDEILALLKALFLPKRLSIIHCPGHQKGHSAEARGNRMADQAARKAAITETPDTSTLLAGKRTADGSEFEKRTADGSEFESPKKKAKVE

SEQ ID NO: 2773 - protein, 2094 aa, synthetic construct
MPAAKRVKLDGGDKKYSIGLDIGTNSVGWAVITDEYKVPSKKFKVLGNTDRHSIKKNLIGALLFDSGETAEATRLKRTARRRYTRRKNRICYLQEIFSNEMAKVDDSFFHRLEESFLVEEDKKHERHPIFGNIVDEVAYHEKYPTIYHLRKKLVDSTDKADLRLIYLALAHMIKFRGHFLIEGDLNPDNSDVDKLFIQLVQTYNQLFEENPINASGVDAKAILSARLSKSRRLENLIAQLPGEKKNGLFGNLIALSLGLTPNFKSNFDLAEDAKLQLSKDTYDDDLDNLLAQIGDQYADLFLAAKNLSDAILLSDILRVNTEITKAPLSASMIKRYDEHHQDLTLLKALVRQQLPEKYKEIFFDQSKNGYAGYIDGGASQEEFYKFIKPILEKMDGTEELLVKLNREDLLRKQRTFDNGSIPHQIHLGELHAILRRQEDFYPFLKDNREKIEKILTFRIPYYVGPLARGNSRFAWMTRKSEETITPWNFEEVVDKGASAQSFIERMTNFDKNLPNEKVLPKHSLLYEYFTVYNELTKVKYVTEGMRKPAFLSGEQKKAIVDLLFKTNRKVTVKQLKEDYFKKIECFDSVEISGVEDRFNASLGTYHDLLKIIKDKDFLDNEENEDILEDIVLTLTLFEDREMIEERLKTYAHLFDDKVMKQLKRRRYTGWGRLSRKLINGIRDKQSGKTILDFLKSDGFANRNFMQLIHDDSLTFKEDIQKAQVSGQGDSLHEHIANLAGSPAIKKGILQTVKVVDELVKVMGRHKPENIVIEMARENQTTQKGQKNSRERMKRIEEGIKELGSQILKEHPVENTQLQNEKLYLYYLQNGRDMYVDQELDINRLSDYDVDHIVPQSFLKDDSIDNKVLTRSDKARGKSDNVPSEEVVKKMKNYWRQLLNAKLITQRKFDNLTKAERGGLSELDKAGFIKRQLVETRQITKHVAQILDSRMNTKYDENDKLIREVKVITLKSKLVSDFRKDFQFYKVREINNYHHAHDAYLNAVVGTALIKKYPKLESEFVYGDYKVYDVRKMIAKSEQEIGKATAKYFFYSNIMNFFKTEITLANGEIRKRPLIETNGETGEIVWDKGRDFATVRKVLSMPQVNIVKKTEVQTGGFSKESILPKRNSDKLIARKKDWDPKKYGGFDSPTVAYSVLVVAKVEKGKSKKLKSVKELLGITIMERSSFEKNPIDFLEAKGYKEVKKDLIIKLPKYSLFELENGRKRMLASAGELQKGNELALPSKYVNFLYLASHYEKLKGSPEDNEQKQLFVEQHKHYLDEIIEQISEFSKRVILADANLDKVLSAYNKHRDKPIREQAENIIHLFTLTNLGAPAAFKYFDTTIDRKRYTSTKEVLDATLIHQSITGLYETRIDLSQLGGDGGGGGPAPGSSGGTLNIEDEHRLHETSKEPDVSLGSTWLSDFPQAWAETGGMGLAVRQAPLIIPLKATSTPVSIKQYPMSQEARLGIKPHIQRLLDQGILVPCQSPWNTPLLPVKKPGTNDYRPVQDLREVNKRVEDIHPTVPNPYNLLSGLPPSHQWYTVLDLKDAFFCLRLHPTSQPLFAFEWRDPEMGISGQLTWTRLPQGFKNSPTLFNEALHRDLADFRIQHPDLILLQYVDDLLLAATSELDCQQGTRALLQTLGNLGYRASAKKAQICQKQVKYLGYLLKEGQRWLTEARKETVMGQPTPKTPRQLREFLGTAGFCRLWIPGFAEMAAPLYPLTKPGTLFNWGPDQQKAYQEIKQALLTAPALGLPDLTKPFELFVDEKQGYAKGVLTQKLGPWRRPVAYLSKKLDPVAAGWPPCLRMVAAIAVLTKDAGKLTMGQPLVILAPHAVEALVKQPPDRWLSNARMTHYQALLLDTDRVQFGPVVALNPATLLPLPEEGLQHNCLDILAEAHGTRPDLTDQPLPDADHTWYTDGSSLLQEGQRKAGAAVTTETEVIWAKALPAGTSAQRAELIALTQALKMAEGKKLNVYTDSRYAFATAHIHGEIYRRRGWLTSEGKEIKNKDEILALLKALFLPKRLSIIHCPGHQKGHSAEARGNRMADQAARKAAITETPDTSTLLAGKRTADGSEFEKRTADGSEFESPKKKAKVE

SEQ ID NO: 2774 - protein, 2093 aa, synthetic construct
MPAAKRVKLDGGDKKYSIGLDIGTNSVGWAVITDEYKVPSKKFKVLGNTDRHSIKKNLIGALLFDSGETAEATRLKRTARRRYTRRKNRICYLQEIFSNEMAKVDDSFFHRLEESFLVEEDKKHERHPIFGNIVDEVAYHEKYPTIYHLRKKLVDSTDKADLRLIYLALAHMIKFRGHFLIEGDLNPDNSDVDKLFIQLVQTYNQLFEENPINASGVDAKAILSARLSKSRRLENLIAQLPGEKKNGLFGNLIALSLGLTPNFKSNFDLAEDAKLQLSKDTYDDDLDNLLAQIGDQYADLFLAAKNLSDAILLSDILRVNTEITKAPLSASMIKRYDEHHQDLTLLKALVRQQLPEKYKEIFFDQSKNGYAGYIDGGASQEEFYKFIKPILEKMDGTEELLVKLNREDLLRKQRTFDNGSIPHQIHLGELHAILRRQEDFYPFLKDNREKIEKILTFRIPYYVGPLARGNSRFAWMTRKSEETITPWNFEEVVDKGASAQSFIERMTNFDKNLPNEKVLPKHSLLYEYFTVYNELTKVKYVTEGMRKPAFLSGEQKKAIVDLLFKTNRKVTVKQLKEDYFKKIECFDSVEISGVEDRFNASLGTYHDLLKIIKDKDFLDNEENEDILEDIVLTLTLFEDREMIEERLKTYAHLFDDKVMKQLKRRRYTGWGRLSRKLINGIRDKQSGKTILDFLKSDGFANRNFMQLIHDDSLTFKEDIQKAQVSGQGDSLHEHIANLAGSPAIKKGILQTVKVVDELVKVMGRHKPENIVIEMARENQTTQKGQKNSRERMKRIEEGIKELGSQILKEHPVENTQLQNEKLYLYYLQNGRDMYVDQELDINRLSDYDVDHIVPQSFLKDDSIDNKVLTRSDKARGKSDNVPSEEVVKKMKNYWRQLLNAKLITQRKFDNLTKAERGGLSELDKAGFIKRQLVETRQITKHVAQILDSRMNTKYDENDKLIREVKVITLKSKLVSDFRKDFQFYKVREINNYHHAHDAYLNAVVGTALIKKYPKLESEFVYGDYKVYDVRKMIAKSEQEIGKATAKYFFYSNIMNFFKTEITLANGEIRKRPLIETNGETGEIVWDKGRDFATVRKVLSMPQVNIVKKTEVQTGGFSKESILPKRNSDKLIARKKDWDPKKYGGFDSPTVAYSVLVVAKVEKGKSKKLKSVKELLGITIMERSSFEKNPIDFLEAKGYKEVKKDLIIKLPKYSLFELENGRKRMLASAGELQKGNELALPSKYVNFLYLASHYEKLKGSPEDNEQKQLFVEQHKHYLDEIIEQISEFSKRVILADANLDKVLSAYNKHRDKPIREQAENIIHLFTLTNLGAPAAFKYFDTTIDRKRYTSTKEVLDATLIHQSITGLYETRIDLSQLGGDGGGGSEAAAKGGTLNIEDEHRLHETSKEPDVSLGSTWLSDFPQAWAETGGMGLAVRQAPLIIPLKATSTPVSIKQYPMSQEARLGIKPHIQRLLDQGILVPCQSPWNTPLLPVKKPGTNDYRPVQDLREVNKRVEDIHPTVPNPYNLLSGLPPSHQWYTVLDLKDAFFCLRLHPTSQPLFAFEWRDPEMGISGQLTWTRLPQGFKNSPTLFNEALHRDLADFRIQHPDLILLQYVDDLLLAATSELDCQQGTRALLQTLGNLGYRASAKKAQICQKQVKYLGYLLKEGQRWLTEARKETVMGQPTPKTPRQLREFLGTAGFCRLWIPGFAEMAAPLYPLTKPGTLFNWGPDQQKAYQEIKQALLTAPALGLPDLTKPFELFVDEKQGYAKGVLTQKLGPWRRPVAYLSKKLDPVAAGWPPCLRMVAAIAVLTKDAGKLTMGQPLVILAPHAVEALVKQPPDRWLSNARMTHYQALLLDTDRVQFGPVVALNPATLLPLPEEGLQHNCLDILAEAHGTRPDLTDQPLPDADHTWYTDGSSLLQEGQRKAGAAVTTETEVIWAKALPAGTSAQRAELIALTQALKMAEGKKLNVYTDSRYAFATAHIHGEIYRRRGWLTSEGKEIKNKDEILALLKALFLPKRLSIIHCPGHQKGHSAEARGNRMADQAARKAAITETPDTSTLLAGKRTADGSEFEKRTADGSEFESPKKKAKVE

SEQ ID NO: 2775 - protein, 2096 aa, synthetic construct
MPAAKRVKLDGGDKKYSIGLDIGTNSVGWAVITDEYKVPSKKFKVLGNTDRHSIKKNLIGALLFDSGETAEATRLKRTARRRYTRRKNRICYLQEIFSNEMAKVDDSFFHRLEESFLVEEDKKHERHPIFGNIVDEVAYHEKYPTIYHLRKKLVDSTDKADLRLIYLALAHMIKFRGHFLIEGDLNPDNSDVDKLFIQLVQTYNQLFEENPINASGVDAKAILSARLSKSRRLENLIAQLPGEKKNGLFGNLIALSLGLTPNFKSNFDLAEDAKLQLSKDTYDDDLDNLLAQIGDQYADLFLAAKNLSDAILLSDILRVNTEITKAPLSASMIKRYDEHHQDLTLLKALVRQQLPEKYKEIFFDQSKNGYAGYIDGGASQEEFYKFIKPILEKMDGTEELLVKLNREDLLRKQRTFDNGSIPHQIHLGELHAILRRQEDFYPFLKDNREKIEKILTFRIPYYVGPLARGNSRFAWMTRKSEETITPWNFEEVVDKGASAQSFIERMTNFDKNLPNEKVLPKHSLLYEYFTVYNELTKVKYVTEGMRKPAFLSGEQKKAIVDLLFKTNRKVTVKQLKEDYFKKIECFDSVEISGVEDRFNASLGTYHDLLKIIKDKDFLDNEENEDILEDIVLTLTLFEDREMIEERLKTYAHLFDDKVMKQLKRRRYTGWGRLSRKLINGIRDKQSGKTILDFLKSDGFANRNFMQLIHDDSLTFKEDIQKAQVSGQGDSLHEHIANLAGSPAIKKGILQTVKVVDELVKVMGRHKPENIVIEMARENQTTQKGQKNSRERMKRIEEGIKELGSQILKEHPVENTQLQNEKLYLYYLQNGRDMYVDQELDINRLSDYDVDHIVPQSFLKDDSIDNKVLTRSDKARGKSDNVPSEEVVKKMKNYWRQLLNAKLITQRKFDNLTKAERGGLSELDKAGFIKRQLVETRQITKHVAQILDSRMNTKYDENDKLIREVKVITLKSKLVSDFRKDFQFYKVREINNYHHAHDAYLNAVVGTALIKKYPKLESEFVYGDYKVYDVRKMIAKSEQEIGKATAKYFFYSNIMNFFKTEITLANGEIRKRPLIETNGETGEIVWDKGRDFATVRKVLSMPQVNIVKKTEVQTGGFSKESILPKRNSDKLIARKKDWDPKKYGGFDSPTVAYSVLVVAKVEKGKSKKLKSVKELLGITIMERSSFEKNPIDFLEAKGYKEVKKDLIIKLPKYSLFELENGRKRMLASAGELQKGNELALPSKYVNFLYLASHYEKLKGSPEDNEQKQLFVEQHKHYLDEIIEQISEFSKRVILADANLDKVLSAYNKHRDKPIREQAENIIHLFTLTNLGAPAAFKYFDTTIDRKRYTSTKEVLDATLIHQSITGLYETRIDLSQLGGDGGGSSEAAAKPAPGGTLNIEDEHRLHETSKEPDVSLGSTWLSDFPQAWAETGGMGLAVRQAPLIIPLKATSTPVSIKQYPMSQEARLGIKPHIQRLLDQGILVPCQSPWNTPLLPVKKPGTNDYRPVQDLREVNKRVEDIHPTVPNPYNLLSGLPPSHQWYTVLDLKDAFFCLRLHPTSQPLFAFEWRDPEMGISGQLTWTRLPQGFKNSPTLFNEALHRDLADFRIQHPDLILLQYVDDLLLAATSELDCQQGTRALLQTLGNLGYRASAKKAQICQKQVKYLGYLLKEGQRWLTEARKETVMGQPTPKTPRQLREFLGTAGFCRLWIPGFAEMAAPLYPLTKPGTLFNWGPDQQKAYQEIKQALLTAPALGLPDLTKPFELFVDEKQGYAKGVLTQKLGPWRRPVAYLSKKLDPVAAGWPPCLRMVAAIAVLTKDAGKLTMGQPLVILAPHAVEALVKQPPDRWLSNARMTHYQALLLDTDRVQFGPVVALNPATLLPLPEEGLQHNCLDILAEAHGTRPDLTDQPLPDADHTWYTDGSSLLQEGQRKAGAAVTTETEVIWAKALPAGTSAQRAELIALTQALKMAEGKKLNVYTDSRYAFATAHIHGEIYRRRGWLTSEGKEIKNKDEILALLKALFLPKRLSIIHCPGHQKGHSAEARGNRMADQAARKAAITETPDTSTLLAGKRTADGSEFEKRTADGSEFESPKKKAKVE

SEQ ID NO: 2776 - protein, 2096 aa, synthetic construct
MPAAKRVKLDGGDKKYSIGLDIGTNSVGWAVITDEYKVPSKKFKVLGNTDRHSIKKNLIGALLFDSGETAEATRLKRTARRRYTRRKNRICYLQEIFSNEMAKVDDSFFHRLEESFLVEEDKKHERHPIFGNIVDEVAYHEKYPTIYHLRKKLVDSTDKADLRLIYLALAHMIKFRGHFLIEGDLNPDNSDVDKLFIQLVQTYNQLFEENPINASGVDAKAILSARLSKSRRLENLIAQLPGEKKNGLFGNLIALSLGLTPNFKSNFDLAEDAKLQLSKDTYDDDLDNLLAQIGDQYADLFLAAKNLSDAILLSDILRVNTEITKAPLSASMIKRYDEHHQDLTLLKALVRQQLPEKYKEIFFDQSKNGYAGYIDGGASQEEFYKFIKPILEKMDGTEELLVKLNREDLLRKQRTFDNGSIPHQIHLGELHAILRRQEDFYPFLKDNREKIEKILTFRIPYYVGPLARGNSRFAWMTRKSEETITPWNFEEVVDKGASAQSFIERMTNFDKNLPNEKVLPKHSLLYEYFTVYNELTKVKYVTEGMRKPAFLSGEQKKAIVDLLFKTNRKVTVKQLKEDYFKKIECFDSVEISGVEDRFNASLGTYHDLLKIIKDKDFLDNEENEDILEDIVLTLTLFEDREMIEERLKTYAHLFDDKVMKQLKRRRYTGWGRLSRKLINGIRDKQSGKTILDFLKSDGFANRNFMQLIHDDSLTFKEDIQKAQVSGQGDSLHEHIANLAGSPAIKKGILQTVKVVDELVKVMGRHKPENIVIEMARENQTTQKGQKNSRERMKRIEEGIKELGSQILKEHPVENTQLQNEKLYLYYLQNGRDMYVDQELDINRLSDYDVDHIVPQSFLKDDSIDNKVLTRSDKARGKSDNVPSEEVVKKMKNYWRQLLNAKLITQRKFDNLTKAERGGLSELDKAGFIKRQLVETRQITKHVAQILDSRMNTKYDENDKLIREVKVITLKSKLVSDFRKDFQFYKVREINNYHHAHDAYLNAVVGTALIKKYPKLESEFVYGDYKVYDVRKMIAKSEQEIGKATAKYFFYSNIMNFFKTEITLANGEIRKRPLIETNGETGEIVWDKGRDFATVRKVLSMPQVNIVKKTEVQTGGFSKESILPKRNSDKLIARKKDWDPKKYGGFDSPTVAYSVLVVAKVEKGKSKKLKSVKELLGITIMERSSFEKNPIDFLEAKGYKEVKKDLIIKLPKYSLFELENGRKRMLASAGELQKGNELALPSKYVNFLYLASHYEKLKGSPEDNEQKQLFVEQHKHYLDEIIEQISEFSKRVILADANLDKVLSAYNKHRDKPIREQAENIIHLFTLTNLGAPAAFKYFDTTIDRKRYTSTKEVLDATLIHQSITGLYETRIDLSQLGGDGGGGSPAPEAAAKGGTLNIEDEHRLHETSKEPDVSLGSTWLSDFPQAWAETGGMGLAVRQAPLIIPLKATSTPVSIKQYPMSQEARLGIKPHIQRLLDQGILVPCQSPWNTPLLPVKKPGTNDYRPVQDLREVNKRVEDIHPTVPNPYNLLSGLPPSHQWYTVLDLKDAFFCLRLHPTSQPLFAFEWRDPEMGISGQLTWTRLPQGFKNSPTLFNEALHRDLADFRIQHPDLILLQYVDDLLLAATSELDCQQGTRALLQTLGNLGYRASAKKAQICQKQVKYLGYLLKEGQRWLTEARKETVMGQPTPKTPRQLREFLGTAGFCRLWIPGFAEMAAPLYPLTKPGTLFNWGPDQQKAYQEIKQALLTAPALGLPDLTKPFELFVDEKQGYAKGVLTQKLGPWRRPVAYLSKKLDPVAAGWPPCLRMVAAIAVLTKDAGKLTMGQPLVILAPHAVEALVKQPPDRWLSNARMTHYQALLLDTDRVQFGPVVALNPATLLPLPEEGLQHNCLDILAEAHGTRPDLTDQPLPDADHTWYTDGSSLLQEGQRKAGAAVTTETEVIWAKALPAGTSAQRAELIALTQALKMAEGKKLNVYTDSRYAFATAHIHGEIYRRRGWLTSEGKEIKNKDEILALLKALFLPKRLSIIHCPGHQKGHSAEARGNRMADQAARKAAITETPDTSTLLAGKRTADGSEFEKRTADGSEFESPKKKAKVE

SEQ ID NO: 2777 - protein, 2096 aa, synthetic construct
MPAAKRVKLDGGDKKYSIGLDIGTNSVGWAVITDEYKVPSKKFKVLGNTDRHSIKKNLIGALLFDSGETAEATRLKRTARRRYTRRKNRICYLQEIFSNEMAKVDDSFFHRLEESFLVEEDKKHERHPIFGNIVDEVAYHEKYPTIYHLRKKLVDSTDKADLRLIYLALAHMIKFRGHFLIEGDLNPDNSDVDKLFIQLVQTYNQLFEENPINASGVDAKAILSARLSKSRRLENLIAQLPGEKKNGLFGNLIALSLGLTPNFKSNFDLAEDAKLQLSKDTYDDDLDNLLAQIGDQYADLFLAAKNLSDAILLSDILRVNTEITKAPLSASMIKRYDEHHQDLTLLKALVRQQLPEKYKEIFFDQSKNGYAGYIDGGASQEEFYKFIKPILEKMDGTEELLVKLNREDLLRKQRTFDNGSIPHQIHLGELHAILRRQEDFYPFLKDNREKIEKILTFRIPYYVGPLARGNSRFAWMTRKSEETITPWNFEEVVDKGASAQSFIERMTNFDKNLPNEKVLPKHSLLYEYFTVYNELTKVKYVTEGMRKPAFLSGEQKKAIVDLLFKTNRKVTVKQLKEDYFKKIECFDSVEISGVEDRFNASLGTYHDLLKIIKDKDFLDNEENEDILEDIVLTLTLFEDREMIEERLKTYAHLFDDKVMKQLKRRRYTGWGRLSRKLINGIRDKQSGKTILDFLKSDGFANRNFMQLIHDDSLTFKEDIQKAQVSGQGDSLHEHIANLAGSPAIKKGILQTVKVVDELVKVMGRHKPENIVIEMARENQTTQKGQKNSRERMKRIEEGIKELGSQILKEHPVENTQLQNEKLYLYYLQNGRDMYVDQELDINRLSDYDVDHIVPQSFLKDDSIDNKVLTRSDKARGKSDNVPSEEVVKKMKNYWRQLLNAKLITQRKFDNLTKAERGGLSELDKAGFIKRQLVETRQITKHVAQILDSRMNTKYDENDKLIREVKVITLKSKLVSDFRKDFQFYKVREINNYHHAHDAYLNAVVGTALIKKYPKLESEFVYGDYKVYDVRKMIAKSEQEIGKATAKYFFYSNIMNFFKTEITLANGEIRKRPLIETNGETGEIVWDKGRDFATVRKVLSMPQVNIVKKTEVQTGGFSKESILPKRNSDKLIARKKDWDPKKYGGFDSPTVAYSVLVVAKVEKGKSKKLKSVKELLGITIMERSSFEKNPIDFLEAKGYKEVKKDLIIKLPKYSLFELENGRKRMLASAGELQKGNELALPSKYVNFLYLASHYEKLKGSPEDNEQKQLFVEQHKHYLDEIIEQISEFSKRVILADANLDKVLSAYNKHRDKPIREQAENIIHLFTLTNLGAPAAFKYFDTTIDRKRYTSTKEVLDATLIHQSITGLYETRIDLSQLGGDGGGSSGGGEAAAKGGTLNIEDEHRLHETSKEPDVSLGSTWLSDFPQAWAETGGMGLAVRQAPLIIPLKATSTPVSIKQYPMSQEARLGIKPHIQRLLDQGILVPCQSPWNTPLLPVKKPGTNDYRPVQDLREVNKRVEDIHPTVPNPYNLLSGLPPSHQWYTVLDLKDAFFCLRLHPTSQPLFAFEWRDPEMGISGQLTWTRLPQGFKNSPTLFNEALHRDLADFRIQHPDLILLQYVDDLLLAATSELDCQQGTRALLQTLGNLGYRASAKKAQICQKQVKYLGYLLKEGQRWLTEARKETVMGQPTPKTPRQLREFLGTAGFCRLWIPGFAEMAAPLYPLTKPGTLFNWGPDQQKAYQEIKQALLTAPALGLPDLTKPFELFVDEKQGYAKGVLTQKLGPWRRPVAYLSKKLDPVAAGWPPCLRMVAAIAVLTKDAGKLTMGQPLVILAPHAVEALVKQPPDRWLSNARMTHYQALLLDTDRVQFGPVVALNPATLLPLPEEGLQHNCLDILAEAHGTRPDLTDQPLPDADHTWYTDGSSLLQEGQRKAGAAVTTETEVIWAKALPAGTSAQRAELIALTQALKMAEGKKLNVYTDSRYAFATAHIHGEIYRRRGWLTSEGKEIKNKDEILALLKALFLPKRLSIIHCPGHQKGHSAEARGNRMADQAARKAAITETPDTSTLLAGKRTADGSEFEKRTADGSEFESPKKKAKVE

SEQ ID NO: 2778 - protein, 2091 aa, synthetic construct
MPAAKRVKLDGGDKKYSIGLDIGTNSVGWAVITDEYKVPSKKFKVLGNTDRHSIKKNLIGALLFDSGETAEATRLKRTARRRYTRRKNRICYLQEIFSNEMAKVDDSFFHRLEESFLVEEDKKHERHPIFGNIVDEVAYHEKYPTIYHLRKKLVDSTDKADLRLIYLALAHMIKFRGHFLIEGDLNPDNSDVDKLFIQLVQTYNQLFEENPINASGVDAKAILSARLSKSRRLENLIAQLPGEKKNGLFGNLIALSLGLTPNFKSNFDLAEDAKLQLSKDTYDDDLDNLLAQIGDQYADLFLAAKNLSDAILLSDILRVNTEITKAPLSASMIKRYDEHHQDLTLLKALVRQQLPEKYKEIFFDQSKNGYAGYIDGGASQEEFYKFIKPILEKMDGTEELLVKLNREDLLRKQRTFDNGSIPHQIHLGELHAILRRQEDFYPFLKDNREKIEKILTFRIPYYVGPLARGNSRFAWMTRKSEETITPWNFEEVVDKGASAQSFIERMTNFDKNLPNEKVLPKHSLLYEYFTVYNELTKVKYVTEGMRKPAFLSGEQKKAIVDLLFKTNRKVTVKQLKEDYFKKIECFDSVEISGVEDRFNASLGTYHDLLKIIKDKDFLDNEENEDILEDIVLTLTLFEDREMIEERLKTYAHLFDDKVMKQLKRRRYTGWGRLSRKLINGIRDKQSGKTILDFLKSDGFANRNFMQLIHDDSLTFKEDIQKAQVSGQGDSLHEHIANLAGSPAIKKGILQTVKVVDELVKVMGRHKPENIVIEMARENQTTQKGQKNSRERMKRIEEGIKELGSQILKEHPVENTQLQNEKLYLYYLQNGRDMYVDQELDINRLSDYDVDHIVPQSFLKDDSIDNKVLTRSDKARGKSDNVPSEEVVKKMKNYWRQLLNAKLITQRKFDNLTKAERGGLSELDKAGFIKRQLVETRQITKHVAQILDSRMNTKYDENDKLIREVKVITLKSKLVSDFRKDFQFYKVREINNYHHAHDAYLNAVVGTALIKKYPKLESEFVYGDYKVYDVRKMIAKSEQEIGKATAKYFFYSNIMNFFKTEITLANGEIRKRPLIETNGETGEIVWDKGRDFATVRKVLSMPQVNIVKKTEVQTGGFSKESILPKRNSDKLIARKKDWDPKKYGGFDSPTVAYSVLVVAKVEKGKSKKLKSVKELLGITIMERSSFEKNPIDFLEAKGYKEVKKDLIIKLPKYSLFELENGRKRMLASAGELQKGNELALPSKYVNFLYLASHYEKLKGSPEDNEQKQLFVEQHKHYLDEIIEQISEFSKRVILADANLDKVLSAYNKHRDKPIREQAENIIHLFTLTNLGAPAAFKYFDTTIDRKRYTSTKEVLDATLIHQSITGLYETRIDLSQLGGDGGGSSGGSGGTLNIEDEHRLHETSKEPDVSLGSTWLSDFPQAWAETGGMGLAVRQAPLIIPLKATSTPVSIKQYPMSQEARLGIKPHIQRLLDQGILVPCQSPWNTPLLPVKKPGTNDYRPVQDLREVNKRVEDIHPTVPNPYNLLSGLPPSHQWYTVLDLKDAFFCLRLHPTSQPLFAFEWRDPEMGISGQLTWTRLPQGFKNSPTLFNEALHRDLADFRIQHPDLILLQYVDDLLLAATSELDCQQGTRALLQTLGNLGYRASAKKAQICQKQVKYLGYLLKEGQRWLTEARKETVMGQPTPKTPRQLREFLGTAGFCRLWIPGFAEMAAPLYPLTKPGTLFNWGPDQQKAYQEIKQALLTAPALGLPDLTKPFELFVDEKQGYAKGVLTQKLGPWRRPVAYLSKKLDPVAAGWPPCLRMVAAIAVLTKDAGKLTMGQPLVILAPHAVEALVKQPPDRWLSNARMTHYQALLLDTDRVQFGPVVALNPATLLPLPEEGLQHNCLDILAEAHGTRPDLTDQPLPDADHTWYTDGSSLLQEGQRKAGAAVTTETEVIWAKALPAGTSAQRAELIALTQALKMAEGKKLNVYTDSRYAFATAHIHGEIYRRRGWLTSEGKEIKNKDEILALLKALFLPKRLSIIHCPGHQKGHSAEARGNRMADQAARKAAITETPDTSTLLAGKRTADGSEFEKRTADGSEFESPKKKAKVE

SEQ ID NO: 2779 - protein, 2091 aa, synthetic construct
MPAAKRVKLDGGDKKYSIGLDIGTNSVGWAVITDEYKVPSKKFKVLGNTDRHSIKKNLIGALLFDSGETAEATRLKRTARRRYTRRKNRICYLQEIFSNEMAKVDDSFFHRLEESFLVEEDKKHERHPIFGNIVDEVAYHEKYPTIYHLRKKLVDSTDKADLRLIYLALAHMIKFRGHFLIEGDLNPDNSDVDKLFIQLVQTYNQLFEENPINASGVDAKAILSARLSKSRRLENLIAQLPGEKKNGLFGNLIALSLGLTPNFKSNFDLAEDAKLQLSKDTYDDDLDNLLAQIGDQYADLFLAAKNLSDAILLSDILRVNTEITKAPLSASMIKRYDEHHQDLTLLKALVRQQLPEKYKEIFFDQSKNGYAGYIDGGASQEEFYKFIKPILEKMDGTEELLVKLNREDLLRKQRTFDNGSIPHQIHLGELHAILRRQEDFYPFLKDNREKIEKILTFRIPYYVGPLARGNSRFAWMTRKSEETITPWNFEEVVDKGASAQSFIERMTNFDKNLPNEKVLPKHSLLYEYFTVYNELTKVKYVTEGMRKPAFLSGEQKKAIVDLLFKTNRKVTVKQLKEDYFKKIECFDSVEISGVEDRFNASLGTYHDLLKIIKDKDFLDNEENEDILEDIVLTLTLFEDREMIEERLKTYAHLFDDKVMKQLKRRRYTGWGRLSRKLINGIRDKQSGKTILDFLKSDGFANRNFMQLIHDDSLTFKEDIQKAQVSGQGDSLHEHIANLAGSPAIKKGILQTVKVVDELVKVMGRHKPENIVIEMARENQTTQKGQKNSRERMKRIEEGIKELGSQILKEHPVENTQLQNEKLYLYYLQNGRDMYVDQELDINRLSDYDVDHIVPQSFLKDDSIDNKVLTRSDKARGKSDNVPSEEVVKKMKNYWRQLLNAKLITQRKFDNLTKAERGGLSELDKAGFIKRQLVETRQITKHVAQILDSRMNTKYDENDKLIREVKVITLKSKLVSDFRKDFQFYKVREINNYHHAHDAYLNAVVGTALIKKYPKLESEFVYGDYKVYDVRKMIAKSEQEIGKATAKYFFYSNIMNFFKTEITLANGEIRKRPLIETNGETGEIVWDKGRDFATVRKVLSMPQVNIVKKTEVQTGGFSKESILPKRNSDKLIARKKDWDPKKYGGFDSPTVAYSVLVVAKVEKGKSKKLKSVKELLGITIMERSSFEKNPIDFLEAKGYKEVKKDLIIKLPKYSLFELENGRKRMLASAGELQKGNELALPSKYVNFLYLASHYEKLKGSPEDNEQKQLFVEQHKHYLDEIIEQISEFSKRVILADANLDKVLSAYNKHRDKPIREQAENIIHLFTLTNLGAPAAFKYFDTTIDRKRYTSTKEVLDATLIHQSITGLYETRIDLSQLGGDGGGSSGSSGGTLNIEDEHRLHETSKEPDVSLGSTWLSDFPQAWAETGGMGLAVRQAPLIIPLKATSTPVSIKQYPMSQEARLGIKPHIQRLLDQGILVPCQSPWNTPLLPVKKPGTNDYRPVQDLREVNKRVEDIHPTVPNPYNLLSGLPPSHQWYTVLDLKDAFFCLRLHPTSQPLFAFEWRDPEMGISGQLTWTRLPQGFKNSPTLFNEALHRDLADFRIQHPDLILLQYVDDLLLAATSELDCQQGTRALLQTLGNLGYRASAKKAQICQKQVKYLGYLLKEGQRWLTEARKETVMGQPTPKTPRQLREFLGTAGFCRLWIPGFAEMAAPLYPLTKPGTLFNWGPDQQKAYQEIKQALLTAPALGLPDLTKPFELFVDEKQGYAKGVLTQKLGPWRRPVAYLSKKLDPVAAGWPPCLRMVAAIAVLTKDAGKLTMGQPLVILAPHAVEALVKQPPDRWLSNARMTHYQALLLDTDRVQFGPVVALNPATLLPLPEEGLQHNCLDILAEAHGTRPDLTDQPLPDADHTWYTDGSSLLQEGQRKAGAAVTTETEVIWAKALPAGTSAQRAELIALTQALKMAEGKKLNVYTDSRYAFATAHIHGEIYRRRGWLTSEGKEIKNKDEILALLKALFLPKRLSIIHCPGHQKGHSAEARGNRMADQAARKAAITETPDTSTLLAGKRTADGSEFEKRTADGSEFESPKKKAKVE

SEQ ID NO: 2780 - protein, 2091 aa, synthetic construct
MPAAKRVKLDGGDKKYSIGLDIGTNSVGWAVITDEYKVPSKKFKVLGNTDRHSIKKNLIGALLFDSGETAEATRLKRTARRRYTRRKNRICYLQEIFSNEMAKVDDSFFHRLEESFLVEEDKKHERHPIFGNIVDEVAYHEKYPTIYHLRKKLVDSTDKADLRLIYLALAHMIKFRGHFLIEGDLNPDNSDVDKLFIQLVQTYNQLFEENPINASGVDAKAILSARLSKSRRLENLIAQLPGEKKNGLFGNLIALSLGLTPNFKSNFDLAEDAKLQLSKDTYDDDLDNLLAQIGDQYADLFLAAKNLSDAILLSDILRVNTEITKAPLSASMIKRYDEHHQDLTLLKALVRQQLPEKYKEIFFDQSKNGYAGYIDGGASQEEFYKFIKPILEKMDGTEELLVKLNREDLLRKQRTFDNGSIPHQIHLGELHAILRRQEDFYPFLKDNREKIEKILTFRIPYYVGPLARGNSRFAWMTRKSEETITPWNFEEVVDKGASAQSFIERMTNFDKNLPNEKVLPKHSLLYEYFTVYNELTKVKYVTEGMRKPAFLSGEQKKAIVDLLFKTNRKVTVKQLKEDYFKKIECFDSVEISGVEDRFNASLGTYHDLLKIIKDKDFLDNEENEDILEDIVLTLTLFEDREMIEERLKTYAHLFDDKVMKQLKRRRYTGWGRLSRKLINGIRDKQSGKTILDFLKSDGFANRNFMQLIHDDSLTFKEDIQKAQVSGQGDSLHEHIANLAGSPAIKKGILQTVKVVDELVKVMGRHKPENIVIEMARENQTTQKGQKNSRERMKRIEEGIKELGSQILKEHPVENTQLQNEKLYLYYLQNGRDMYVDQELDINRLSDYDVDHIVPQSFLKDDSIDNKVLTRSDKARGKSDNVPSEEVVKKMKNYWRQLLNAKLITQRKFDNLTKAERGGLSELDKAGFIKRQLVETRQITKHVAQILDSRMNTKYDENDKLIREVKVITLKSKLVSDFRKDFQFYKVREINNYHHAHDAYLNAVVGTALIKKYPKLESEFVYGDYKVYDVRKMIAKSEQEIGKATAKYFFYSNIMNFFKTEITLANGEIRKRPLIETNGETGEIVWDKGRDFATVRKVLSMPQVNIVKKTEVQTGGFSKESILPKRNSDKLIARKKDWDPKKYGGFDSPTVAYSVLVVAKVEKGKSKKLKSVKELLGITIMERSSFEKNPIDFLEAKGYKEVKKDLIIKLPKYSLFELENGRKRMLASAGELQKGNELALPSKYVNFLYLASHYEKLKGSPEDNEQKQLFVEQHKHYLDEIIEQISEFSKRVILADANLDKVLSAYNKHRDKPIREQAENIIHLFTLTNLGAPAAFKYFDTTIDRKRYTSTKEVLDATLIHQSITGLYETRIDLSQLGGDGGGGGGGSGGTLNIEDEHRLHETSKEPDVSLGSTWLSDFPQAWAETGGMGLAVRQAPLIIPLKATSTPVSIKQYPMSQEARLGIKPHIQRLLDQGILVPCQSPWNTPLLPVKKPGTNDYRPVQDLREVNKRVEDIHPTVPNPYNLLSGLPPSHQWYTVLDLKDAFFCLRLHPTSQPLFAFEWRDPEMGISGQLTWTRLPQGFKNSPTLFNEALHRDLADFRIQHPDLILLQYVDDLLLAATSELDCQQGTRALLQTLGNLGYRASAKKAQICQKQVKYLGYLLKEGQRWLTEARKETVMGQPTPKTPRQLREFLGKAGFCRLFIPGFAEMAAPLYPLTKPGTLFNWGPDQQKAYQEIKQALLTAPALGLPDLTKPFELFVDEKQGYAKGVLTQKLGPWRRPVAYLSKKLDPVAAGWPPCLRMVAAIAVLTKDAGKLTMGQPLVILAPHAVEALVKQPPDRWLSNARMTHYQALLLDTDRVQFGPVVALNPATLLPLPEEGLQHNCLDILAEAHGTRPDLTDQPLPDADHTWYTDGSSLLQEGQRKAGAAVTTETEVIWAKALPAGTSAQRAELIALTQALKMAEGKKLNVYTDSRYAFATAHIHGEIYRRRGWLTSEGKEIKNKDEILALLKALFLPKRLSIIHCPGHQKGHSAEARGNRMADQAARKAAITETPDTSTLLAGKRTADGSEFEKRTADGSEFESPKKKAKVE

SEQ ID NO: 2781 - protein, 2096 aa, synthetic construct
MPAAKRVKLDGGDKKYSIGLDIGTNSVGWAVITDEYKVPSKKFKVLGNTDRHSIKKNLIGALLFDSGETAEATRLKRTARRRYTRRKNRICYLQEIFSNEMAKVDDSFFHRLEESFLVEEDKKHERHPIFGNIVDEVAYHEKYPTIYHLRKKLVDSTDKADLRLIYLALAHMIKFRGHFLIEGDLNPDNSDVDKLFIQLVQTYNQLFEENPINASGVDAKAILSARLSKSRRLENLIAQLPGEKKNGLFGNLIALSLGLTPNFKSNFDLAEDAKLQLSKDTYDDDLDNLLAQIGDQYADLFLAAKNLSDAILLSDILRVNTEITKAPLSASMIKRYDEHHQDLTLLKALVRQQLPEKYKEIFFDQSKNGYAGYIDGGASQEEFYKFIKPILEKMDGTEELLVKLNREDLLRKQRTFDNGSIPHQIHLGELHAILRRQEDFYPFLKDNREKIEKILTFRIPYYVGPLARGNSRFAWMTRKSEETITPWNFEEVVDKGASAQSFIERMTNFDKNLPNEKVLPKHSLLYEYFTVYNELTKVKYVTEGMRKPAFLSGEQKKAIVDLLFKTNRKVTVKQLKEDYFKKIECFDSVEISGVEDRFNASLGTYHDLLKIIKDKDFLDNEENEDILEDIVLTLTLFEDREMIEERLKTYAHLFDDKVMKQLKRRRYTGWGRLSRKLINGIRDKQSGKTILDFLKSDGFANRNFMQLIHDDSLTFKEDIQKAQVSGQGDSLHEHIANLAGSPAIKKGILQTVKVVDELVKVMGRHKPENIVIEMARENQTTQKGQKNSRERMKRIEEGIKELGSQILKEHPVENTQLQNEKLYLYYLQNGRDMYVDQELDINRLSDYDVDHIVPQSFLKDDSIDNKVLTRSDKARGKSDNVPSEEVVKKMKNYWRQLLNAKLITQRKFDNLTKAERGGLSELDKAGFIKRQLVETRQITKHVAQILDSRMNTKYDENDKLIREVKVITLKSKLVSDFRKDFQFYKVREINNYHHAHDAYLNAVVGTALIKKYPKLESEFVYGDYKVYDVRKMIAKSEQEIGKATAKYFFYSNIMNFFKTEITLANGEIRKRPLIETNGETGEIVWDKGRDFATVRKVLSMPQVNIVKKTEVQTGGFSKESILPKRNSDKLIARKKDWDPKKYGGFDSPTVAYSVLVVAKVEKGKSKKLKSVKELLGITIMERSSFEKNPIDFLEAKGYKEVKKDLIIKLPKYSLFELENGRKRMLASAGELQKGNELALPSKYVNFLYLASHYEKLKGSPEDNEQKQLFVEQHKHYLDEIIEQISEFSKRVILADANLDKVLSAYNKHRDKPIREQAENIIHLFTLTNLGAPAAFKYFDTTIDRKRYTSTKEVLDATLIHQSITGLYETRIDLSQLGGDGGEAAAKPAPGSSGGTLNIEDEHRLHETSKEPDVSLGSTWLSDFPQAWAETGGMGLAVRQAPLIIPLKATSTPVSIKQYPMSQEARLGIKPHIQRLLDQGILVPCQSPWNTPLLPVKKPGTNDYRPVQDLREVNKRVEDIHPTVPNPYNLLSGLPPSHQWYTVLDLKDAFFCLRLHPTSQPLFAFEWRDPEMGISGQLTWTRLPQGFKNSPTLFNEALHRDLADFRIQHPDLILLQYVDDLLLAATSELDCQQGTRALLQTLGNLGYRASAKKAQICQKQVKYLGYLLKEGQRWLTEARKETVMGQPTPKTPRQLREFLGKAGFCRLFIPGFAEMAAPLYPLTKPGTLFNWGPDQQKAYQEIKQALLTAPALGLPDLTKPFELFVDEKQGYAKGVLTQKLGPWRRPVAYLSKKLDPVAAGWPPCLRMVAAIAVLTKDAGKLTMGQPLVILAPHAVEALVKQPPDRWLSNARMTHYQALLLDTDRVQFGPVVALNPATLLPLPEEGLQHNCLDILAEAHGTRPDLTDQPLPDADHTWYTDGSSLLQEGQRKAGAAVTTETEVIWAKALPAGTSAQRAELIALTQALKMAEGKKLNVYTDSRYAFATAHIHGEIYRRRGWLTSEGKEIKNKDEILALLKALFLPKRLSIIHCPGHQKGHSAEARGNRMADQAARKAAITETPDTSTLLAGKRTADGSEFEKRTADGSEFESPKKKAKVE

SEQ ID NO: 2782 - protein, 2096 aa, synthetic construct
MPAAKRVKLDGGDKKYSIGLDIGTNSVGWAVITDEYKVPSKKFKVLGNTDRHSIKKNLIGALLFDSGETAEATRLKRTARRRYTRRKNRICYLQEIFSNEMAKVDDSFFHRLEESFLVEEDKKHERHPIFGNIVDEVAYHEKYPTIYHLRKKLVDSTDKADLRLIYLALAHMIKFRGHFLIEGDLNPDNSDVDKLFIQLVQTYNQLFEENPINASGVDAKAILSARLSKSRRLENLIAQLPGEKKNGLFGNLIALSLGLTPNFKSNFDLAEDAKLQLSKDTYDDDLDNLLAQIGDQYADLFLAAKNLSDAILLSDILRVNTEITKAPLSASMIKRYDEHHQDLTLLKALVRQQLPEKYKEIFFDQSKNGYAGYIDGGASQEEFYKFIKPILEKMDGTEELLVKLNREDLLRKQRTFDNGSIPHQIHLGELHAILRRQEDFYPFLKDNREKIEKILTFRIPYYVGPLARGNSRFAWMTRKSEETITPWNFEEVVDKGASAQSFIERMTNFDKNLPNEKVLPKHSLLYEYFTVYNELTKVKYVTEGMRKPAFLSGEQKKAIVDLLFKTNRKVTVKQLKEDYFKKIECFDSVEISGVEDRFNASLGTYHDLLKIIKDKDFLDNEENEDILEDIVLTLTLFEDREMIEERLKTYAHLFDDKVMKQLKRRRYTGWGRLSRKLINGIRDKQSGKTILDFLKSDGFANRNFMQLIHDDSLTFKEDIQKAQVSGQGDSLHEHIANLAGSPAIKKGILQTVKVVDELVKVMGRHKPENIVIEMARENQTTQKGQKNSRERMKRIEEGIKELGSQILKEHPVENTQLQNEKLYLYYLQNGRDMYVDQELDINRLSDYDVDHIVPQSFLKDDSIDNKVLTRSDKARGKSDNVPSEEVVKKMKNYWRQLLNAKLITQRKFDNLTKAERGGLSELDKAGFIKRQLVETRQITKHVAQILDSRMNTKYDENDKLIREVKVITLKSKLVSDFRKDFQFYKVREINNYHHAHDAYLNAVVGTALIKKYPKLESEFVYGDYKVYDVRKMIAKSEQEIGKATAKYFFYSNIMNFFKTEITLANGEIRKRPLIETNGETGEIVWDKGRDFATVRKVLSMPQVNIVKKTEVQTGGFSKESILPKRNSDKLIARKKDWDPKKYGGFDSPTVAYSVLVVAKVEKGKSKKLKSVKELLGITIMERSSFEKNPIDFLEAKGYKEVKKDLIIKLPKYSLFELENGRKRMLASAGELQKGNELALPSKYVNFLYLASHYEKLKGSPEDNEQKQLFVEQHKHYLDEIIEQISEFSKRVILADANLDKVLSAYNKHRDKPIREQAENIIHLFTLTNLGAPAAFKYFDTTIDRKRYTSTKEVLDATLIHQSITGLYETRIDLSQLGGDGGEAAAKGGSPAPGGTLNIEDEHRLHETSKEPDVSLGSTWLSDFPQAWAETGGMGLAVRQAPLIIPLKATSTPVSIKQYPMSQEARLGIKPHIQRLLDQGILVPCQSPWNTPLLPVKKPGTNDYRPVQDLREVNKRVEDIHPTVPNPYNLLSGLPPSHQWYTVLDLKDAFFCLRLHPTSQPLFAFEWRDPEMGISGQLTWTRLPQGFKNSPTLFNEALHRDLADFRIQHPDLILLQYVDDLLLAATSELDCQQGTRALLQTLGNLGYRASAKKAQICQKQVKYLGYLLKEGQRWLTEARKETVMGQPTPKTPRQLREFLGKAGFCRLFIPGFAEMAAPLYPLTKPGTLFNWGPDQQKAYQEIKQALLTAPALGLPDLTKPFELFVDEKQGYAKGVLTQKLGPWRRPVAYLSKKLDPVAAGWPPCLRMVAAIAVLTKDAGKLTMGQPLVILAPHAVEALVKQPPDRWLSNARMTHYQALLLDTDRVQFGPVVALNPATLLPLPEEGLQHNCLDILAEAHGTRPDLTDQPLPDADHTWYTDGSSLLQEGQRKAGAAVTTETEVIWAKALPAGTSAQRAELIALTQALKMAEGKKLNVYTDSRYAFATAHIHGEIYRRRGWLTSEGKEIKNKDEILALLKALFLPKRLSIIHCPGHQKGHSAEARGNRMADQAARKAAITETPDTSTLLAGKRTADGSEFEKRTADGSEFESPKKKAKVE

SEQ ID NO: 2783 - protein, 2093 aa, synthetic construct
MPAAKRVKLDGGDKKYSIGLDIGTNSVGWAVITDEYKVPSKKFKVLGNTDRHSIKKNLIGALLFDSGETAEATRLKRTARRRYTRRKNRICYLQEIFSNEMAKVDDSFFHRLEESFLVEEDKKHERHPIFGNIVDEVAYHEKYPTIYHLRKKLVDSTDKADLRLIYLALAHMIKFRGHFLIEGDLNPDNSDVDKLFIQLVQTYNQLFEENPINASGVDAKAILSARLSKSRRLENLIAQLPGEKKNGLFGNLIALSLGLTPNFKSNFDLAEDAKLQLSKDTYDDDLDNLLAQIGDQYADLFLAAKNLSDAILLSDILRVNTEITKAPLSASMIKRYDEHHQDLTLLKALVRQQLPEKYKEIFFDQSKNGYAGYIDGGASQEEFYKFIKPILEKMDGTEELLVKLNREDLLRKQRTFDNGSIPHQIHLGELHAILRRQEDFYPFLKDNREKIEKILTFRIPYYVGPLARGNSRFAWMTRKSEETITPWNFEEVVDKGASAQSFIERMTNFDKNLPNEKVLPKHSLLYEYFTVYNELTKVKYVTEGMRKPAFLSGEQKKAIVDLLFKTNRKVTVKQLKEDYFKKIECFDSVEISGVEDRFNASLGTYHDLLKIIKDKDFLDNEENEDILEDIVLTLTLFEDREMIEERLKTYAHLFDDKVMKQLKRRRYTGWGRLSRKLINGIRDKQSGKTILDFLKSDGFANRNFMQLIHDDSLTFKEDIQKAQVSGQGDSLHEHIANLAGSPAIKKGILQTVKVVDELVKVMGRHKPENIVIEMARENQTTQKGQKNSRERMKRIEEGIKELGSQILKEHPVENTQLQNEKLYLYYLQNGRDMYVDQELDINRLSDYDVDHIVPQSFLKDDSIDNKVLTRSDKARGKSDNVPSEEVVKKMKNYWRQLLNAKLITQRKFDNLTKAERGGLSELDKAGFIKRQLVETRQITKHVAQILDSRMNTKYDENDKLIREVKVITLKSKLVSDFRKDFQFYKVREINNYHHAHDAYLNAVVGTALIKKYPKLESEFVYGDYKVYDVRKMIAKSEQEIGKATAKYFFYSNIMNFFKTEITLANGEIRKRPLIETNGETGEIVWDKGRDFATVRKVLSMPQVNIVKKTEVQTGGFSKESILPKRNSDKLIARKKDWDPKKYGGFDSPTVAYSVLVVAKVEKGKSKKLKSVKELLGITIMERSSFEKNPIDFLEAKGYKEVKKDLIIKLPKYSLFELENGRKRMLASAGELQKGNELALPSKYVNFLYLASHYEKLKGSPEDNEQKQLFVEQHKHYLDEIIEQISEFSKRVILADANLDKVLSAYNKHRDKPIREQAENIIHLFTLTNLGAPAAFKYFDTTIDRKRYTSTKEVLDATLIHQSITGLYETRIDLSQLGGDGGEAAAKGGSGGTLNIEDEHRLHETSKEPDVSLGSTWLSDFPQAWAETGGMGLAVRQAPLIIPLKATSTPVSIKQYPMSQEARLGIKPHIQRLLDQGILVPCQSPWNTPLLPVKKPGTNDYRPVQDLREVNKRVEDIHPTVPNPYNLLSGLPPSHQWYTVLDLKDAFFCLRLHPTSQPLFAFEWRDPEMGISGQLTWTRLPQGFKNSPTLFNEALHRDLADFRIQHPDLILLQYVDDLLLAATSELDCQQGTRALLQTLGNLGYRASAKKAQICQKQVKYLGYLLKEGQRWLTEARKETVMGQPTPKTPRQLREFLGKAGFCRLFIPGFAEMAAPLYPLTKPGTLFNWGPDQQKAYQEIKQALLTAPALGLPDLTKPFELFVDEKQGYAKGVLTQKLGPWRRPVAYLSKKLDPVAAGWPPCLRMVAAIAVLTKDAGKLTMGQPLVILAPHAVEALVKQPPDRWLSNARMTHYQALLLDTDRVQFGPVVALNPATLLPLPEEGLQHNCLDILAEAHGTRPDLTDQPLPDADHTWYTDGSSLLQEGQRKAGAAVTTETEVIWAKALPAGTSAQRAELIALTQALKMAEGKKLNVYTDSRYAFATAHIHGEIYRRRGWLTSEGKEIKNKDEILALLKALFLPKRLSIIHCPGHQKGHSAEARGNRMADQAARKAAITETPDTSTLLAGKRTADGSEFEKRTADGSEFESPKKKAKVE

SEQ ID NO: 2784 - protein, 2131 aa, synthetic construct
MPAAKRVKLDGGDKKYSIGLDIGTNSVGWAVITDEYKVPSKKFKVLGNTDRHSIKKNLIGALLFDSGETAEATRLKRTARRRYTRRKNRICYLQEIFSNEMAKVDDSFFHRLEESFLVEEDKKHERHPIFGNIVDEVAYHEKYPTIYHLRKKLVDSTDKADLRLIYLALAHMIKFRGHFLIEGDLNPDNSDVDKLFIQLVQTYNQLFEENPINASGVDAKAILSARLSKSRRLENLIAQLPGEKKNGLFGNLIALSLGLTPNFKSNFDLAEDAKLQLSKDTYDDDLDNLLAQIGDQYADLFLAAKNLSDAILLSDILRVNTEITKAPLSASMIKRYDEHHQDLTLLKALVRQQLPEKYKEIFFDQSKNGYAGYIDGGASQEEFYKFIKPILEKMDGTEELLVKLNREDLLRKQRTFDNGSIPHQIHLGELHAILRRQEDFYPFLKDNREKIEKILTFRIPYYVGPLARGNSRFAWMTRKSEETITPWNFEEVVDKGASAQSFIERMTNFDKNLPNEKVLPKHSLLYEYFTVYNELTKVKYVTEGMRKPAFLSGEQKKAIVDLLFKTNRKVTVKQLKEDYFKKIECFDSVEISGVEDRFNASLGTYHDLLKIIKDKDFLDNEENEDILEDIVLTLTLFEDREMIEERLKTYAHLFDDKVMKQLKRRRYTGWGRLSRKLINGIRDKQSGKTILDFLKSDGFANRNFMQLIHDDSLTFKEDIQKAQVSGQGDSLHEHIANLAGSPAIKKGILQTVKVVDELVKVMGRHKPENIVIEMARENQTTQKGQKNSRERMKRIEEGIKELGSQILKEHPVENTQLQNEKLYLYYLQNGRDMYVDQELDINRLSDYDVDHIVPQSFLKDDSIDNKVLTRSDKARGKSDNVPSEEVVKKMKNYWRQLLNAKLITQRKFDNLTKAERGGLSELDKAGFIKRQLVETRQITKHVAQILDSRMNTKYDENDKLIREVKVITLKSKLVSDFRKDFQFYKVREINNYHHAHDAYLNAVVGTALIKKYPKLESEFVYGDYKVYDVRKMIAKSEQEIGKATAKYFFYSNIMNFFKTEITLANGEIRKRPLIETNGETGEIVWDKGRDFATVRKVLSMPQVNIVKKTEVQTGGFSKESILPKRNSDKLIARKKDWDPKKYGGFDSPTVAYSVLVVAKVEKGKSKKLKSVKELLGITIMERSSFEKNPIDFLEAKGYKEVKKDLIIKLPKYSLFELENGRKRMLASAGELQKGNELALPSKYVNFLYLASHYEKLKGSPEDNEQKQLFVEQHKHYLDEIIEQISEFSKRVILADANLDKVLSAYNKHRDKPIREQAENIIHLFTLTNLGAPAAFKYFDTTIDRKRYTSTKEVLDATLIHQSITGLYETRIDLSQLGGDGGAEAAAKEAAAKEAAAKEAAAKALEAEAAAKEAAAKEAAAKEAAAKAGGTLNIEDEHRLHETSKEPDVSLGSTWLSDFPQAWAETGGMGLAVRQAPLIIPLKATSTPVSIKQYPMSQEARLGIKPHIQRLLDQGILVPCQSPWNTPLLPVKKPGTNDYRPVQDLREVNKRVEDIHPTVPNPYNLLSGLPPSHQWYTVLDLKDAFFCLRLHPTSQPLFAFEWRDPEMGISGQLTWTRLPQGFKNSPTLFNEALHRDLADFRIQHPDLILLQYVDDLLLAATSELDCQQGTRALLQTLGNLGYRASAKKAQICQKQVKYLGYLLKEGQRWLTEARKETVMGQPTPKTPRQLREFLGKAGFCRLFIPGFAEMAAPLYPLTKPGTLFNWGPDQQKAYQEIKQALLTAPALGLPDLTKPFELFVDEKQGYAKGVLTQKLGPWRRPVAYLSKKLDPVAAGWPPCLRMVAAIAVLTKDAGKLTMGQPLVILAPHAVEALVKQPPDRWLSNARMTHYQALLLDTDRVQFGPVVALNPATLLPLPEEGLQHNCLDILAEAHGTRPDLTDQPLPDADHTWYTDGSSLLQEGQRKAGAAVTTETEVIWAKALPAGTSAQRAELIALTQALKMAEGKKLNVYTDSRYAFATAHIHGEIYRRRGWLTSEGKEIKNKDEILALLKALFLPKRLSIIHCPGHQKGHSAEARGNRMADQAARKAAITETPDTSTLLAGKRTADGSEFEKRTADGSEFESPKKKAKVE

SEQ ID NO: 2785 - protein, 2096 aa, synthetic construct
MPAAKRVKLDGGDKKYSIGLDIGTNSVGWAVITDEYKVPSKKFKVLGNTDRHSIKKNLIGALLFDSGETAEATRLKRTARRRYTRRKNRICYLQEIFSNEMAKVDDSFFHRLEESFLVEEDKKHERHPIFGNIVDEVAYHEKYPTIYHLRKKLVDSTDKADLRLIYLALAHMIKFRGHFLIEGDLNPDNSDVDKLFIQLVQTYNQLFEENPINASGVDAKAILSARLSKSRRLENLIAQLPGEKKNGLFGNLIALSLGLTPNFKSNFDLAEDAKLQLSKDTYDDDLDNLLAQIGDQYADLFLAAKNLSDAILLSDILRVNTEITKAPLSASMIKRYDEHHQDLTLLKALVRQQLPEKYKEIFFDQSKNGYAGYIDGGASQEEFYKFIKPILEKMDGTEELLVKLNREDLLRKQRTFDNGSIPHQIHLGELHAILRRQEDFYPFLKDNREKIEKILTFRIPYYVGPLARGNSRFAWMTRKSEETITPWNFEEVVDKGASAQSFIERMTNFDKNLPNEKVLPKHSLLYEYFTVYNELTKVKYVTEGMRKPAFLSGEQKKAIVDLLFKTNRKVTVKQLKEDYFKKIECFDSVEISGVEDRFNASLGTYHDLLKIIKDKDFLDNEENEDILEDIVLTLTLFEDREMIEERLKTYAHLFDDKVMKQLKRRRYTGWGRLSRKLINGIRDKQSGKTILDFLKSDGFANRNFMQLIHDDSLTFKEDIQKAQVSGQGDSLHEHIANLAGSPAIKKGILQTVKVVDELVKVMGRHKPENIVIEMARENQTTQKGQKNSRERMKRIEEGIKELGSQILKEHPVENTQLQNEKLYLYYLQNGRDMYVDQELDINRLSDYDVDHIVPQSFLKDDSIDNKVLTRSDKARGKSDNVPSEEVVKKMKNYWRQLLNAKLITQRKFDNLTKAERGGLSELDKAGFIKRQLVETRQITKHVAQILDSRMNTKYDENDKLIREVKVITLKSKLVSDFRKDFQFYKVREINNYHHAHDAYLNAVVGTALIKKYPKLESEFVYGDYKVYDVRKMIAKSEQEIGKATAKYFFYSNIMNFFKTEITLANGEIRKRPLIETNGETGEIVWDKGRDFATVRKVLSMPQVNIVKKTEVQTGGFSKESILPKRNSDKLIARKKDWDPKKYGGFDSPTVAYSVLVVAKVEKGKSKKLKSVKELLGITIMERSSFEKNPIDFLEAKGYKEVKKDLIIKLPKYSLFELENGRKRMLASAGELQKGNELALPSKYVNFLYLASHYEKLKGSPEDNEQKQLFVEQHKHYLDEIIEQISEFSKRVILADANLDKVLSAYNKHRDKPIREQAENIIHLFTLTNLGAPAAFKYFDTTIDRKRYTSTKEVLDATLIHQSITGLYETRIDLSQLGGDGGEAAAKGSSGGGGGTLNIEDEHRLHETSKEPDVSLGSTWLSDFPQAWAETGGMGLAVRQAPLIIPLKATSTPVSIKQYPMSQEARLGIKPHIQRLLDQGILVPCQSPWNTPLLPVKKPGTNDYRPVQDLREVNKRVEDIHPTVPNPYNLLSGLPPSHQWYTVLDLKDAFFCLRLHPTSQPLFAFEWRDPEMGISGQLTWTRLPQGFKNSPTLFNEALHRDLADFRIQHPDLILLQYVDDLLLAATSELDCQQGTRALLQTLGNLGYRASAKKAQICQKQVKYLGYLLKEGQRWLTEARKETVMGQPTPKTPRQLREFLGKAGFCRLFIPGFAEMAAPLYPLTKPGTLFNWGPDQQKAYQEIKQALLTAPALGLPDLTKPFELFVDEKQGYAKGVLTQKLGPWRRPVAYLSKKLDPVAAGWPPCLRMVAAIAVLTKDAGKLTMGQPLVILAPHAVEALVKQPPDRWLSNARMTHYQALLLDTDRVQFGPVVALNPATLLPLPEEGLQHNCLDILAEAHGTRPDLTDQPLPDADHTWYTDGSSLLQEGQRKAGAAVTTETEVIWAKALPAGTSAQRAELIALTQALKMAEGKKLNVYTDSRYAFATAHIHGEIYRRRGWLTSEGKEIKNKDEILALLKALFLPKRLSIIHCPGHQKGHSAEARGNRMADQAARKAAITETPDTSTLLAGKRTADGSEFEKRTADGSEFESPKKKAKVE

SEQ ID NO: 2786 - protein, 2096 aa, synthetic construct
MPAAKRVKLDGGDKKYSIGLDIGTNSVGWAVITDEYKVPSKKFKVLGNTDRHSIKKNLIGALLFDSGETAEATRLKRTARRRYTRRKNRICYLQEIFSNEMAKVDDSFFHRLEESFLVEEDKKHERHPIFGNIVDEVAYHEKYPTIYHLRKKLVDSTDKADLRLIYLALAHMIKFRGHFLIEGDLNPDNSDVDKLFIQLVQTYNQLFEENPINASGVDAKAILSARLSKSRRLENLIAQLPGEKKNGLFGNLIALSLGLTPNFKSNFDLAEDAKLQLSKDTYDDDLDNLLAQIGDQYADLFLAAKNLSDAILLSDILRVNTEITKAPLSASMIKRYDEHHQDLTLLKALVRQQLPEKYKEIFFDQSKNGYAGYIDGGASQEEFYKFIKPILEKMDGTEELLVKLNREDLLRKQRTFDNGSIPHQIHLGELHAILRRQEDFYPFLKDNREKIEKILTFRIPYYVGPLARGNSRFAWMTRKSEETITPWNFEEVVDKGASAQSFIERMTNFDKNLPNEKVLPKHSLLYEYFTVYNELTKVKYVTEGMRKPAFLSGEQKKAIVDLLFKTNRKVTVKQLKEDYFKKIECFDSVEISGVEDRFNASLGTYHDLLKIIKDKDFLDNEENEDILEDIVLTLTLFEDREMIEERLKTYAHLFDDKVMKQLKRRRYTGWGRLSRKLINGIRDKQSGKTILDFLKSDGFANRNFMQLIHDDSLTFKEDIQKAQVSGQGDSLHEHIANLAGSPAIKKGILQTVKVVDELVKVMGRHKPENIVIEMARENQTTQKGQKNSRERMKRIEEGIKELGSQILKEHPVENTQLQNEKLYLYYLQNGRDMYVDQELDINRLSDYDVDHIVPQSFLKDDSIDNKVLTRSDKARGKSDNVPSEEVVKKMKNYWRQLLNAKLITQRKFDNLTKAERGGLSELDKAGFIKRQLVETRQITKHVAQILDSRMNTKYDENDKLIREVKVITLKSKLVSDFRKDFQFYKVREINNYHHAHDAYLNAVVGTALIKKYPKLESEFVYGDYKVYDVRKMIAKSEQEIGKATAKYFFYSNIMNFFKTEITLANGEIRKRPLIETNGETGEIVWDKGRDFATVRKVLSMPQVNIVKKTEVQTGGFSKESILPKRNSDKLIARKKDWDPKKYGGFDSPTVAYSVLVVAKVEKGKSKKLKSVKELLGITIMERSSFEKNPIDFLEAKGYKEVKKDLIIKLPKYSLFELENGRKRMLASAGELQKGNELALPSKYVNFLYLASHYEKLKGSPEDNEQKQLFVEQHKHYLDEIIEQISEFSKRVILADANLDKVLSAYNKHRDKPIREQAENIIHLFTLTNLGAPAAFKYFDTTIDRKRYTSTKEVLDATLIHQSITGLYETRIDLSQLGGDGGPAPGGSEAAAKGGTLNIEDEHRLHETSKEPDVSLGSTWLSDFPQAWAETGGMGLAVRQAPLIIPLKATSTPVSIKQYPMSQEARLGIKPHIQRLLDQGILVPCQSPWNTPLLPVKKPGTNDYRPVQDLREVNKRVEDIHPTVPNPYNLLSGLPPSHQWYTVLDLKDAFFCLRLHPTSQPLFAFEWRDPEMGISGQLTWTRLPQGFKNSPTLFNEALHRDLADFRIQHPDLILLQYVDDLLLAATSELDCQQGTRALLQTLGNLGYRASAKKAQICQKQVKYLGYLLKEGQRWLTEARKETVMGQPTPKTPRQLREFLGKAGFCRLFIPGFAEMAAPLYPLTKPGTLFNWGPDQQKAYQEIKQALLTAPALGLPDLTKPFELFVDEKQGYAKGVLTQKLGPWRRPVAYLSKKLDPVAAGWPPCLRMVAAIAVLTKDAGKLTMGQPLVILAPHAVEALVKQPPDRWLSNARMTHYQALLLDTDRVQFGPVVALNPATLLPLPEEGLQHNCLDILAEAHGTRPDLTDQPLPDADHTWYTDGSSLLQEGQRKAGAAVTTETEVIWAKALPAGTSAQRAELIALTQALKMAEGKKLNVYTDSRYAFATAHIHGEIYRRRGWLTSEGKEIKNKDEILALLKALFLPKRLSIIHCPGHQKGHSAEARGNRMADQAARKAAITETPDTSTLLAGKRTADGSEFEKRTADGSEFESPKKKAKVE

SEQ ID NO: 2787 - protein, 2096 aa, synthetic construct
MPAAKRVKLDGGDKKYSIGLDIGTNSVGWAVITDEYKVPSKKFKVLGNTDRHSIKKNLIGALLFDSGETAEATRLKRTARRRYTRRKNRICYLQEIFSNEMAKVDDSFFHRLEESFLVEEDKKHERHPIFGNIVDEVAYHEKYPTIYHLRKKLVDSTDKADLRLIYLALAHMIKFRGHFLIEGDLNPDNSDVDKLFIQLVQTYNQLFEENPINASGVDAKAILSARLSKSRRLENLIAQLPGEKKNGLFGNLIALSLGLTPNFKSNFDLAEDAKLQLSKDTYDDDLDNLLAQIGDQYADLFLAAKNLSDAILLSDILRVNTEITKAPLSASMIKRYDEHHQDLTLLKALVRQQLPEKYKEIFFDQSKNGYAGYIDGGASQEEFYKFIKPILEKMDGTEELLVKLNREDLLRKQRTFDNGSIPHQIHLGELHAILRRQEDFYPFLKDNREKIEKILTFRIPYYVGPLARGNSRFAWMTRKSEETITPWNFEEVVDKGASAQSFIERMTNFDKNLPNEKVLPKHSLLYEYFTVYNELTKVKYVTEGMRKPAFLSGEQKKAIVDLLFKTNRKVTVKQLKEDYFKKIECFDSVEISGVEDRFNASLGTYHDLLKIIKDKDFLDNEENEDILEDIVLTLTLFEDREMIEERLKTYAHLFDDKVMKQLKRRRYTGWGRLSRKLINGIRDKQSGKTILDFLKSDGFANRNFMQLIHDDSLTFKEDIQKAQVSGQGDSLHEHIANLAGSPAIKKGILQTVKVVDELVKVMGRHKPENIVIEMARENQTTQKGQKNSRERMKRIEEGIKELGSQILKEHPVENTQLQNEKLYLYYLQNGRDMYVDQELDINRLSDYDVDHIVPQSFLKDDSIDNKVLTRSDKARGKSDNVPSEEVVKKMKNYWRQLLNAKLITQRKFDNLTKAERGGLSELDKAGFIKRQLVETRQITKHVAQILDSRMNTKYDENDKLIREVKVITLKSKLVSDFRKDFQFYKVREINNYHHAHDAYLNAVVGTALIKKYPKLESEFVYGDYKVYDVRKMIAKSEQEIGKATAKYFFYSNIMNFFKTEITLANGEIRKRPLIETNGETGEIVWDKGRDFATVRKVLSMPQVNIVKKTEVQTGGFSKESILPKRNSDKLIARKKDWDPKKYGGFDSPTVAYSVLVVAKVEKGKSKKLKSVKELLGITIMERSSFEKNPIDFLEAKGYKEVKKDLIIKLPKYSLFELENGRKRMLASAGELQKGNELALPSKYVNFLYLASHYEKLKGSPEDNEQKQLFVEQHKHYLDEIIEQISEFSKRVILADANLDKVLSAYNKHRDKPIREQAENIIHLFTLTNLGAPAAFKYFDTTIDRKRYTSTKEVLDATLIHQSITGLYETRIDLSQLGGDGGGGSEAAAKGGGGGTLNIEDEHRLHETSKEPDVSLGSTWLSDFPQAWAETGGMGLAVRQAPLIIPLKATSTPVSIKQYPMSQEARLGIKPHIQRLLDQGILVPCQSPWNTPLLPVKKPGTNDYRPVQDLREVNKRVEDIHPTVPNPYNLLSGLPPSHQWYTVLDLKDAFFCLRLHPTSQPLFAFEWRDPEMGISGQLTWTRLPQGFKNSPTLFNEALHRDLADFRIQHPDLILLQYVDDLLLAATSELDCQQGTRALLQTLGNLGYRASAKKAQICQKQVKYLGYLLKEGQRWLTEARKETVMGQPTPKTPRQLREFLGKAGFCRLFIPGFAEMAAPLYPLTKPGTLFNWGPDQQKAYQEIKQALLTAPALGLPDLTKPFELFVDEKQGYAKGVLTQKLGPWRRPVAYLSKKLDPVAAGWPPCLRMVAAIAVLTKDAGKLTMGQPLVILAPHAVEALVKQPPDRWLSNARMTHYQALLLDTDRVQFGPVVALNPATLLPLPEEGLQHNCLDILAEAHGTRPDLTDQPLPDADHTWYTDGSSLLQEGQRKAGAAVTTETEVIWAKALPAGTSAQRAELIALTQALKMAEGKKLNVYTDSRYAFATAHIHGEIYRRRGWLTSEGKEIKNKDEILALLKALFLPKRLSIIHCPGHQKGHSAEARGNRMADQAARKAAITETPDTSTLLAGKRTADGSEFEKRTADGSEFESPKKKAKVE

SEQ ID NO: 2788 - protein, 2100 aa, synthetic construct
MPAAKRVKLDGGDKKYSIGLDIGTNSVGWAVITDEYKVPSKKFKVLGNTDRHSIKKNLIGALLFDSGETAEATRLKRTARRRYTRRKNRICYLQEIFSNEMAKVDDSFFHRLEESFLVEEDKKHERHPIFGNIVDEVAYHEKYPTIYHLRKKLVDSTDKADLRLIYLALAHMIKFRGHFLIEGDLNPDNSDVDKLFIQLVQTYNQLFEENPINASGVDAKAILSARLSKSRRLENLIAQLPGEKKNGLFGNLIALSLGLTPNFKSNFDLAEDAKLQLSKDTYDDDLDNLLAQIGDQYADLFLAAKNLSDAILLSDILRVNTEITKAPLSASMIKRYDEHHQDLTLLKALVRQQLPEKYKEIFFDQSKNGYAGYIDGGASQEEFYKFIKPILEKMDGTEELLVKLNREDLLRKQRTFDNGSIPHQIHLGELHAILRRQEDFYPFLKDNREKIEKILTFRIPYYVGPLARGNSRFAWMTRKSEETITPWNFEEVVDKGASAQSFIERMTNFDKNLPNEKVLPKHSLLYEYFTVYNELTKVKYVTEGMRKPAFLSGEQKKAIVDLLFKTNRKVTVKQLKEDYFKKIECFDSVEISGVEDRFNASLGTYHDLLKIIKDKDFLDNEENEDILEDIVLTLTLFEDREMIEERLKTYAHLFDDKVMKQLKRRRYTGWGRLSRKLINGIRDKQSGKTILDFLKSDGFANRNFMQLIHDDSLTFKEDIQKAQVSGQGDSLHEHIANLAGSPAIKKGILQTVKVVDELVKVMGRHKPENIVIEMARENQTTQKGQKNSRERMKRIEEGIKELGSQILKEHPVENTQLQNEKLYLYYLQNGRDMYVDQELDINRLSDYDVDHIVPQSFLKDDSIDNKVLTRSDKARGKSDNVPSEEVVKKMKNYWRQLLNAKLITQRKFDNLTKAERGGLSELDKAGFIKRQLVETRQITKHVAQILDSRMNTKYDENDKLIREVKVITLKSKLVSDFRKDFQFYKVREINNYHHAHDAYLNAVVGTALIKKYPKLESEFVYGDYKVYDVRKMIAKSEQEIGKATAKYFFYSNIMNFFKTEITLANGEIRKRPLIETNGETGEIVWDKGRDFATVRKVLSMPQVNIVKKTEVQTGGFSKESILPKRNSDKLIARKKDWDPKKYGGFDSPTVAYSVLVVAKVEKGKSKKLKSVKELLGITIMERSSFEKNPIDFLEAKGYKEVKKDLIIKLPKYSLFELENGRKRMLASAGELQKGNELALPSKYVNFLYLASHYEKLKGSPEDNEQKQLFVEQHKHYLDEIIEQISEFSKRVILADANLDKVLSAYNKHRDKPIREQAENIIHLFTLTNLGAPAAFKYFDTTIDRKRYTSTKEVLDATLIHQSITGLYETRIDLSQLGGDGGEAAAKGGGGSEAAAKGGTLNIEDEHRLHETSKEPDVSLGSTWLSDFPQAWAETGGMGLAVRQAPLIIPLKATSTPVSIKQYPMSQEARLGIKPHIQRLLDQGILVPCQSPWNTPLLPVKKPGTNDYRPVQDLREVNKRVEDIHPTVPNPYNLLSGLPPSHQWYTVLDLKDAFFCLRLHPTSQPLFAFEWRDPEMGISGQLTWTRLPQGFKNSPTLFNEALHRDLADFRIQHPDLILLQYVDDLLLAATSELDCQQGTRALLQTLGNLGYRASAKKAQICQKQVKYLGYLLKEGQRWLTEARKETVMGQPTPKTPRQLREFLGKAGFCRLFIPGFAEMAAPLYPLTKPGTLFNWGPDQQKAYQEIKQALLTAPALGLPDLTKPFELFVDEKQGYAKGVLTQKLGPWRRPVAYLSKKLDPVAAGWPPCLRMVAAIAVLTKDAGKLTMGQPLVILAPHAVEALVKQPPDRWLSNARMTHYQALLLDTDRVQFGPVVALNPATLLPLPEEGLQHNCLDILAEAHGTRPDLTDQPLPDADHTWYTDGSSLLQEGQRKAGAAVTTETEVIWAKALPAGTSAQRAELIALTQALKMAEGKKLNVYTDSRYAFATAHIHGEIYRRRGWLTSEGKEIKNKDEILALLKALFLPKRLSIIHCPGHQKGHSAEARGNRMADQAARKAAITETPDTSTLLAGKRTADGSEFEKRTADGSEFESPKKKAKVE

SEQ ID NO: 2789 - protein, 2096 aa, synthetic construct
MPAAKRVKLDGGDKKYSIGLDIGTNSVGWAVITDEYKVPSKKFKVLGNTDRHSIKKNLIGALLFDSGETAEATRLKRTARRRYTRRKNRICYLQEIFSNEMAKVDDSFFHRLEESFLVEEDKKHERHPIFGNIVDEVAYHEKYPTIYHLRKKLVDSTDKADLRLIYLALAHMIKFRGHFLIEGDLNPDNSDVDKLFIQLVQTYNQLFEENPINASGVDAKAILSARLSKSRRLENLIAQLPGEKKNGLFGNLIALSLGLTPNFKSNFDLAEDAKLQLSKDTYDDDLDNLLAQIGDQYADLFLAAKNLSDAILLSDILRVNTEITKAPLSASMIKRYDEHHQDLTLLKALVRQQLPEKYKEIFFDQSKNGYAGYIDGGASQEEFYKFIKPILEKMDGTEELLVKLNREDLLRKQRTFDNGSIPHQIHLGELHAILRRQEDFYPFLKDNREKIEKILTFRIPYYVGPLARGNSRFAWMTRKSEETITPWNFEEVVDKGASAQSFIERMTNFDKNLPNEKVLPKHSLLYEYFTVYNELTKVKYVTEGMRKPAFLSGEQKKAIVDLLFKTNRKVTVKQLKEDYFKKIECFDSVEISGVEDRFNASLGTYHDLLKIIKDKDFLDNEENEDILEDIVLTLTLFEDREMIEERLKTYAHLFDDKVMKQLKRRRYTGWGRLSRKLINGIRDKQSGKTILDFLKSDGFANRNFMQLIHDDSLTFKEDIQKAQVSGQGDSLHEHIANLAGSPAIKKGILQTVKVVDELVKVMGRHKPENIVIEMARENQTTQKGQKNSRERMKRIEEGIKELGSQILKEHPVENTQLQNEKLYLYYLQNGRDMYVDQELDINRLSDYDVDHIVPQSFLKDDSIDNKVLTRSDKARGKSDNVPSEEVVKKMKNYWRQLLNAKLITQRKFDNLTKAERGGLSELDKAGFIKRQLVETRQITKHVAQILDSRMNTKYDENDKLIREVKVITLKSKLVSDFRKDFQFYKVREINNYHHAHDAYLNAVVGTALIKKYPKLESEFVYGDYKVYDVRKMIAKSEQEIGKATAKYFFYSNIMNFFKTEITLANGEIRKRPLIETNGETGEIVWDKGRDFATVRKVLSMPQVNIVKKTEVQTGGFSKESILPKRNSDKLIARKKDWDPKKYGGFDSPTVAYSVLVVAKVEKGKSKKLKSVKELLGITIMERSSFEKNPIDFLEAKGYKEVKKDLIIKLPKYSLFELENGRKRMLASAGELQKGNELALPSKYVNFLYLASHYEKLKGSPEDNEQKQLFVEQHKHYLDEIIEQISEFSKRVILADANLDKVLSAYNKHRDKPIREQAENIIHLFTLTNLGAPAAFKYFDTTIDRKRYTSTKEVLDATLIHQSITGLYETRIDLSQLGGDGGEAAAKGGGGSSGGTLNIEDEHRLHETSKEPDVSLGSTWLSDFPQAWAETGGMGLAVRQAPLIIPLKATSTPVSIKQYPMSQEARLGIKPHIQRLLDQGILVPCQSPWNTPLLPVKKPGTNDYRPVQDLREVNKRVEDIHPTVPNPYNLLSGLPPSHQWYTVLDLKDAFFCLRLHPTSQPLFAFEWRDPEMGISGQLTWTRLPQGFKNSPTLFNEALHRDLADFRIQHPDLILLQYVDDLLLAATSELDCQQGTRALLQTLGNLGYRASAKKAQICQKQVKYLGYLLKEGQRWLTEARKETVMGQPTPKTPRQLREFLGKAGFCRLFIPGFAEMAAPLYPLTKPGTLFNWGPDQQKAYQEIKQALLTAPALGLPDLTKPFELFVDEKQGYAKGVLTQKLGPWRRPVAYLSKKLDPVAAGWPPCLRMVAAIAVLTKDAGKLTMGQPLVILAPHAVEALVKQPPDRWLSNARMTHYQALLLDTDRVQFGPVVALNPATLLPLPEEGLQHNCLDILAEAHGTRPDLTDQPLPDADHTWYTDGSSLLQEGQRKAGAAVTTETEVIWAKALPAGTSAQRAELIALTQALKMAEGKKLNVYTDSRYAFATAHIHGEIYRRRGWLTSEGKEIKNKDEILALLKALFLPKRLSIIHCPGHQKGHSAEARGNRMADQAARKAAITETPDTSTLLAGKRTADGSEFEKRTADGSEFESPKKKAKVE

SEQ ID NO: 2790 - protein, 2092 aa, synthetic construct
MPAAKRVKLDGGDKKYSIGLDIGTNSVGWAVITDEYKVPSKKFKVLGNTDRHSIKKNLIGALLFDSGETAEATRLKRTARRRYTRRKNRICYLQEIFSNEMAKVDDSFFHRLEESFLVEEDKKHERHPIFGNIVDEVAYHEKYPTIYHLRKKLVDSTDKADLRLIYLALAHMIKFRGHFLIEGDLNPDNSDVDKLFIQLVQTYNQLFEENPINASGVDAKAILSARLSKSRRLENLIAQLPGEKKNGLFGNLIALSLGLTPNFKSNFDLAEDAKLQLSKDTYDDDLDNLLAQIGDQYADLFLAAKNLSDAILLSDILRVNTEITKAPLSASMIKRYDEHHQDLTLLKALVRQQLPEKYKEIFFDQSKNGYAGYIDGGASQEEFYKFIKPILEKMDGTEELLVKLNREDLLRKQRTFDNGSIPHQIHLGELHAILRRQEDFYPFLKDNREKIEKILTFRIPYYVGPLARGNSRFAWMTRKSEETITPWNFEEVVDKGASAQSFIERMTNFDKNLPNEKVLPKHSLLYEYFTVYNELTKVKYVTEGMRKPAFLSGEQKKAIVDLLFKTNRKVTVKQLKEDYFKKIECFDSVEISGVEDRFNASLGTYHDLLKIIKDKDFLDNEENEDILEDIVLTLTLFEDREMIEERLKTYAHLFDDKVMKQLKRRRYTGWGRLSRKLINGIRDKQSGKTILDFLKSDGFANRNFMQLIHDDSLTFKEDIQKAQVSGQGDSLHEHIANLAGSPAIKKGILQTVKVVDELVKVMGRHKPENIVIEMARENQTTQKGQKNSRERMKRIEEGIKELGSQILKEHPVENTQLQNEKLYLYYLQNGRDMYVDQELDINRLSDYDVDHIVPQSFLKDDSIDNKVLTRSDKARGKSDNVPSEEVVKKMKNYWRQLLNAKLITQRKFDNLTKAERGGLSELDKAGFIKRQLVETRQITKHVAQILDSRMNTKYDENDKLIREVKVITLKSKLVSDFRKDFQFYKVREINNYHHAHDAYLNAVVGTALIKKYPKLESEFVYGDYKVYDVRKMIAKSEQEIGKATAKYFFYSNIMNFFKTEITLANGEIRKRPLIETNGETGEIVWDKGRDFATVRKVLSMPQVNIVKKTEVQTGGFSKESILPKRNSDKLIARKKDWDPKKYGGFDSPTVAYSVLVVAKVEKGKSKKLKSVKELLGITIMERSSFEKNPIDFLEAKGYKEVKKDLIIKLPKYSLFELENGRKRMLASAGELQKGNELALPSKYVNFLYLASHYEKLKGSPEDNEQKQLFVEQHKHYLDEIIEQISEFSKRVILADANLDKVLSAYNKHRDKPIREQAENIIHLFTLTNLGAPAAFKYFDTTIDRKRYTSTKEVLDATLIHQSITGLYETRIDLSQLGGDGGGGGGGGGGGTLNIEDEHRLHETSKEPDVSLGSTWLSDFPQAWAETGGMGLAVRQAPLIIPLKATSTPVSIKQYPMSQEARLGIKPHIQRLLDQGILVPCQSPWNTPLLPVKKPGTNDYRPVQDLREVNKRVEDIHPTVPNPYNLLSGLPPSHQWYTVLDLKDAFFCLRLHPTSQPLFAFEWRDPEMGISGQLTWTRLPQGFKNSPTLFNEALHRDLADFRIQHPDLILLQYVDDLLLAATSELDCQQGTRALLQTLGNLGYRASAKKAQICQKQVKYLGYLLKEGQRWLTEARKETVMGQPTPKTPRQLREFLGKAGFCRLFIPGFAEMAAPLYPLTKPGTLFNWGPDQQKAYQEIKQALLTAPALGLPDLTKPFELFVDEKQGYAKGVLTQKLGPWRRPVAYLSKKLDPVAAGWPPCLRMVAAIAVLTKDAGKLTMGQPLVILAPHAVEALVKQPPDRWLSNARMTHYQALLLDTDRVQFGPVVALNPATLLPLPEEGLQHNCLDILAEAHGTRPDLTDQPLPDADHTWYTDGSSLLQEGQRKAGAAVTTETEVIWAKALPAGTSAQRAELIALTQALKMAEGKKLNVYTDSRYAFATAHIHGEIYRRRGWLTSEGKEIKNKDEILALLKALFLPKRLSIIHCPGHQKGHSAEARGNRMADQAARKAAITETPDTSTLLAGKRTADGSEFEKRTADGSEFESPKKKAKVE

SEQ ID NO: 2791 - protein, 2100 aa, synthetic construct
MPAAKRVKLDGGDKKYSIGLDIGTNSVGWAVITDEYKVPSKKFKVLGNTDRHSIKKNLIGALLFDSGETAEATRLKRTARRRYTRRKNRICYLQEIFSNEMAKVDDSFFHRLEESFLVEEDKKHERHPIFGNIVDEVAYHEKYPTIYHLRKKLVDSTDKADLRLIYLALAHMIKFRGHFLIEGDLNPDNSDVDKLFIQLVQTYNQLFEENPINASGVDAKAILSARLSKSRRLENLIAQLPGEKKNGLFGNLIALSLGLTPNFKSNFDLAEDAKLQLSKDTYDDDLDNLLAQIGDQYADLFLAAKNLSDAILLSDILRVNTEITKAPLSASMIKRYDEHHQDLTLLKALVRQQLPEKYKEIFFDQSKNGYAGYIDGGASQEEFYKFIKPILEKMDGTEELLVKLNREDLLRKQRTFDNGSIPHQIHLGELHAILRRQEDFYPFLKDNREKIEKILTFRIPYYVGPLARGNSRFAWMTRKSEETITPWNFEEVVDKGASAQSFIERMTNFDKNLPNEKVLPKHSLLYEYFTVYNELTKVKYVTEGMRKPAFLSGEQKKAIVDLLFKTNRKVTVKQLKEDYFKKIECFDSVEISGVEDRFNASLGTYHDLLKIIKDKDFLDNEENEDILEDIVLTLTLFEDREMIEERLKTYAHLFDDKVMKQLKRRRYTGWGRLSRKLINGIRDKQSGKTILDFLKSDGFANRNFMQLIHDDSLTFKEDIQKAQVSGQGDSLHEHIANLAGSPAIKKGILQTVKVVDELVKVMGRHKPENIVIEMARENQTTQKGQKNSRERMKRIEEGIKELGSQILKEHPVENTQLQNEKLYLYYLQNGRDMYVDQELDINRLSDYDVDHIVPQSFLKDDSIDNKVLTRSDKARGKSDNVPSEEVVKKMKNYWRQLLNAKLITQRKFDNLTKAERGGLSELDKAGFIKRQLVETRQITKHVAQILDSRMNTKYDENDKLIREVKVITLKSKLVSDFRKDFQFYKVREINNYHHAHDAYLNAVVGTALIKKYPKLESEFVYGDYKVYDVRKMIAKSEQEIGKATAKYFFYSNIMNFFKTEITLANGEIRKRPLIETNGETGEIVWDKGRDFATVRKVLSMPQVNIVKKTEVQTGGFSKESILPKRNSDKLIARKKDWDPKKYGGFDSPTVAYSVLVVAKVEKGKSKKLKSVKELLGITIMERSSFEKNPIDFLEAKGYKEVKKDLIIKLPKYSLFELENGRKRMLASAGELQKGNELALPSKYVNFLYLASHYEKLKGSPEDNEQKQLFVEQHKHYLDEIIEQISEFSKRVILADANLDKVLSAYNKHRDKPIREQAENIIHLFTLTNLGAPAAFKYFDTTIDRKRYTSTKEVLDATLIHQSITGLYETRIDLSQLGGDGGEAAAKEAAAKEAAAKGGTLNIEDEHRLHETSKEPDVSLGSTWLSDFPQAWAETGGMGLAVRQAPLIIPLKATSTPVSIKQYPMSQEARLGIKPHIQRLLDQGILVPCQSPWNTPLLPVKKPGTNDYRPVQDLREVNKRVEDIHPTVPNPYNLLSGLPPSHQWYTVLDLKDAFFCLRLHPTSQPLFAFEWRDPEMGISGQLTWTRLPQGFKNSPTLFNEALHRDLADFRIQHPDLILLQYVDDLLLAATSELDCQQGTRALLQTLGNLGYRASAKKAQICQKQVKYLGYLLKEGQRWLTEARKETVMGQPTPKTPRQLREFLGKAGFCRLFIPGFAEMAAPLYPLTKPGTLFNWGPDQQKAYQEIKQALLTAPALGLPDLTKPFELFVDEKQGYAKGVLTQKLGPWRRPVAYLSKKLDPVAAGWPPCLRMVAAIAVLTKDAGKLTMGQPLVILAPHAVEALVKQPPDRWLSNARMTHYQALLLDTDRVQFGPVVALNPATLLPLPEEGLQHNCLDILAEAHGTRPDLTDQPLPDADHTWYTDGSSLLQEGQRKAGAAVTTETEVIWAKALPAGTSAQRAELIALTQALKMAEGKKLNVYTDSRYAFATAHIHGEIYRRRGWLTSEGKEIKNKDEILALLKALFLPKRLSIIHCPGHQKGHSAEARGNRMADQAARKAAITETPDTSTLLAGKRTADGSEFEKRTADGSEFESPKKKAKVE

SEQ ID NO: 2792 - protein, 2096 aa, synthetic construct
MPAAKRVKLDGGDKKYSIGLDIGTNSVGWAVITDEYKVPSKKFKVLGNTDRHSIKKNLIGALLFDSGETAEATRLKRTARRRYTRRKNRICYLQEIFSNEMAKVDDSFFHRLEESFLVEEDKKHERHPIFGNIVDEVAYHEKYPTIYHLRKKLVDSTDKADLRLIYLALAHMIKFRGHFLIEGDLNPDNSDVDKLFIQLVQTYNQLFEENPINASGVDAKAILSARLSKSRRLENLIAQLPGEKKNGLFGNLIALSLGLTPNFKSNFDLAEDAKLQLSKDTYDDDLDNLLAQIGDQYADLFLAAKNLSDAILLSDILRVNTEITKAPLSASMIKRYDEHHQDLTLLKALVRQQLPEKYKEIFFDQSKNGYAGYIDGGASQEEFYKFIKPILEKMDGTEELLVKLNREDLLRKQRTFDNGSIPHQIHLGELHAILRRQEDFYPFLKDNREKIEKILTFRIPYYVGPLARGNSRFAWMTRKSEETITPWNFEEVVDKGASAQSFIERMTNFDKNLPNEKVLPKHSLLYEYFTVYNELTKVKYVTEGMRKPAFLSGEQKKAIVDLLFKTNRKVTVKQLKEDYFKKIECFDSVEISGVEDRFNASLGTYHDLLKIIKDKDFLDNEENEDILEDIVLTLTLFEDREMIEERLKTYAHLFDDKVMKQLKRRRYTGWGRLSRKLINGIRDKQSGKTILDFLKSDGFANRNFMQLIHDDSLTFKEDIQKAQVSGQGDSLHEHIANLAGSPAIKKGILQTVKVVDELVKVMGRHKPENIVIEMARENQTTQKGQKNSRERMKRIEEGIKELGSQILKEHPVENTQLQNEKLYLYYLQNGRDMYVDQELDINRLSDYDVDHIVPQSFLKDDSIDNKVLTRSDKARGKSDNVPSEEVVKKMKNYWRQLLNAKLITQRKFDNLTKAERGGLSELDKAGFIKRQLVETRQITKHVAQILDSRMNTKYDENDKLIREVKVITLKSKLVSDFRKDFQFYKVREINNYHHAHDAYLNAVVGTALIKKYPKLESEFVYGDYKVYDVRKMIAKSEQEIGKATAKYFFYSNIMNFFKTEITLANGEIRKRPLIETNGETGEIVWDKGRDFATVRKVLSMPQVNIVKKTEVQTGGFSKESILPKRNSDKLIARKKDWDPKKYGGFDSPTVAYSVLVVAKVEKGKSKKLKSVKELLGITIMERSSFEKNPIDFLEAKGYKEVKKDLIIKLPKYSLFELENGRKRMLASAGELQKGNELALPSKYVNFLYLASHYEKLKGSPEDNEQKQLFVEQHKHYLDEIIEQISEFSKRVILADANLDKVLSAYNKHRDKPIREQAENIIHLFTLTNLGAPAAFKYFDTTIDRKRYTSTKEVLDATLIHQSITGLYETRIDLSQLGGDGGEAAAKGSSPAPGGTLNIEDEHRLHETSKEPDVSLGSTWLSDFPQAWAETGGMGLAVRQAPLIIPLKATSTPVSIKQYPMSQEARLGIKPHIQRLLDQGILVPCQSPWNTPLLPVKKPGTNDYRPVQDLREVNKRVEDIHPTVPNPYNLLSGLPPSHQWYTVLDLKDAFFCLRLHPTSQPLFAFEWRDPEMGISGQLTWTRLPQGFKNSPTLFNEALHRDLADFRIQHPDLILLQYVDDLLLAATSELDCQQGTRALLQTLGNLGYRASAKKAQICQKQVKYLGYLLKEGQRWLTEARKETVMGQPTPKTPRQLREFLGKAGFCRLFIPGFAEMAAPLYPLTKPGTLFNWGPDQQKAYQEIKQALLTAPALGLPDLTKPFELFVDEKQGYAKGVLTQKLGPWRRPVAYLSKKLDPVAAGWPPCLRMVAAIAVLTKDAGKLTMGQPLVILAPHAVEALVKQPPDRWLSNARMTHYQALLLDTDRVQFGPVVALNPATLLPLPEEGLQHNCLDILAEAHGTRPDLTDQPLPDADHTWYTDGSSLLQEGQRKAGAAVTTETEVIWAKALPAGTSAQRAELIALTQALKMAEGKKLNVYTDSRYAFATAHIHGEIYRRRGWLTSEGKEIKNKDEILALLKALFLPKRLSIIHCPGHQKGHSAEARGNRMADQAARKAAITETPDTSTLLAGKRTADGSEFEKRTADGSEFESPKKKAKVE

SEQ ID NO: 2793 - protein, 2094 aa, synthetic construct
MPAAKRVKLDGGDKKYSIGLDIGTNSVGWAVITDEYKVPSKKFKVLGNTDRHSIKKNLIGALLFDSGETAEATRLKRTARRRYTRRKNRICYLQEIFSNEMAKVDDSFFHRLEESFLVEEDKKHERHPIFGNIVDEVAYHEKYPTIYHLRKKLVDSTDKADLRLIYLALAHMIKFRGHFLIEGDLNPDNSDVDKLFIQLVQTYNQLFEENPINASGVDAKAILSARLSKSRRLENLIAQLPGEKKNGLFGNLIALSLGLTPNFKSNFDLAEDAKLQLSKDTYDDDLDNLLAQIGDQYADLFLAAKNLSDAILLSDILRVNTEITKAPLSASMIKRYDEHHQDLTLLKALVRQQLPEKYKEIFFDQSKNGYAGYIDGGASQEEFYKFIKPILEKMDGTEELLVKLNREDLLRKQRTFDNGSIPHQIHLGELHAILRRQEDFYPFLKDNREKIEKILTFRIPYYVGPLARGNSRFAWMTRKSEETITPWNFEEVVDKGASAQSFIERMTNFDKNLPNEKVLPKHSLLYEYFTVYNELTKVKYVTEGMRKPAFLSGEQKKAIVDLLFKTNRKVTVKQLKEDYFKKIECFDSVEISGVEDRFNASLGTYHDLLKIIKDKDFLDNEENEDILEDIVLTLTLFEDREMIEERLKTYAHLFDDKVMKQLKRRRYTGWGRLSRKLINGIRDKQSGKTILDFLKSDGFANRNFMQLIHDDSLTFKEDIQKAQVSGQGDSLHEHIANLAGSPAIKKGILQTVKVVDELVKVMGRHKPENIVIEMARENQTTQKGQKNSRERMKRIEEGIKELGSQILKEHPVENTQLQNEKLYLYYLQNGRDMYVDQELDINRLSDYDVDHIVPQSFLKDDSIDNKVLTRSDKARGKSDNVPSEEVVKKMKNYWRQLLNAKLITQRKFDNLTKAERGGLSELDKAGFIKRQLVETRQITKHVAQILDSRMNTKYDENDKLIREVKVITLKSKLVSDFRKDFQFYKVREINNYHHAHDAYLNAVVGTALIKKYPKLESEFVYGDYKVYDVRKMIAKSEQEIGKATAKYFFYSNIMNFFKTEITLANGEIRKRPLIETNGETGEIVWDKGRDFATVRKVLSMPQVNIVKKTEVQTGGFSKESILPKRNSDKLIARKKDWDPKKYGGFDSPTVAYSVLVVAKVEKGKSKKLKSVKELLGITIMERSSFEKNPIDFLEAKGYKEVKKDLIIKLPKYSLFELENGRKRMLASAGELQKGNELALPSKYVNFLYLASHYEKLKGSPEDNEQKQLFVEQHKHYLDEIIEQISEFSKRVILADANLDKVLSAYNKHRDKPIREQAENIIHLFTLTNLGAPAAFKYFDTTIDRKRYTSTKEVLDATLIHQSITGLYETRIDLSQLGGDGGPAPGGGGSSGGTLNIEDEHRLHETSKEPDVSLGSTWLSDFPQAWAETGGMGLAVRQAPLIIPLKATSTPVSIKQYPMSQEARLGIKPHIQRLLDQGILVPCQSPWNTPLLPVKKPGTNDYRPVQDLREVNKRVEDIHPTVPNPYNLLSGLPPSHQWYTVLDLKDAFFCLRLHPTSQPLFAFEWRDPEMGISGQLTWTRLPQGFKNSPTLFNEALHRDLADFRIQHPDLILLQYVDDLLLAATSELDCQQGTRALLQTLGNLGYRASAKKAQICQKQVKYLGYLLKEGQRWLTEARKETVMGQPTPKTPRQLREFLGKAGFCRLFIPGFAEMAAPLYPLTKPGTLFNWGPDQQKAYQEIKQALLTAPALGLPDLTKPFELFVDEKQGYAKGVLTQKLGPWRRPVAYLSKKLDPVAAGWPPCLRMVAAIAVLTKDAGKLTMGQPLVILAPHAVEALVKQPPDRWLSNARMTHYQALLLDTDRVQFGPVVALNPATLLPLPEEGLQHNCLDILAEAHGTRPDLTDQPLPDADHTWYTDGSSLLQEGQRKAGAAVTTETEVIWAKALPAGTSAQRAELIALTQALKMAEGKKLNVYTDSRYAFATAHIHGEIYRRRGWLTSEGKEIKNKDEILALLKALFLPKRLSIIHCPGHQKGHSAEARGNRMADQAARKAAITETPDTSTLLAGKRTADGSEFEKRTADGSEFESPKKKAKVE

SEQ ID NO: 2794 - protein, 2096 aa, synthetic construct
MPAAKRVKLDGGDKKYSIGLDIGTNSVGWAVITDEYKVPSKKFKVLGNTDRHSIKKNLIGALLFDSGETAEATRLKRTARRRYTRRKNRICYLQEIFSNEMAKVDDSFFHRLEESFLVEEDKKHERHPIFGNIVDEVAYHEKYPTIYHLRKKLVDSTDKADLRLIYLALAHMIKFRGHFLIEGDLNPDNSDVDKLFIQLVQTYNQLFEENPINASGVDAKAILSARLSKSRRLENLIAQLPGEKKNGLFGNLIALSLGLTPNFKSNFDLAEDAKLQLSKDTYDDDLDNLLAQIGDQYADLFLAAKNLSDAILLSDILRVNTEITKAPLSASMIKRYDEHHQDLTLLKALVRQQLPEKYKEIFFDQSKNGYAGYIDGGASQEEFYKFIKPILEKMDGTEELLVKLNREDLLRKQRTFDNGSIPHQIHLGELHAILRRQEDFYPFLKDNREKIEKILTFRIPYYVGPLARGNSRFAWMTRKSEETITPWNFEEVVDKGASAQSFIERMTNFDKNLPNEKVLPKHSLLYEYFTVYNELTKVKYVTEGMRKPAFLSGEQKKAIVDLLFKTNRKVTVKQLKEDYFKKIECFDSVEISGVEDRFNASLGTYHDLLKIIKDKDFLDNEENEDILEDIVLTLTLFEDREMIEERLKTYAHLFDDKVMKQLKRRRYTGWGRLSRKLINGIRDKQSGKTILDFLKSDGFANRNFMQLIHDDSLTFKEDIQKAQVSGQGDSLHEHIANLAGSPAIKKGILQTVKVVDELVKVMGRHKPENIVIEMARENQTTQKGQKNSRERMKRIEEGIKELGSQILKEHPVENTQLQNEKLYLYYLQNGRDMYVDQELDINRLSDYDVDHIVPQSFLKDDSIDNKVLTRSDKARGKSDNVPSEEVVKKMKNYWRQLLNAKLITQRKFDNLTKAERGGLSELDKAGFIKRQLVETRQITKHVAQILDSRMNTKYDENDKLIREVKVITLKSKLVSDFRKDFQFYKVREINNYHHAHDAYLNAVVGTALIKKYPKLESEFVYGDYKVYDVRKMIAKSEQEIGKATAKYFFYSNIMNFFKTEITLANGEIRKRPLIETNGETGEIVWDKGRDFATVRKVLSMPQVNIVKKTEVQTGGFSKESILPKRNSDKLIARKKDWDPKKYGGFDSPTVAYSVLVVAKVEKGKSKKLKSVKELLGITIMERSSFEKNPIDFLEAKGYKEVKKDLIIKLPKYSLFELENGRKRMLASAGELQKGNELALPSKYVNFLYLASHYEKLKGSPEDNEQKQLFVEQHKHYLDEIIEQISEFSKRVILADANLDKVLSAYNKHRDKPIREQAENIIHLFTLTNLGAPAAFKYFDTTIDRKRYTSTKEVLDATLIHQSITGLYETRIDLSQLGGDGGEAAAKGGSGGGGGTLNIEDEHRLHETSKEPDVSLGSTWLSDFPQAWAETGGMGLAVRQAPLIIPLKATSTPVSIKQYPMSQEARLGIKPHIQRLLDQGILVPCQSPWNTPLLPVKKPGTNDYRPVQDLREVNKRVEDIHPTVPNPYNLLSGLPPSHQWYTVLDLKDAFFCLRLHPTSQPLFAFEWRDPEMGISGQLTWTRLPQGFKNSPTLFNEALHRDLADFRIQHPDLILLQYVDDLLLAATSELDCQQGTRALLQTLGNLGYRASAKKAQICQKQVKYLGYLLKEGQRWLTEARKETVMGQPTPKTPRQLREFLGKAGFCRLFIPGFAEMAAPLYPLTKPGTLFNWGPDQQKAYQEIKQALLTAPALGLPDLTKPFELFVDEKQGYAKGVLTQKLGPWRRPVAYLSKKLDPVAAGWPPCLRMVAAIAVLTKDAGKLTMGQPLVILAPHAVEALVKQPPDRWLSNARMTHYQALLLDTDRVQFGPVVALNPATLLPLPEEGLQHNCLDILAEAHGTRPDLTDQPLPDADHTWYTDGSSLLQEGQRKAGAAVTTETEVIWAKALPAGTSAQRAELIALTQALKMAEGKKLNVYTDSRYAFATAHIHGEIYRRRGWLTSEGKEIKNKDEILALLKALFLPKRLSIIHCPGHQKGHSAEARGNRMADQAARKAAITETPDTSTLLAGKRTADGSEFEKRTADGSEFESPKKKAKVE

SEQ ID NO: 2795 - protein, 2097 aa, synthetic construct
MPAAKRVKLDGGDKKYSIGLDIGTNSVGWAVITDEYKVPSKKFKVLGNTDRHSIKKNLIGALLFDSGETAEATRLKRTARRRYTRRKNRICYLQEIFSNEMAKVDDSFFHRLEESFLVEEDKKHERHPIFGNIVDEVAYHEKYPTIYHLRKKLVDSTDKADLRLIYLALAHMIKFRGHFLIEGDLNPDNSDVDKLFIQLVQTYNQLFEENPINASGVDAKAILSARLSKSRRLENLIAQLPGEKKNGLFGNLIALSLGLTPNFKSNFDLAEDAKLQLSKDTYDDDLDNLLAQIGDQYADLFLAAKNLSDAILLSDILRVNTEITKAPLSASMIKRYDEHHQDLTLLKALVRQQLPEKYKEIFFDQSKNGYAGYIDGGASQEEFYKFIKPILEKMDGTEELLVKLNREDLLRKQRTFDNGSIPHQIHLGELHAILRRQEDFYPFLKDNREKIEKILTFRIPYYVGPLARGNSRFAWMTRKSEETITPWNFEEVVDKGASAQSFIERMTNFDKNLPNEKVLPKHSLLYEYFTVYNELTKVKYVTEGMRKPAFLSGEQKKAIVDLLFKTNRKVTVKQLKEDYFKKIECFDSVEISGVEDRFNASLGTYHDLLKIIKDKDFLDNEENEDILEDIVLTLTLFEDREMIEERLKTYAHLFDDKVMKQLKRRRYTGWGRLSRKLINGIRDKQSGKTILDFLKSDGFANRNFMQLIHDDSLTFKEDIQKAQVSGQGDSLHEHIANLAGSPAIKKGILQTVKVVDELVKVMGRHKPENIVIEMARENQTTQKGQKNSRERMKRIEEGIKELGSQILKEHPVENTQLQNEKLYLYYLQNGRDMYVDQELDINRLSDYDVDHIVPQSFLKDDSIDNKVLTRSDKARGKSDNVPSEEVVKKMKNYWRQLLNAKLITQRKFDNLTKAERGGLSELDKAGFIKRQLVETRQITKHVAQILDSRMNTKYDENDKLIREVKVITLKSKLVSDFRKDFQFYKVREINNYHHAHDAYLNAVVGTALIKKYPKLESEFVYGDYKVYDVRKMIAKSEQEIGKATAKYFFYSNIMNFFKTEITLANGEIRKRPLIETNGETGEIVWDKGRDFATVRKVLSMPQVNIVKKTEVQTGGFSKESILPKRNSDKLIARKKDWDPKKYGGFDSPTVAYSVLVVAKVEKGKSKKLKSVKELLGITIMERSSFEKNPIDFLEAKGYKEVKKDLIIKLPKYSLFELENGRKRMLASAGELQKGNELALPSKYVNFLYLASHYEKLKGSPEDNEQKQLFVEQHKHYLDEIIEQISEFSKRVILADANLDKVLSAYNKHRDKPIREQAENIIHLFTLTNLGAPAAFKYFDTTIDRKRYTSTKEVLDATLIHQSITGLYETRIDLSQLGGDGGGGSGGSGGSGGSGGTLNIEDEHRLHETSKEPDVSLGSTWLSDFPQAWAETGGMGLAVRQAPLIIPLKATSTPVSIKQYPMSQEARLGIKPHIQRLLDQGILVPCQSPWNTPLLPVKKPGTNDYRPVQDLREVNKRVEDIHPTVPNPYNLLSGLPPSHQWYTVLDLKDAFFCLRLHPTSQPLFAFEWRDPEMGISGQLTWTRLPQGFKNSPTLFNEALHRDLADFRIQHPDLILLQYVDDLLLAATSELDCQQGTRALLQTLGNLGYRASAKKAQICQKQVKYLGYLLKEGQRWLTEARKETVMGQPTPKTPRQLREFLGKAGFCRLFIPGFAEMAAPLYPLTKPGTLFNWGPDQQKAYQEIKQALLTAPALGLPDLTKPFELFVDEKQGYAKGVLTQKLGPWRRPVAYLSKKLDPVAAGWPPCLRMVAAIAVLTKDAGKLTMGQPLVILAPHAVEALVKQPPDRWLSNARMTHYQALLLDTDRVQFGPVVALNPATLLPLPEEGLQHNCLDILAEAHGTRPDLTDQPLPDADHTWYTDGSSLLQEGQRKAGAAVTTETEVIWAKALPAGTSAQRAELIALTQALKMAEGKKLNVYTDSRYAFATAHIHGEIYRRRGWLTSEGKEIKNKDEILALLKALFLPKRLSIIHCPGHQKGHSAEARGNRMADQAARKAAITETPDTSTLLAGKRTADGSEFEKRTADGSEFESPKKKAKVE

SEQ ID NO: 2796 - protein, 2093 aa, synthetic construct
MPAAKRVKLDGGDKKYSIGLDIGTNSVGWAVITDEYKVPSKKFKVLGNTDRHSIKKNLIGALLFDSGETAEATRLKRTARRRYTRRKNRICYLQEIFSNEMAKVDDSFFHRLEESFLVEEDKKHERHPIFGNIVDEVAYHEKYPTIYHLRKKLVDSTDKADLRLIYLALAHMIKFRGHFLIEGDLNPDNSDVDKLFIQLVQTYNQLFEENPINASGVDAKAILSARLSKSRRLENLIAQLPGEKKNGLFGNLIALSLGLTPNFKSNFDLAEDAKLQLSKDTYDDDLDNLLAQIGDQYADLFLAAKNLSDAILLSDILRVNTEITKAPLSASMIKRYDEHHQDLTLLKALVRQQLPEKYKEIFFDQSKNGYAGYIDGGASQEEFYKFIKPILEKMDGTEELLVKLNREDLLRKQRTFDNGSIPHQIHLGELHAILRRQEDFYPFLKDNREKIEKILTFRIPYYVGPLARGNSRFAWMTRKSEETITPWNFEEVVDKGASAQSFIERMTNFDKNLPNEKVLPKHSLLYEYFTVYNELTKVKYVTEGMRKPAFLSGEQKKAIVDLLFKTNRKVTVKQLKEDYFKKIECFDSVEISGVEDRFNASLGTYHDLLKIIKDKDFLDNEENEDILEDIVLTLTLFEDREMIEERLKTYAHLFDDKVMKQLKRRRYTGWGRLSRKLINGIRDKQSGKTILDFLKSDGFANRNFMQLIHDDSLTFKEDIQKAQVSGQGDSLHEHIANLAGSPAIKKGILQTVKVVDELVKVMGRHKPENIVIEMARENQTTQKGQKNSRERMKRIEEGIKELGSQILKEHPVENTQLQNEKLYLYYLQNGRDMYVDQELDINRLSDYDVDHIVPQSFLKDDSIDNKVLTRSDKARGKSDNVPSEEVVKKMKNYWRQLLNAKLITQRKFDNLTKAERGGLSELDKAGFIKRQLVETRQITKHVAQILDSRMNTKYDENDKLIREVKVITLKSKLVSDFRKDFQFYKVREINNYHHAHDAYLNAVVGTALIKKYPKLESEFVYGDYKVYDVRKMIAKSEQEIGKATAKYFFYSNIMNFFKTEITLANGEIRKRPLIETNGETGEIVWDKGRDFATVRKVLSMPQVNIVKKTEVQTGGFSKESILPKRNSDKLIARKKDWDPKKYGGFDSPTVAYSVLVVAKVEKGKSKKLKSVKELLGITIMERSSFEKNPIDFLEAKGYKEVKKDLIIKLPKYSLFELENGRKRMLASAGELQKGNELALPSKYVNFLYLASHYEKLKGSPEDNEQKQLFVEQHKHYLDEIIEQISEFSKRVILADANLDKVLSAYNKHRDKPIREQAENIIHLFTLTNLGAPAAFKYFDTTIDRKRYTSTKEVLDATLIHQSITGLYETRIDLSQLGGDGGEAAAKGGGGGTLNIEDEHRLHETSKEPDVSLGSTWLSDFPQAWAETGGMGLAVRQAPLIIPLKATSTPVSIKQYPMSQEARLGIKPHIQRLLDQGILVPCQSPWNTPLLPVKKPGTNDYRPVQDLREVNKRVEDIHPTVPNPYNLLSGLPPSHQWYTVLDLKDAFFCLRLHPTSQPLFAFEWRDPEMGISGQLTWTRLPQGFKNSPTLFNEALHRDLADFRIQHPDLILLQYVDDLLLAATSELDCQQGTRALLQTLGNLGYRASAKKAQICQKQVKYLGYLLKEGQRWLTEARKETVMGQPTPKTPRQLREFLGKAGFCRLFIPGFAEMAAPLYPLTKPGTLFNWGPDQQKAYQEIKQALLTAPALGLPDLTKPFELFVDEKQGYAKGVLTQKLGPWRRPVAYLSKKLDPVAAGWPPCLRMVAAIAVLTKDAGKLTMGQPLVILAPHAVEALVKQPPDRWLSNARMTHYQALLLDTDRVQFGPVVALNPATLLPLPEEGLQHNCLDILAEAHGTRPDLTDQPLPDADHTWYTDGSSLLQEGQRKAGAAVTTETEVIWAKALPAGTSAQRAELIALTQALKMAEGKKLNVYTDSRYAFATAHIHGEIYRRRGWLTSEGKEIKNKDEILALLKALFLPKRLSIIHCPGHQKGHSAEARGNRMADQAARKAAITETPDTSTLLAGKRTADGSEFEKRTADGSEFESPKKKAKVE

SEQ ID NO: 2797 - protein, 2098 aa, synthetic construct
MPAAKRVKLDGGDKKYSIGLDIGTNSVGWAVITDEYKVPSKKFKVLGNTDRHSIKKNLIGALLFDSGETAEATRLKRTARRRYTRRKNRICYLQEIFSNEMAKVDDSFFHRLEESFLVEEDKKHERHPIFGNIVDEVAYHEKYPTIYHLRKKLVDSTDKADLRLIYLALAHMIKFRGHFLIEGDLNPDNSDVDKLFIQLVQTYNQLFEENPINASGVDAKAILSARLSKSRRLENLIAQLPGEKKNGLFGNLIALSLGLTPNFKSNFDLAEDAKLQLSKDTYDDDLDNLLAQIGDQYADLFLAAKNLSDAILLSDILRVNTEITKAPLSASMIKRYDEHHQDLTLLKALVRQQLPEKYKEIFFDQSKNGYAGYIDGGASQEEFYKFIKPILEKMDGTEELLVKLNREDLLRKQRTFDNGSIPHQIHLGELHAILRRQEDFYPFLKDNREKIEKILTFRIPYYVGPLARGNSRFAWMTRKSEETITPWNFEEVVDKGASAQSFIERMTNFDKNLPNEKVLPKHSLLYEYFTVYNELTKVKYVTEGMRKPAFLSGEQKKAIVDLLFKTNRKVTVKQLKEDYFKKIECFDSVEISGVEDRFNASLGTYHDLLKIIKDKDFLDNEENEDILEDIVLTLTLFEDREMIEERLKTYAHLFDDKVMKQLKRRRYTGWGRLSRKLINGIRDKQSGKTILDFLKSDGFANRNFMQLIHDDSLTFKEDIQKAQVSGQGDSLHEHIANLAGSPAIKKGILQTVKVVDELVKVMGRHKPENIVIEMARENQTTQKGQKNSRERMKRIEEGIKELGSQILKEHPVENTQLQNEKLYLYYLQNGRDMYVDQELDINRLSDYDVDHIVPQSFLKDDSIDNKVLTRSDKARGKSDNVPSEEVVKKMKNYWRQLLNAKLITQRKFDNLTKAERGGLSELDKAGFIKRQLVETRQITKHVAQILDSRMNTKYDENDKLIREVKVITLKSKLVSDFRKDFQFYKVREINNYHHAHDAYLNAVVGTALIKKYPKLESEFVYGDYKVYDVRKMIAKSEQEIGKATAKYFFYSNIMNFFKTEITLANGEIRKRPLIETNGETGEIVWDKGRDFATVRKVLSMPQVNIVKKTEVQTGGFSKESILPKRNSDKLIARKKDWDPKKYGGFDSPTVAYSVLVVAKVEKGKSKKLKSVKELLGITIMERSSFEKNPIDFLEAKGYKEVKKDLIIKLPKYSLFELENGRKRMLASAGELQKGNELALPSKYVNFLYLASHYEKLKGSPEDNEQKQLFVEQHKHYLDEIIEQISEFSKRVILADANLDKVLSAYNKHRDKPIREQAENIIHLFTLTNLGAPAAFKYFDTTIDRKRYTSTKEVLDATLIHQSITGLYETRIDLSQLGGDGGPAPAPAPAPAPAPGGTLNIEDEHRLHETSKEPDVSLGSTWLSDFPQAWAETGGMGLAVRQAPLIIPLKATSTPVSIKQYPMSQEARLGIKPHIQRLLDQGILVPCQSPWNTPLLPVKKPGTNDYRPVQDLREVNKRVEDIHPTVPNPYNLLSGLPPSHQWYTVLDLKDAFFCLRLHPTSQPLFAFEWRDPEMGISGQLTWTRLPQGFKNSPTLFNEALHRDLADFRIQHPDLILLQYVDDLLLAATSELDCQQGTRALLQTLGNLGYRASAKKAQICQKQVKYLGYLLKEGQRWLTEARKETVMGQPTPKTPRQLREFLGKAGFCRLFIPGFAEMAAPLYPLTKPGTLFNWGPDQQKAYQEIKQALLTAPALGLPDLTKPFELFVDEKQGYAKGVLTQKLGPWRRPVAYLSKKLDPVAAGWPPCLRMVAAIAVLTKDAGKLTMGQPLVILAPHAVEALVKQPPDRWLSNARMTHYQALLLDTDRVQFGPVVALNPATLLPLPEEGLQHNCLDILAEAHGTRPDLTDQPLPDADHTWYTDGSSLLQEGQRKAGAAVTTETEVIWAKALPAGTSAQRAELIALTQALKMAEGKKLNVYTDSRYAFATAHIHGEIYRRRGWLTSEGKEIKNKDEILALLKALFLPKRLSIIHCPGHQKGHSAEARGNRMADQAARKAAITETPDTSTLLAGKRTADGSEFEKRTADGSEFESPKKKAKVE

SEQ ID NO: 2798 - protein, 2096 aa, synthetic construct
MPAAKRVKLDGGDKKYSIGLDIGTNSVGWAVITDEYKVPSKKFKVLGNTDRHSIKKNLIGALLFDSGETAEATRLKRTARRRYTRRKNRICYLQEIFSNEMAKVDDSFFHRLEESFLVEEDKKHERHPIFGNIVDEVAYHEKYPTIYHLRKKLVDSTDKADLRLIYLALAHMIKFRGHFLIEGDLNPDNSDVDKLFIQLVQTYNQLFEENPINASGVDAKAILSARLSKSRRLENLIAQLPGEKKNGLFGNLIALSLGLTPNFKSNFDLAEDAKLQLSKDTYDDDLDNLLAQIGDQYADLFLAAKNLSDAILLSDILRVNTEITKAPLSASMIKRYDEHHQDLTLLKALVRQQLPEKYKEIFFDQSKNGYAGYIDGGASQEEFYKFIKPILEKMDGTEELLVKLNREDLLRKQRTFDNGSIPHQIHLGELHAILRRQEDFYPFLKDNREKIEKILTFRIPYYVGPLARGNSRFAWMTRKSEETITPWNFEEVVDKGASAQSFIERMTNFDKNLPNEKVLPKHSLLYEYFTVYNELTKVKYVTEGMRKPAFLSGEQKKAIVDLLFKTNRKVTVKQLKEDYFKKIECFDSVEISGVEDRFNASLGTYHDLLKIIKDKDFLDNEENEDILEDIVLTLTLFEDREMIEERLKTYAHLFDDKVMKQLKRRRYTGWGRLSRKLINGIRDKQSGKTILDFLKSDGFANRNFMQLIHDDSLTFKEDIQKAQVSGQGDSLHEHIANLAGSPAIKKGILQTVKVVDELVKVMGRHKPENIVIEMARENQTTQKGQKNSRERMKRIEEGIKELGSQILKEHPVENTQLQNEKLYLYYLQNGRDMYVDQELDINRLSDYDVDHIVPQSFLKDDSIDNKVLTRSDKARGKSDNVPSEEVVKKMKNYWRQLLNAKLITQRKFDNLTKAERGGLSELDKAGFIKRQLVETRQITKHVAQILDSRMNTKYDENDKLIREVKVITLKSKLVSDFRKDFQFYKVREINNYHHAHDAYLNAVVGTALIKKYPKLESEFVYGDYKVYDVRKMIAKSEQEIGKATAKYFFYSNIMNFFKTEITLANGEIRKRPLIETNGETGEIVWDKGRDFATVRKVLSMPQVNIVKKTEVQTGGFSKESILPKRNSDKLIARKKDWDPKKYGGFDSPTVAYSVLVVAKVEKGKSKKLKSVKELLGITIMERSSFEKNPIDFLEAKGYKEVKKDLIIKLPKYSLFELENGRKRMLASAGELQKGNELALPSKYVNFLYLASHYEKLKGSPEDNEQKQLFVEQHKHYLDEIIEQISEFSKRVILADANLDKVLSAYNKHRDKPIREQAENIIHLFTLTNLGAPAAFKYFDTTIDRKRYTSTKEVLDATLIHQSITGLYETRIDLSQLGGDGGPAPGSSEAAAKGGTLNIEDEHRLHETSKEPDVSLGSTWLSDFPQAWAETGGMGLAVRQAPLIIPLKATSTPVSIKQYPMSQEARLGIKPHIQRLLDQGILVPCQSPWNTPLLPVKKPGTNDYRPVQDLREVNKRVEDIHPTVPNPYNLLSGLPPSHQWYTVLDLKDAFFCLRLHPTSQPLFAFEWRDPEMGISGQLTWTRLPQGFKNSPTLFNEALHRDLADFRIQHPDLILLQYVDDLLLAATSELDCQQGTRALLQTLGNLGYRASAKKAQICQKQVKYLGYLLKEGQRWLTEARKETVMGQPTPKTPRQLREFLGKAGFCRLFIPGFAEMAAPLYPLTKPGTLFNWGPDQQKAYQEIKQALLTAPALGLPDLTKPFELFVDEKQGYAKGVLTQKLGPWRRPVAYLSKKLDPVAAGWPPCLRMVAAIAVLTKDAGKLTMGQPLVILAPHAVEALVKQPPDRWLSNARMTHYQALLLDTDRVQFGPVVALNPATLLPLPEEGLQHNCLDILAEAHGTRPDLTDQPLPDADHTWYTDGSSLLQEGQRKAGAAVTTETEVIWAKALPAGTSAQRAELIALTQALKMAEGKKLNVYTDSRYAFATAHIHGEIYRRRGWLTSEGKEIKNKDEILALLKALFLPKRLSIIHCPGHQKGHSAEARGNRMADQAARKAAITETPDTSTLLAGKRTADGSEFEKRTADGSEFESPKKKAKVE

SEQ ID NO: 2799 - protein, 2096 aa, synthetic construct
MPAAKRVKLDGGDKKYSIGLDIGTNSVGWAVITDEYKVPSKKFKVLGNTDRHSIKKNLIGALLFDSGETAEATRLKRTARRRYTRRKNRICYLQEIFSNEMAKVDDSFFHRLEESFLVEEDKKHERHPIFGNIVDEVAYHEKYPTIYHLRKKLVDSTDKADLRLIYLALAHMIKFRGHFLIEGDLNPDNSDVDKLFIQLVQTYNQLFEENPINASGVDAKAILSARLSKSRRLENLIAQLPGEKKNGLFGNLIALSLGLTPNFKSNFDLAEDAKLQLSKDTYDDDLDNLLAQIGDQYADLFLAAKNLSDAILLSDILRVNTEITKAPLSASMIKRYDEHHQDLTLLKALVRQQLPEKYKEIFFDQSKNGYAGYIDGGASQEEFYKFIKPILEKMDGTEELLVKLNREDLLRKQRTFDNGSIPHQIHLGELHAILRRQEDFYPFLKDNREKIEKILTFRIPYYVGPLARGNSRFAWMTRKSEETITPWNFEEVVDKGASAQSFIERMTNFDKNLPNEKVLPKHSLLYEYFTVYNELTKVKYVTEGMRKPAFLSGEQKKAIVDLLFKTNRKVTVKQLKEDYFKKIECFDSVEISGVEDRFNASLGTYHDLLKIIKDKDFLDNEENEDILEDIVLTLTLFEDREMIEERLKTYAHLFDDKVMKQLKRRRYTGWGRLSRKLINGIRDKQSGKTILDFLKSDGFANRNFMQLIHDDSLTFKEDIQKAQVSGQGDSLHEHIANLAGSPAIKKGILQTVKVVDELVKVMGRHKPENIVIEMARENQTTQKGQKNSRERMKRIEEGIKELGSQILKEHPVENTQLQNEKLYLYYLQNGRDMYVDQELDINRLSDYDVDHIVPQSFLKDDSIDNKVLTRSDKARGKSDNVPSEEVVKKMKNYWRQLLNAKLITQRKFDNLTKAERGGLSELDKAGFIKRQLVETRQITKHVAQILDSRMNTKYDENDKLIREVKVITLKSKLVSDFRKDFQFYKVREINNYHHAHDAYLNAVVGTALIKKYPKLESEFVYGDYKVYDVRKMIAKSEQEIGKATAKYFFYSNIMNFFKTEITLANGEIRKRPLIETNGETGEIVWDKGRDFATVRKVLSMPQVNIVKKTEVQTGGFSKESILPKRNSDKLIARKKDWDPKKYGGFDSPTVAYSVLVVAKVEKGKSKKLKSVKELLGITIMERSSFEKNPIDFLEAKGYKEVKKDLIIKLPKYSLFELENGRKRMLASAGELQKGNELALPSKYVNFLYLASHYEKLKGSPEDNEQKQLFVEQHKHYLDEIIEQISEFSKRVILADANLDKVLSAYNKHRDKPIREQAENIIHLFTLTNLGAPAAFKYFDTTIDRKRYTSTKEVLDATLIHQSITGLYETRIDLSQLGGDGGEAAAKGSSGGSGGTLNIEDEHRLHETSKEPDVSLGSTWLSDFPQAWAETGGMGLAVRQAPLIIPLKATSTPVSIKQYPMSQEARLGIKPHIQRLLDQGILVPCQSPWNTPLLPVKKPGTNDYRPVQDLREVNKRVEDIHPTVPNPYNLLSGLPPSHQWYTVLDLKDAFFCLRLHPTSQPLFAFEWRDPEMGISGQLTWTRLPQGFKNSPTLFNEALHRDLADFRIQHPDLILLQYVDDLLLAATSELDCQQGTRALLQTLGNLGYRASAKKAQICQKQVKYLGYLLKEGQRWLTEARKETVMGQPTPKTPRQLREFLGKAGFCRLFIPGFAEMAAPLYPLTKPGTLFNWGPDQQKAYQEIKQALLTAPALGLPDLTKPFELFVDEKQGYAKGVLTQKLGPWRRPVAYLSKKLDPVAAGWPPCLRMVAAIAVLTKDAGKLTMGQPLVILAPHAVEALVKQPPDRWLSNARMTHYQALLLDTDRVQFGPVVALNPATLLPLPEEGLQHNCLDILAEAHGTRPDLTDQPLPDADHTWYTDGSSLLQEGQRKAGAAVTTETEVIWAKALPAGTSAQRAELIALTQALKMAEGKKLNVYTDSRYAFATAHIHGEIYRRRGWLTSEGKEIKNKDEILALLKALFLPKRLSIIHCPGHQKGHSAEARGNRMADQAARKAAITETPDTSTLLAGKRTADGSEFEKRTADGSEFESPKKKAKVE

SEQ ID NO: 2800 - protein, 2094 aa, synthetic construct
MPAAKRVKLDGGDKKYSIGLDIGTNSVGWAVITDEYKVPSKKFKVLGNTDRHSIKKNLIGALLFDSGETAEATRLKRTARRRYTRRKNRICYLQEIFSNEMAKVDDSFFHRLEESFLVEEDKKHERHPIFGNIVDEVAYHEKYPTIYHLRKKLVDSTDKADLRLIYLALAHMIKFRGHFLIEGDLNPDNSDVDKLFIQLVQTYNQLFEENPINASGVDAKAILSARLSKSRRLENLIAQLPGEKKNGLFGNLIALSLGLTPNFKSNFDLAEDAKLQLSKDTYDDDLDNLLAQIGDQYADLFLAAKNLSDAILLSDILRVNTEITKAPLSASMIKRYDEHHQDLTLLKALVRQQLPEKYKEIFFDQSKNGYAGYIDGGASQEEFYKFIKPILEKMDGTEELLVKLNREDLLRKQRTFDNGSIPHQIHLGELHAILRRQEDFYPFLKDNREKIEKILTFRIPYYVGPLARGNSRFAWMTRKSEETITPWNFEEVVDKGASAQSFIERMTNFDKNLPNEKVLPKHSLLYEYFTVYNELTKVKYVTEGMRKPAFLSGEQKKAIVDLLFKTNRKVTVKQLKEDYFKKIECFDSVEISGVEDRFNASLGTYHDLLKIIKDKDFLDNEENEDILEDIVLTLTLFEDREMIEERLKTYAHLFDDKVMKQLKRRRYTGWGRLSRKLINGIRDKQSGKTILDFLKSDGFANRNFMQLIHDDSLTFKEDIQKAQVSGQGDSLHEHIANLAGSPAIKKGILQTVKVVDELVKVMGRHKPENIVIEMARENQTTQKGQKNSRERMKRIEEGIKELGSQILKEHPVENTQLQNEKLYLYYLQNGRDMYVDQELDINRLSDYDVDHIVPQSFLKDDSIDNKVLTRSDKARGKSDNVPSEEVVKKMKNYWRQLLNAKLITQRKFDNLTKAERGGLSELDKAGFIKRQLVETRQITKHVAQILDSRMNTKYDENDKLIREVKVITLKSKLVSDFRKDFQFYKVREINNYHHAHDAYLNAVVGTALIKKYPKLESEFVYGDYKVYDVRKMIAKSEQEIGKATAKYFFYSNIMNFFKTEITLANGEIRKRPLIETNGETGEIVWDKGRDFATVRKVLSMPQVNIVKKTEVQTGGFSKESILPKRNSDKLIARKKDWDPKKYGGFDSPTVAYSVLVVAKVEKGKSKKLKSVKELLGITIMERSSFEKNPIDFLEAKGYKEVKKDLIIKLPKYSLFELENGRKRMLASAGELQKGNELALPSKYVNFLYLASHYEKLKGSPEDNEQKQLFVEQHKHYLDEIIEQISEFSKRVILADANLDKVLSAYNKHRDKPIREQAENIIHLFTLTNLGAPAAFKYFDTTIDRKRYTSTKEVLDATLIHQSITGLYETRIDLSQLGGDGGGGGPAPGGSGGTLNIEDEHRLHETSKEPDVSLGSTWLSDFPQAWAETGGMGLAVRQAPLIIPLKATSTPVSIKQYPMSQEARLGIKPHIQRLLDQGILVPCQSPWNTPLLPVKKPGTNDYRPVQDLREVNKRVEDIHPTVPNPYNLLSGLPPSHQWYTVLDLKDAFFCLRLHPTSQPLFAFEWRDPEMGISGQLTWTRLPQGFKNSPTLFNEALHRDLADFRIQHPDLILLQYVDDLLLAATSELDCQQGTRALLQTLGNLGYRASAKKAQICQKQVKYLGYLLKEGQRWLTEARKETVMGQPTPKTPRQLREFLGKAGFCRLFIPGFAEMAAPLYPLTKPGTLFNWGPDQQKAYQEIKQALLTAPALGLPDLTKPFELFVDEKQGYAKGVLTQKLGPWRRPVAYLSKKLDPVAAGWPPCLRMVAAIAVLTKDAGKLTMGQPLVILAPHAVEALVKQPPDRWLSNARMTHYQALLLDTDRVQFGPVVALNPATLLPLPEEGLQHNCLDILAEAHGTRPDLTDQPLPDADHTWYTDGSSLLQEGQRKAGAAVTTETEVIWAKALPAGTSAQRAELIALTQALKMAEGKKLNVYTDSRYAFATAHIHGEIYRRRGWLTSEGKEIKNKDEILALLKALFLPKRLSIIHCPGHQKGHSAEARGNRMADQAARKAAITETPDTSTLLAGKRTADGSEFEKRTADGSEFESPKKKAKVE

SEQ ID NO: 2801 - protein, 2094 aa, synthetic construct
MPAAKRVKLDGGDKKYSIGLDIGTNSVGWAVITDEYKVPSKKFKVLGNTDRHSIKKNLIGALLFDSGETAEATRLKRTARRRYTRRKNRICYLQEIFSNEMAKVDDSFFHRLEESFLVEEDKKHERHPIFGNIVDEVAYHEKYPTIYHLRKKLVDSTDKADLRLIYLALAHMIKFRGHFLIEGDLNPDNSDVDKLFIQLVQTYNQLFEENPINASGVDAKAILSARLSKSRRLENLIAQLPGEKKNGLFGNLIALSLGLTPNFKSNFDLAEDAKLQLSKDTYDDDLDNLLAQIGDQYADLFLAAKNLSDAILLSDILRVNTEITKAPLSASMIKRYDEHHQDLTLLKALVRQQLPEKYKEIFFDQSKNGYAGYIDGGASQEEFYKFIKPILEKMDGTEELLVKLNREDLLRKQRTFDNGSIPHQIHLGELHAILRRQEDFYPFLKDNREKIEKILTFRIPYYVGPLARGNSRFAWMTRKSEETITPWNFEEVVDKGASAQSFIERMTNFDKNLPNEKVLPKHSLLYEYFTVYNELTKVKYVTEGMRKPAFLSGEQKKAIVDLLFKTNRKVTVKQLKEDYFKKIECFDSVEISGVEDRFNASLGTYHDLLKIIKDKDFLDNEENEDILEDIVLTLTLFEDREMIEERLKTYAHLFDDKVMKQLKRRRYTGWGRLSRKLINGIRDKQSGKTILDFLKSDGFANRNFMQLIHDDSLTFKEDIQKAQVSGQGDSLHEHIANLAGSPAIKKGILQTVKVVDELVKVMGRHKPENIVIEMARENQTTQKGQKNSRERMKRIEEGIKELGSQILKEHPVENTQLQNEKLYLYYLQNGRDMYVDQELDINRLSDYDVDHIVPQSFLKDDSIDNKVLTRSDKARGKSDNVPSEEVVKKMKNYWRQLLNAKLITQRKFDNLTKAERGGLSELDKAGFIKRQLVETRQITKHVAQILDSRMNTKYDENDKLIREVKVITLKSKLVSDFRKDFQFYKVREINNYHHAHDAYLNAVVGTALIKKYPKLESEFVYGDYKVYDVRKMIAKSEQEIGKATAKYFFYSNIMNFFKTEITLANGEIRKRPLIETNGETGEIVWDKGRDFATVRKVLSMPQVNIVKKTEVQTGGFSKESILPKRNSDKLIARKKDWDPKKYGGFDSPTVAYSVLVVAKVEKGKSKKLKSVKELLGITIMERSSFEKNPIDFLEAKGYKEVKKDLIIKLPKYSLFELENGRKRMLASAGELQKGNELALPSKYVNFLYLASHYEKLKGSPEDNEQKQLFVEQHKHYLDEIIEQISEFSKRVILADANLDKVLSAYNKHRDKPIREQAENIIHLFTLTNLGAPAAFKYFDTTIDRKRYTSTKEVLDATLIHQSITGLYETRIDLSQLGGDGGGGSPAPGGGGGTLNIEDEHRLHETSKEPDVSLGSTWLSDFPQAWAETGGMGLAVRQAPLIIPLKATSTPVSIKQYPMSQEARLGIKPHIQRLLDQGILVPCQSPWNTPLLPVKKPGTNDYRPVQDLREVNKRVEDIHPTVPNPYNLLSGLPPSHQWYTVLDLKDAFFCLRLHPTSQPLFAFEWRDPEMGISGQLTWTRLPQGFKNSPTLFNEALHRDLADFRIQHPDLILLQYVDDLLLAATSELDCQQGTRALLQTLGNLGYRASAKKAQICQKQVKYLGYLLKEGQRWLTEARKETVMGQPTPKTPRQLREFLGKAGFCRLFIPGFAEMAAPLYPLTKPGTLFNWGPDQQKAYQEIKQALLTAPALGLPDLTKPFELFVDEKQGYAKGVLTQKLGPWRRPVAYLSKKLDPVAAGWPPCLRMVAAIAVLTKDAGKLTMGQPLVILAPHAVEALVKQPPDRWLSNARMTHYQALLLDTDRVQFGPVVALNPATLLPLPEEGLQHNCLDILAEAHGTRPDLTDQPLPDADHTWYTDGSSLLQEGQRKAGAAVTTETEVIWAKALPAGTSAQRAELIALTQALKMAEGKKLNVYTDSRYAFATAHIHGEIYRRRGWLTSEGKEIKNKDEILALLKALFLPKRLSIIHCPGHQKGHSAEARGNRMADQAARKAAITETPDTSTLLAGKRTADGSEFEKRTADGSEFESPKKKAKVE

SEQ ID NO: 2802 - protein, 2100 aa, synthetic construct
MPAAKRVKLDGGDKKYSIGLDIGTNSVGWAVITDEYKVPSKKFKVLGNTDRHSIKKNLIGALLFDSGETAEATRLKRTARRRYTRRKNRICYLQEIFSNEMAKVDDSFFHRLEESFLVEEDKKHERHPIFGNIVDEVAYHEKYPTIYHLRKKLVDSTDKADLRLIYLALAHMIKFRGHFLIEGDLNPDNSDVDKLFIQLVQTYNQLFEENPINASGVDAKAILSARLSKSRRLENLIAQLPGEKKNGLFGNLIALSLGLTPNFKSNFDLAEDAKLQLSKDTYDDDLDNLLAQIGDQYADLFLAAKNLSDAILLSDILRVNTEITKAPLSASMIKRYDEHHQDLTLLKALVRQQLPEKYKEIFFDQSKNGYAGYIDGGASQEEFYKFIKPILEKMDGTEELLVKLNREDLLRKQRTFDNGSIPHQIHLGELHAILRRQEDFYPFLKDNREKIEKILTFRIPYYVGPLARGNSRFAWMTRKSEETITPWNFEEVVDKGASAQSFIERMTNFDKNLPNEKVLPKHSLLYEYFTVYNELTKVKYVTEGMRKPAFLSGEQKKAIVDLLFKTNRKVTVKQLKEDYFKKIECFDSVEISGVEDRFNASLGTYHDLLKIIKDKDFLDNEENEDILEDIVLTLTLFEDREMIEERLKTYAHLFDDKVMKQLKRRRYTGWGRLSRKLINGIRDKQSGKTILDFLKSDGFANRNFMQLIHDDSLTFKEDIQKAQVSGQGDSLHEHIANLAGSPAIKKGILQTVKVVDELVKVMGRHKPENIVIEMARENQTTQKGQKNSRERMKRIEEGIKELGSQILKEHPVENTQLQNEKLYLYYLQNGRDMYVDQELDINRLSDYDVDHIVPQSFLKDDSIDNKVLTRSDKARGKSDNVPSEEVVKKMKNYWRQLLNAKLITQRKFDNLTKAERGGLSELDKAGFIKRQLVETRQITKHVAQILDSRMNTKYDENDKLIREVKVITLKSKLVSDFRKDFQFYKVREINNYHHAHDAYLNAVVGTALIKKYPKLESEFVYGDYKVYDVRKMIAKSEQEIGKATAKYFFYSNIMNFFKTEITLANGEIRKRPLIETNGETGEIVWDKGRDFATVRKVLSMPQVNIVKKTEVQTGGFSKESILPKRNSDKLIARKKDWDPKKYGGFDSPTVAYSVLVVAKVEKGKSKKLKSVKELLGITIMERSSFEKNPIDFLEAKGYKEVKKDLIIKLPKYSLFELENGRKRMLASAGELQKGNELALPSKYVNFLYLASHYEKLKGSPEDNEQKQLFVEQHKHYLDEIIEQISEFSKRVILADANLDKVLSAYNKHRDKPIREQAENIIHLFTLTNLGAPAAFKYFDTTIDRKRYTSTKEVLDATLIHQSITGLYETRIDLSQLGGDGGGSSGSSGSSGSSGSSGGTLNIEDEHRLHETSKEPDVSLGSTWLSDFPQAWAETGGMGLAVRQAPLIIPLKATSTPVSIKQYPMSQEARLGIKPHIQRLLDQGILVPCQSPWNTPLLPVKKPGTNDYRPVQDLREVNKRVEDIHPTVPNPYNLLSGLPPSHQWYTVLDLKDAFFCLRLHPTSQPLFAFEWRDPEMGISGQLTWTRLPQGFKNSPTLFNEALHRDLADFRIQHPDLILLQYVDDLLLAATSELDCQQGTRALLQTLGNLGYRASAKKAQICQKQVKYLGYLLKEGQRWLTEARKETVMGQPTPKTPRQLREFLGKAGFCRLFIPGFAEMAAPLYPLTKPGTLFNWGPDQQKAYQEIKQALLTAPALGLPDLTKPFELFVDEKQGYAKGVLTQKLGPWRRPVAYLSKKLDPVAAGWPPCLRMVAAIAVLTKDAGKLTMGQPLVILAPHAVEALVKQPPDRWLSNARMTHYQALLLDTDRVQFGPVVALNPATLLPLPEEGLQHNCLDILAEAHGTRPDLTDQPLPDADHTWYTDGSSLLQEGQRKAGAAVTTETEVIWAKALPAGTSAQRAELIALTQALKMAEGKKLNVYTDSRYAFATAHIHGEIYRRRGWLTSEGKEIKNKDEILALLKALFLPKRLSIIHCPGHQKGHSAEARGNRMADQAARKAAITETPDTSTLLAGKRTADGSEFEKRTADGSEFESPKKKAKVE

SEQ ID NO: 2803 - protein, 2110 aa, synthetic construct
MPAAKRVKLDGGDKKYSIGLDIGTNSVGWAVITDEYKVPSKKFKVLGNTDRHSIKKNLIGALLFDSGETAEATRLKRTARRRYTRRKNRICYLQEIFSNEMAKVDDSFFHRLEESFLVEEDKKHERHPIFGNIVDEVAYHEKYPTIYHLRKKLVDSTDKADLRLIYLALAHMIKFRGHFLIEGDLNPDNSDVDKLFIQLVQTYNQLFEENPINASGVDAKAILSARLSKSRRLENLIAQLPGEKKNGLFGNLIALSLGLTPNFKSNFDLAEDAKLQLSKDTYDDDLDNLLAQIGDQYADLFLAAKNLSDAILLSDILRVNTEITKAPLSASMIKRYDEHHQDLTLLKALVRQQLPEKYKEIFFDQSKNGYAGYIDGGASQEEFYKFIKPILEKMDGTEELLVKLNREDLLRKQRTFDNGSIPHQIHLGELHAILRRQEDFYPFLKDNREKIEKILTFRIPYYVGPLARGNSRFAWMTRKSEETITPWNFEEVVDKGASAQSFIERMTNFDKNLPNEKVLPKHSLLYEYFTVYNELTKVKYVTEGMRKPAFLSGEQKKAIVDLLFKTNRKVTVKQLKEDYFKKIECFDSVEISGVEDRFNASLGTYHDLLKIIKDKDFLDNEENEDILEDIVLTLTLFEDREMIEERLKTYAHLFDDKVMKQLKRRRYTGWGRLSRKLINGIRDKQSGKTILDFLKSDGFANRNFMQLIHDDSLTFKEDIQKAQVSGQGDSLHEHIANLAGSPAIKKGILQTVKVVDELVKVMGRHKPENIVIEMARENQTTQKGQKNSRERMKRIEEGIKELGSQILKEHPVENTQLQNEKLYLYYLQNGRDMYVDQELDINRLSDYDVDHIVPQSFLKDDSIDNKVLTRSDKARGKSDNVPSEEVVKKMKNYWRQLLNAKLITQRKFDNLTKAERGGLSELDKAGFIKRQLVETRQITKHVAQILDSRMNTKYDENDKLIREVKVITLKSKLVSDFRKDFQFYKVREINNYHHAHDAYLNAVVGTALIKKYPKLESEFVYGDYKVYDVRKMIAKSEQEIGKATAKYFFYSNIMNFFKTEITLANGEIRKRPLIETNGETGEIVWDKGRDFATVRKVLSMPQVNIVKKTEVQTGGFSKESILPKRNSDKLIARKKDWDPKKYGGFDSPTVAYSVLVVAKVEKGKSKKLKSVKELLGITIMERSSFEKNPIDFLEAKGYKEVKKDLIIKLPKYSLFELENGRKRMLASAGELQKGNELALPSKYVNFLYLASHYEKLKGSPEDNEQKQLFVEQHKHYLDEIIEQISEFSKRVILADANLDKVLSAYNKHRDKPIREQAENIIHLFTLTNLGAPAAFKYFDTTIDRKRYTSTKEVLDATLIHQSITGLYETRIDLSQLGGDGGEAAAKEAAAKEAAAKEAAAKEAAAKGGTLNIEDEHRLHETSKEPDVSLGSTWLSDFPQAWAETGGMGLAVRQAPLIIPLKATSTPVSIKQYPMSQEARLGIKPHIQRLLDQGILVPCQSPWNTPLLPVKKPGTNDYRPVQDLREVNKRVEDIHPTVPNPYNLLSGLPPSHQWYTVLDLKDAFFCLRLHPTSQPLFAFEWRDPEMGISGQLTWTRLPQGFKNSPTLFNEALHRDLADFRIQHPDLILLQYVDDLLLAATSELDCQQGTRALLQTLGNLGYRASAKKAQICQKQVKYLGYLLKEGQRWLTEARKETVMGQPTPKTPRQLREFLGKAGFCRLFIPGFAEMAAPLYPLTKPGTLFNWGPDQQKAYQEIKQALLTAPALGLPDLTKPFELFVDEKQGYAKGVLTQKLGPWRRPVAYLSKKLDPVAAGWPPCLRMVAAIAVLTKDAGKLTMGQPLVILAPHAVEALVKQPPDRWLSNARMTHYQALLLDTDRVQFGPVVALNPATLLPLPEEGLQHNCLDILAEAHGTRPDLTDQPLPDADHTWYTDGSSLLQEGQRKAGAAVTTETEVIWAKALPAGTSAQRAELIALTQALKMAEGKKLNVYTDSRYAFATAHIHGEIYRRRGWLTSEGKEIKNKDEILALLKALFLPKRLSIIHCPGHQKGHSAEARGNRMADQAARKAAITETPDTSTLLAGKRTADGSEFEKRTADGSEFESPKKKAKVE

SEQ ID NO: 2804 - protein, 2094 aa, synthetic construct
MPAAKRVKLDGGDKKYSIGLDIGTNSVGWAVITDEYKVPSKKFKVLGNTDRHSIKKNLIGALLFDSGETAEATRLKRTARRRYTRRKNRICYLQEIFSNEMAKVDDSFFHRLEESFLVEEDKKHERHPIFGNIVDEVAYHEKYPTIYHLRKKLVDSTDKADLRLIYLALAHMIKFRGHFLIEGDLNPDNSDVDKLFIQLVQTYNQLFEENPINASGVDAKAILSARLSKSRRLENLIAQLPGEKKNGLFGNLIALSLGLTPNFKSNFDLAEDAKLQLSKDTYDDDLDNLLAQIGDQYADLFLAAKNLSDAILLSDILRVNTEITKAPLSASMIKRYDEHHQDLTLLKALVRQQLPEKYKEIFFDQSKNGYAGYIDGGASQEEFYKFIKPILEKMDGTEELLVKLNREDLLRKQRTFDNGSIPHQIHLGELHAILRRQEDFYPFLKDNREKIEKILTFRIPYYVGPLARGNSRFAWMTRKSEETITPWNFEEVVDKGASAQSFIERMTNFDKNLPNEKVLPKHSLLYEYFTVYNELTKVKYVTEGMRKPAFLSGEQKKAIVDLLFKTNRKVTVKQLKEDYFKKIECFDSVEISGVEDRFNASLGTYHDLLKIIKDKDFLDNEENEDILEDIVLTLTLFEDREMIEERLKTYAHLFDDKVMKQLKRRRYTGWGRLSRKLINGIRDKQSGKTILDFLKSDGFANRNFMQLIHDDSLTFKEDIQKAQVSGQGDSLHEHIANLAGSPAIKKGILQTVKVVDELVKVMGRHKPENIVIEMARENQTTQKGQKNSRERMKRIEEGIKELGSQILKEHPVENTQLQNEKLYLYYLQNGRDMYVDQELDINRLSDYDVDHIVPQSFLKDDSIDNKVLTRSDKARGKSDNVPSEEVVKKMKNYWRQLLNAKLITQRKFDNLTKAERGGLSELDKAGFIKRQLVETRQITKHVAQILDSRMNTKYDENDKLIREVKVITLKSKLVSDFRKDFQFYKVREINNYHHAHDAYLNAVVGTALIKKYPKLESEFVYGDYKVYDVRKMIAKSEQEIGKATAKYFFYSNIMNFFKTEITLANGEIRKRPLIETNGETGEIVWDKGRDFATVRKVLSMPQVNIVKKTEVQTGGFSKESILPKRNSDKLIARKKDWDPKKYGGFDSPTVAYSVLVVAKVEKGKSKKLKSVKELLGITIMERSSFEKNPIDFLEAKGYKEVKKDLIIKLPKYSLFELENGRKRMLASAGELQKGNELALPSKYVNFLYLASHYEKLKGSPEDNEQKQLFVEQHKHYLDEIIEQISEFSKRVILADANLDKVLSAYNKHRDKPIREQAENIIHLFTLTNLGAPAAFKYFDTTIDRKRYTSTKEVLDATLIHQSITGLYETRIDLSQLGGDGGGGSGGGPAPGGTLNIEDEHRLHETSKEPDVSLGSTWLSDFPQAWAETGGMGLAVRQAPLIIPLKATSTPVSIKQYPMSQEARLGIKPHIQRLLDQGILVPCQSPWNTPLLPVKKPGTNDYRPVQDLREVNKRVEDIHPTVPNPYNLLSGLPPSHQWYTVLDLKDAFFCLRLHPTSQPLFAFEWRDPEMGISGQLTWTRLPQGFKNSPTLFNEALHRDLADFRIQHPDLILLQYVDDLLLAATSELDCQQGTRALLQTLGNLGYRASAKKAQICQKQVKYLGYLLKEGQRWLTEARKETVMGQPTPKTPRQLREFLGKAGFCRLFIPGFAEMAAPLYPLTKPGTLFNWGPDQQKAYQEIKQALLTAPALGLPDLTKPFELFVDEKQGYAKGVLTQKLGPWRRPVAYLSKKLDPVAAGWPPCLRMVAAIAVLTKDAGKLTMGQPLVILAPHAVEALVKQPPDRWLSNARMTHYQALLLDTDRVQFGPVVALNPATLLPLPEEGLQHNCLDILAEAHGTRPDLTDQPLPDADHTWYTDGSSLLQEGQRKAGAAVTTETEVIWAKALPAGTSAQRAELIALTQALKMAEGKKLNVYTDSRYAFATAHIHGEIYRRRGWLTSEGKEIKNKDEILALLKALFLPKRLSIIHCPGHQKGHSAEARGNRMADQAARKAAITETPDTSTLLAGKRTADGSEFEKRTADGSEFESPKKKAKVE

SEQ ID NO: 2805 - protein, 2096 aa, synthetic construct
MPAAKRVKLDGGDKKYSIGLDIGTNSVGWAVITDEYKVPSKKFKVLGNTDRHSIKKNLIGALLFDSGETAEATRLKRTARRRYTRRKNRICYLQEIFSNEMAKVDDSFFHRLEESFLVEEDKKHERHPIFGNIVDEVAYHEKYPTIYHLRKKLVDSTDKADLRLIYLALAHMIKFRGHFLIEGDLNPDNSDVDKLFIQLVQTYNQLFEENPINASGVDAKAILSARLSKSRRLENLIAQLPGEKKNGLFGNLIALSLGLTPNFKSNFDLAEDAKLQLSKDTYDDDLDNLLAQIGDQYADLFLAAKNLSDAILLSDILRVNTEITKAPLSASMIKRYDEHHQDLTLLKALVRQQLPEKYKEIFFDQSKNGYAGYIDGGASQEEFYKFIKPILEKMDGTEELLVKLNREDLLRKQRTFDNGSIPHQIHLGELHAILRRQEDFYPFLKDNREKIEKILTFRIPYYVGPLARGNSRFAWMTRKSEETITPWNFEEVVDKGASAQSFIERMTNFDKNLPNEKVLPKHSLLYEYFTVYNELTKVKYVTEGMRKPAFLSGEQKKAIVDLLFKTNRKVTVKQLKEDYFKKIECFDSVEISGVEDRFNASLGTYHDLLKIIKDKDFLDNEENEDILEDIVLTLTLFEDREMIEERLKTYAHLFDDKVMKQLKRRRYTGWGRLSRKLINGIRDKQSGKTILDFLKSDGFANRNFMQLIHDDSLTFKEDIQKAQVSGQGDSLHEHIANLAGSPAIKKGILQTVKVVDELVKVMGRHKPENIVIEMARENQTTQKGQKNSRERMKRIEEGIKELGSQILKEHPVENTQLQNEKLYLYYLQNGRDMYVDQELDINRLSDYDVDHIVPQSFLKDDSIDNKVLTRSDKARGKSDNVPSEEVVKKMKNYWRQLLNAKLITQRKFDNLTKAERGGLSELDKAGFIKRQLVETRQITKHVAQILDSRMNTKYDENDKLIREVKVITLKSKLVSDFRKDFQFYKVREINNYHHAHDAYLNAVVGTALIKKYPKLESEFVYGDYKVYDVRKMIAKSEQEIGKATAKYFFYSNIMNFFKTEITLANGEIRKRPLIETNGETGEIVWDKGRDFATVRKVLSMPQVNIVKKTEVQTGGFSKESILPKRNSDKLIARKKDWDPKKYGGFDSPTVAYSVLVVAKVEKGKSKKLKSVKELLGITIMERSSFEKNPIDFLEAKGYKEVKKDLIIKLPKYSLFELENGRKRMLASAGELQKGNELALPSKYVNFLYLASHYEKLKGSPEDNEQKQLFVEQHKHYLDEIIEQISEFSKRVILADANLDKVLSAYNKHRDKPIREQAENIIHLFTLTNLGAPAAFKYFDTTIDRKRYTSTKEVLDATLIHQSITGLYETRIDLSQLGGDGGGGSPAPEAAAKGGTLNIEDEHRLHETSKEPDVSLGSTWLSDFPQAWAETGGMGLAVRQAPLIIPLKATSTPVSIKQYPMSQEARLGIKPHIQRLLDQGILVPCQSPWNTPLLPVKKPGTNDYRPVQDLREVNKRVEDIHPTVPNPYNLLSGLPPSHQWYTVLDLKDAFFCLRLHPTSQPLFAFEWRDPEMGISGQLTWTRLPQGFKNSPTLFNEALHRDLADFRIQHPDLILLQYVDDLLLAATSELDCQQGTRALLQTLGNLGYRASAKKAQICQKQVKYLGYLLKEGQRWLTEARKETVMGQPTPKTPRQLREFLGKAGFCRLFIPGFAEMAAPLYPLTKPGTLFNWGPDQQKAYQEIKQALLTAPALGLPDLTKPFELFVDEKQGYAKGVLTQKLGPWRRPVAYLSKKLDPVAAGWPPCLRMVAAIAVLTKDAGKLTMGQPLVILAPHAVEALVKQPPDRWLSNARMTHYQALLLDTDRVQFGPVVALNPATLLPLPEEGLQHNCLDILAEAHGTRPDLTDQPLPDADHTWYTDGSSLLQEGQRKAGAAVTTETEVIWAKALPAGTSAQRAELIALTQALKMAEGKKLNVYTDSRYAFATAHIHGEIYRRRGWLTSEGKEIKNKDEILALLKALFLPKRLSIIHCPGHQKGHSAEARGNRMADQAARKAAITETPDTSTLLAGKRTADGSEFEKRTADGSEFESPKKKAKVE

SEQ ID NO: 2806 - protein, 2097 aa, synthetic construct
MPAAKRVKLDGGDKKYSIGLDIGTNSVGWAVITDEYKVPSKKFKVLGNTDRHSIKKNLIGALLFDSGETAEATRLKRTARRRYTRRKNRICYLQEIFSNEMAKVDDSFFHRLEESFLVEEDKKHERHPIFGNIVDEVAYHEKYPTIYHLRKKLVDSTDKADLRLIYLALAHMIKFRGHFLIEGDLNPDNSDVDKLFIQLVQTYNQLFEENPINASGVDAKAILSARLSKSRRLENLIAQLPGEKKNGLFGNLIALSLGLTPNFKSNFDLAEDAKLQLSKDTYDDDLDNLLAQIGDQYADLFLAAKNLSDAILLSDILRVNTEITKAPLSASMIKRYDEHHQDLTLLKALVRQQLPEKYKEIFFDQSKNGYAGYIDGGASQEEFYKFIKPILEKMDGTEELLVKLNREDLLRKQRTFDNGSIPHQIHLGELHAILRRQEDFYPFLKDNREKIEKILTFRIPYYVGPLARGNSRFAWMTRKSEETITPWNFEEVVDKGASAQSFIERMTNFDKNLPNEKVLPKHSLLYEYFTVYNELTKVKYVTEGMRKPAFLSGEQKKAIVDLLFKTNRKVTVKQLKEDYFKKIECFDSVEISGVEDRFNASLGTYHDLLKIIKDKDFLDNEENEDILEDIVLTLTLFEDREMIEERLKTYAHLFDDKVMKQLKRRRYTGWGRLSRKLINGIRDKQSGKTILDFLKSDGFANRNFMQLIHDDSLTFKEDIQKAQVSGQGDSLHEHIANLAGSPAIKKGILQTVKVVDELVKVMGRHKPENIVIEMARENQTTQKGQKNSRERMKRIEEGIKELGSQILKEHPVENTQLQNEKLYLYYLQNGRDMYVDQELDINRLSDYDVDHIVPQSFLKDDSIDNKVLTRSDKARGKSDNVPSEEVVKKMKNYWRQLLNAKLITQRKFDNLTKAERGGLSELDKAGFIKRQLVETRQITKHVAQILDSRMNTKYDENDKLIREVKVITLKSKLVSDFRKDFQFYKVREINNYHHAHDAYLNAVVGTALIKKYPKLESEFVYGDYKVYDVRKMIAKSEQEIGKATAKYFFYSNIMNFFKTEITLANGEIRKRPLIETNGETGEIVWDKGRDFATVRKVLSMPQVNIVKKTEVQTGGFSKESILPKRNSDKLIARKKDWDPKKYGGFDSPTVAYSVLVVAKVEKGKSKKLKSVKELLGITIMERSSFEKNPIDFLEAKGYKEVKKDLIIKLPKYSLFELENGRKRMLASAGELQKGNELALPSKYVNFLYLASHYEKLKGSPEDNEQKQLFVEQHKHYLDEIIEQISEFSKRVILADANLDKVLSAYNKHRDKPIREQAENIIHLFTLTNLGAPAAFKYFDTTIDRKRYTSTKEVLDATLIHQSITGLYETRIDLSQLGGDGGGSSGSSGSSGSSGGTLNIEDEHRLHETSKEPDVSLGSTWLSDFPQAWAETGGMGLAVRQAPLIIPLKATSTPVSIKQYPMSQEARLGIKPHIQRLLDQGILVPCQSPWNTPLLPVKKPGTNDYRPVQDLREVNKRVEDIHPTVPNPYNLLSGLPPSHQWYTVLDLKDAFFCLRLHPTSQPLFAFEWRDPEMGISGQLTWTRLPQGFKNSPTLFNEALHRDLADFRIQHPDLILLQYVDDLLLAATSELDCQQGTRALLQTLGNLGYRASAKKAQICQKQVKYLGYLLKEGQRWLTEARKETVMGQPTPKTPRQLREFLGKAGFCRLFIPGFAEMAAPLYPLTKPGTLFNWGPDQQKAYQEIKQALLTAPALGLPDLTKPFELFVDEKQGYAKGVLTQKLGPWRRPVAYLSKKLDPVAAGWPPCLRMVAAIAVLTKDAGKLTMGQPLVILAPHAVEALVKQPPDRWLSNARMTHYQALLLDTDRVQFGPVVALNPATLLPLPEEGLQHNCLDILAEAHGTRPDLTDQPLPDADHTWYTDGSSLLQEGQRKAGAAVTTETEVIWAKALPAGTSAQRAELIALTQALKMAEGKKLNVYTDSRYAFATAHIHGEIYRRRGWLTSEGKEIKNKDEILALLKALFLPKRLSIIHCPGHQKGHSAEARGNRMADQAARKAAITETPDTSTLLAGKRTADGSEFEKRTADGSEFESPKKKAKVE

SEQ ID NO: 2807 - protein, 2100 aa, synthetic construct
MPAAKRVKLDGGDKKYSIGLDIGTNSVGWAVITDEYKVPSKKFKVLGNTDRHSIKKNLIGALLFDSGETAEATRLKRTARRRYTRRKNRICYLQEIFSNEMAKVDDSFFHRLEESFLVEEDKKHERHPIFGNIVDEVAYHEKYPTIYHLRKKLVDSTDKADLRLIYLALAHMIKFRGHFLIEGDLNPDNSDVDKLFIQLVQTYNQLFEENPINASGVDAKAILSARLSKSRRLENLIAQLPGEKKNGLFGNLIALSLGLTPNFKSNFDLAEDAKLQLSKDTYDDDLDNLLAQIGDQYADLFLAAKNLSDAILLSDILRVNTEITKAPLSASMIKRYDEHHQDLTLLKALVRQQLPEKYKEIFFDQSKNGYAGYIDGGASQEEFYKFIKPILEKMDGTEELLVKLNREDLLRKQRTFDNGSIPHQIHLGELHAILRRQEDFYPFLKDNREKIEKILTFRIPYYVGPLARGNSRFAWMTRKSEETITPWNFEEVVDKGASAQSFIERMTNFDKNLPNEKVLPKHSLLYEYFTVYNELTKVKYVTEGMRKPAFLSGEQKKAIVDLLFKTNRKVTVKQLKEDYFKKIECFDSVEISGVEDRFNASLGTYHDLLKIIKDKDFLDNEENEDILEDIVLTLTLFEDREMIEERLKTYAHLFDDKVMKQLKRRRYTGWGRLSRKLINGIRDKQSGKTILDFLKSDGFANRNFMQLIHDDSLTFKEDIQKAQVSGQGDSLHEHIANLAGSPAIKKGILQTVKVVDELVKVMGRHKPENIVIEMARENQTTQKGQKNSRERMKRIEEGIKELGSQILKEHPVENTQLQNEKLYLYYLQNGRDMYVDQELDINRLSDYDVDHIVPQSFLKDDSIDNKVLTRSDKARGKSDNVPSEEVVKKMKNYWRQLLNAKLITQRKFDNLTKAERGGLSELDKAGFIKRQLVETRQITKHVAQILDSRMNTKYDENDKLIREVKVITLKSKLVSDFRKDFQFYKVREINNYHHAHDAYLNAVVGTALIKKYPKLESEFVYGDYKVYDVRKMIAKSEQEIGKATAKYFFYSNIMNFFKTEITLANGEIRKRPLIETNGETGEIVWDKGRDFATVRKVLSMPQVNIVKKTEVQTGGFSKESILPKRNSDKLIARKKDWDPKKYGGFDSPTVAYSVLVVAKVEKGKSKKLKSVKELLGITIMERSSFEKNPIDFLEAKGYKEVKKDLIIKLPKYSLFELENGRKRMLASAGELQKGNELALPSKYVNFLYLASHYEKLKGSPEDNEQKQLFVEQHKHYLDEIIEQISEFSKRVILADANLDKVLSAYNKHRDKPIREQAENIIHLFTLTNLGAPAAFKYFDTTIDRKRYTSTKEVLDATLIHQSITGLYETRIDLSQLGGDGGGGSGGSGGSGGSGGSGGTLNIEDEHRLHETSKEPDVSLGSTWLSDFPQAWAETGGMGLAVRQAPLIIPLKATSTPVSIKQYPMSQEARLGIKPHIQRLLDQGILVPCQSPWNTPLLPVKKPGTNDYRPVQDLREVNKRVEDIHPTVPNPYNLLSGLPPSHQWYTVLDLKDAFFCLRLHPTSQPLFAFEWRDPEMGISGQLTWTRLPQGFKNSPTLFNEALHRDLADFRIQHPDLILLQYVDDLLLAATSELDCQQGTRALLQTLGNLGYRASAKKAQICQKQVKYLGYLLKEGQRWLTEARKETVMGQPTPKTPRQLREFLGKAGFCRLFIPGFAEMAAPLYPLTKPGTLFNWGPDQQKAYQEIKQALLTAPALGLPDLTKPFELFVDEKQGYAKGVLTQKLGPWRRPVAYLSKKLDPVAAGWPPCLRMVAAIAVLTKDAGKLTMGQPLVILAPHAVEALVKQPPDRWLSNARMTHYQALLLDTDRVQFGPVVALNPATLLPLPEEGLQHNCLDILAEAHGTRPDLTDQPLPDADHTWYTDGSSLLQEGQRKAGAAVTTETEVIWAKALPAGTSAQRAELIALTQALKMAEGKKLNVYTDSRYAFATAHIHGEIYRRRGWLTSEGKEIKNKDEILALLKALFLPKRLSIIHCPGHQKGHSAEARGNRMADQAARKAAITETPDTSTLLAGKRTADGSEFEKRTADGSEFESPKKKAKVE

SEQ ID NO: 2808 - protein, 2091 aa, synthetic construct
MPAAKRVKLDGGDKKYSIGLDIGTNSVGWAVITDEYKVPSKKFKVLGNTDRHSIKKNLIGALLFDSGETAEATRLKRTARRRYTRRKNRICYLQEIFSNEMAKVDDSFFHRLEESFLVEEDKKHERHPIFGNIVDEVAYHEKYPTIYHLRKKLVDSTDKADLRLIYLALAHMIKFRGHFLIEGDLNPDNSDVDKLFIQLVQTYNQLFEENPINASGVDAKAILSARLSKSRRLENLIAQLPGEKKNGLFGNLIALSLGLTPNFKSNFDLAEDAKLQLSKDTYDDDLDNLLAQIGDQYADLFLAAKNLSDAILLSDILRVNTEITKAPLSASMIKRYDEHHQDLTLLKALVRQQLPEKYKEIFFDQSKNGYAGYIDGGASQEEFYKFIKPILEKMDGTEELLVKLNREDLLRKQRTFDNGSIPHQIHLGELHAILRRQEDFYPFLKDNREKIEKILTFRIPYYVGPLARGNSRFAWMTRKSEETITPWNFEEVVDKGASAQSFIERMTNFDKNLPNEKVLPKHSLLYEYFTVYNELTKVKYVTEGMRKPAFLSGEQKKAIVDLLFKTNRKVTVKQLKEDYFKKIECFDSVEISGVEDRFNASLGTYHDLLKIIKDKDFLDNEENEDILEDIVLTLTLFEDREMIEERLKTYAHLFDDKVMKQLKRRRYTGWGRLSRKLINGIRDKQSGKTILDFLKSDGFANRNFMQLIHDDSLTFKEDIQKAQVSGQGDSLHEHIANLAGSPAIKKGILQTVKVVDELVKVMGRHKPENIVIEMARENQTTQKGQKNSRERMKRIEEGIKELGSQILKEHPVENTQLQNEKLYLYYLQNGRDMYVDQELDINRLSDYDVDHIVPQSFLKDDSIDNKVLTRSDKARGKSDNVPSEEVVKKMKNYWRQLLNAKLITQRKFDNLTKAERGGLSELDKAGFIKRQLVETRQITKHVAQILDSRMNTKYDENDKLIREVKVITLKSKLVSDFRKDFQFYKVREINNYHHAHDAYLNAVVGTALIKKYPKLESEFVYGDYKVYDVRKMIAKSEQEIGKATAKYFFYSNIMNFFKTEITLANGEIRKRPLIETNGETGEIVWDKGRDFATVRKVLSMPQVNIVKKTEVQTGGFSKESILPKRNSDKLIARKKDWDPKKYGGFDSPTVAYSVLVVAKVEKGKSKKLKSVKELLGITIMERSSFEKNPIDFLEAKGYKEVKKDLIIKLPKYSLFELENGRKRMLASAGELQKGNELALPSKYVNFLYLASHYEKLKGSPEDNEQKQLFVEQHKHYLDEIIEQISEFSKRVILADANLDKVLSAYNKHRDKPIREQAENIIHLFTLTNLGAPAAFKYFDTTIDRKRYTSTKEVLDATLIHQSITGLYETRIDLSQLGGDGGGGSPAPGGTLNIEDEHRLHETSKEPDVSLGSTWLSDFPQAWAETGGMGLAVRQAPLIIPLKATSTPVSIKQYPMSQEARLGIKPHIQRLLDQGILVPCQSPWNTPLLPVKKPGTNDYRPVQDLREVNKRVEDIHPTVPNPYNLLSGLPPSHQWYTVLDLKDAFFCLRLHPTSQPLFAFEWRDPEMGISGQLTWTRLPQGFKNSPTLFNEALHRDLADFRIQHPDLILLQYVDDLLLAATSELDCQQGTRALLQTLGNLGYRASAKKAQICQKQVKYLGYLLKEGQRWLTEARKETVMGQPTPKTPRQLREFLGKAGFCRLFIPGFAEMAAPLYPLTKPGTLFNWGPDQQKAYQEIKQALLTAPALGLPDLTKPFELFVDEKQGYAKGVLTQKLGPWRRPVAYLSKKLDPVAAGWPPCLRMVAAIAVLTKDAGKLTMGQPLVILAPHAVEALVKQPPDRWLSNARMTHYQALLLDTDRVQFGPVVALNPATLLPLPEEGLQHNCLDILAEAHGTRPDLTDQPLPDADHTWYTDGSSLLQEGQRKAGAAVTTETEVIWAKALPAGTSAQRAELIALTQALKMAEGKKLNVYTDSRYAFATAHIHGEIYRRRGWLTSEGKEIKNKDEILALLKALFLPKRLSIIHCPGHQKGHSAEARGNRMADQAARKAAITETPDTSTLLAGKRTADGSEFEKRTADGSEFESPKKKAKVE

SEQ ID NO: 2809 - protein, 2094 aa, synthetic construct
MPAAKRVKLDGGDKKYSIGLDIGTNSVGWAVITDEYKVPSKKFKVLGNTDRHSIKKNLIGALLFDSGETAEATRLKRTARRRYTRRKNRICYLQEIFSNEMAKVDDSFFHRLEESFLVEEDKKHERHPIFGNIVDEVAYHEKYPTIYHLRKKLVDSTDKADLRLIYLALAHMIKFRGHFLIEGDLNPDNSDVDKLFIQLVQTYNQLFEENPINASGVDAKAILSARLSKSRRLENLIAQLPGEKKNGLFGNLIALSLGLTPNFKSNFDLAEDAKLQLSKDTYDDDLDNLLAQIGDQYADLFLAAKNLSDAILLSDILRVNTEITKAPLSASMIKRYDEHHQDLTLLKALVRQQLPEKYKEIFFDQSKNGYAGYIDGGASQEEFYKFIKPILEKMDGTEELLVKLNREDLLRKQRTFDNGSIPHQIHLGELHAILRRQEDFYPFLKDNREKIEKILTFRIPYYVGPLARGNSRFAWMTRKSEETITPWNFEEVVDKGASAQSFIERMTNFDKNLPNEKVLPKHSLLYEYFTVYNELTKVKYVTEGMRKPAFLSGEQKKAIVDLLFKTNRKVTVKQLKEDYFKKIECFDSVEISGVEDRFNASLGTYHDLLKIIKDKDFLDNEENEDILEDIVLTLTLFEDREMIEERLKTYAHLFDDKVMKQLKRRRYTGWGRLSRKLINGIRDKQSGKTILDFLKSDGFANRNFMQLIHDDSLTFKEDIQKAQVSGQGDSLHEHIANLAGSPAIKKGILQTVKVVDELVKVMGRHKPENIVIEMARENQTTQKGQKNSRERMKRIEEGIKELGSQILKEHPVENTQLQNEKLYLYYLQNGRDMYVDQELDINRLSDYDVDHIVPQSFLKDDSIDNKVLTRSDKARGKSDNVPSEEVVKKMKNYWRQLLNAKLITQRKFDNLTKAERGGLSELDKAGFIKRQLVETRQITKHVAQILDSRMNTKYDENDKLIREVKVITLKSKLVSDFRKDFQFYKVREINNYHHAHDAYLNAVVGTALIKKYPKLESEFVYGDYKVYDVRKMIAKSEQEIGKATAKYFFYSNIMNFFKTEITLANGEIRKRPLIETNGETGEIVWDKGRDFATVRKVLSMPQVNIVKKTEVQTGGFSKESILPKRNSDKLIARKKDWDPKKYGGFDSPTVAYSVLVVAKVEKGKSKKLKSVKELLGITIMERSSFEKNPIDFLEAKGYKEVKKDLIIKLPKYSLFELENGRKRMLASAGELQKGNELALPSKYVNFLYLASHYEKLKGSPEDNEQKQLFVEQHKHYLDEIIEQISEFSKRVILADANLDKVLSAYNKHRDKPIREQAENIIHLFTLTNLGAPAAFKYFDTTIDRKRYTSTKEVLDATLIHQSITGLYETRIDLSQLGGDGGGGSGGSGGSGGTLNIEDEHRLHETSKEPDVSLGSTWLSDFPQAWAETGGMGLAVRQAPLIIPLKATSTPVSIKQYPMSQEARLGIKPHIQRLLDQGILVPCQSPWNTPLLPVKKPGTNDYRPVQDLREVNKRVEDIHPTVPNPYNLLSGLPPSHQWYTVLDLKDAFFCLRLHPTSQPLFAFEWRDPEMGISGQLTWTRLPQGFKNSPTLFNEALHRDLADFRIQHPDLILLQYVDDLLLAATSELDCQQGTRALLQTLGNLGYRASAKKAQICQKQVKYLGYLLKEGQRWLTEARKETVMGQPTPKTPRQLREFLGKAGFCRLFIPGFAEMAAPLYPLTKPGTLFNWGPDQQKAYQEIKQALLTAPALGLPDLTKPFELFVDEKQGYAKGVLTQKLGPWRRPVAYLSKKLDPVAAGWPPCLRMVAAIAVLTKDAGKLTMGQPLVILAPHAVEALVKQPPDRWLSNARMTHYQALLLDTDRVQFGPVVALNPATLLPLPEEGLQHNCLDILAEAHGTRPDLTDQPLPDADHTWYTDGSSLLQEGQRKAGAAVTTETEVIWAKALPAGTSAQRAELIALTQALKMAEGKKLNVYTDSRYAFATAHIHGEIYRRRGWLTSEGKEIKNKDEILALLKALFLPKRLSIIHCPGHQKGHSAEARGNRMADQAARKAAITETPDTSTLLAGKRTADGSEFEKRTADGSEFESPKKKAKVE

SEQ ID NO: 2810 - protein, 2096 aa, synthetic construct
MPAAKRVKLDGGDKKYSIGLDIGTNSVGWAVITDEYKVPSKKFKVLGNTDRHSIKKNLIGALLFDSGETAEATRLKRTARRRYTRRKNRICYLQEIFSNEMAKVDDSFFHRLEESFLVEEDKKHERHPIFGNIVDEVAYHEKYPTIYHLRKKLVDSTDKADLRLIYLALAHMIKFRGHFLIEGDLNPDNSDVDKLFIQLVQTYNQLFEENPINASGVDAKAILSARLSKSRRLENLIAQLPGEKKNGLFGNLIALSLGLTPNFKSNFDLAEDAKLQLSKDTYDDDLDNLLAQIGDQYADLFLAAKNLSDAILLSDILRVNTEITKAPLSASMIKRYDEHHQDLTLLKALVRQQLPEKYKEIFFDQSKNGYAGYIDGGASQEEFYKFIKPILEKMDGTEELLVKLNREDLLRKQRTFDNGSIPHQIHLGELHAILRRQEDFYPFLKDNREKIEKILTFRIPYYVGPLARGNSRFAWMTRKSEETITPWNFEEVVDKGASAQSFIERMTNFDKNLPNEKVLPKHSLLYEYFTVYNELTKVKYVTEGMRKPAFLSGEQKKAIVDLLFKTNRKVTVKQLKEDYFKKIECFDSVEISGVEDRFNASLGTYHDLLKIIKDKDFLDNEENEDILEDIVLTLTLFEDREMIEERLKTYAHLFDDKVMKQLKRRRYTGWGRLSRKLINGIRDKQSGKTILDFLKSDGFANRNFMQLIHDDSLTFKEDIQKAQVSGQGDSLHEHIANLAGSPAIKKGILQTVKVVDELVKVMGRHKPENIVIEMARENQTTQKGQKNSRERMKRIEEGIKELGSQILKEHPVENTQLQNEKLYLYYLQNGRDMYVDQELDINRLSDYDVDHIVPQSFLKDDSIDNKVLTRSDKARGKSDNVPSEEVVKKMKNYWRQLLNAKLITQRKFDNLTKAERGGLSELDKAGFIKRQLVETRQITKHVAQILDSRMNTKYDENDKLIREVKVITLKSKLVSDFRKDFQFYKVREINNYHHAHDAYLNAVVGTALIKKYPKLESEFVYGDYKVYDVRKMIAKSEQEIGKATAKYFFYSNIMNFFKTEITLANGEIRKRPLIETNGETGEIVWDKGRDFATVRKVLSMPQVNIVKKTEVQTGGFSKESILPKRNSDKLIARKKDWDPKKYGGFDSPTVAYSVLVVAKVEKGKSKKLKSVKELLGITIMERSSFEKNPIDFLEAKGYKEVKKDLIIKLPKYSLFELENGRKRMLASAGELQKGNELALPSKYVNFLYLASHYEKLKGSPEDNEQKQLFVEQHKHYLDEIIEQISEFSKRVILADANLDKVLSAYNKHRDKPIREQAENIIHLFTLTNLGAPAAFKYFDTTIDRKRYTSTKEVLDATLIHQSITGLYETRIDLSQLGGDGGGSSGGGEAAAKGGTLNIEDEHRLHETSKEPDVSLGSTWLSDFPQAWAETGGMGLAVRQAPLIIPLKATSTPVSIKQYPMSQEARLGIKPHIQRLLDQGILVPCQSPWNTPLLPVKKPGTNDYRPVQDLREVNKRVEDIHPTVPNPYNLLSGLPPSHQWYTVLDLKDAFFCLRLHPTSQPLFAFEWRDPEMGISGQLTWTRLPQGFKNSPTLFNEALHRDLADFRIQHPDLILLQYVDDLLLAATSELDCQQGTRALLQTLGNLGYRASAKKAQICQKQVKYLGYLLKEGQRWLTEARKETVMGQPTPKTPRQLREFLGKAGFCRLFIPGFAEMAAPLYPLTKPGTLFNWGPDQQKAYQEIKQALLTAPALGLPDLTKPFELFVDEKQGYAKGVLTQKLGPWRRPVAYLSKKLDPVAAGWPPCLRMVAAIAVLTKDAGKLTMGQPLVILAPHAVEALVKQPPDRWLSNARMTHYQALLLDTDRVQFGPVVALNPATLLPLPEEGLQHNCLDILAEAHGTRPDLTDQPLPDADHTWYTDGSSLLQEGQRKAGAAVTTETEVIWAKALPAGTSAQRAELIALTQALKMAEGKKLNVYTDSRYAFATAHIHGEIYRRRGWLTSEGKEIKNKDEILALLKALFLPKRLSIIHCPGHQKGHSAEARGNRMADQAARKAAITETPDTSTLLAGKRTADGSEFEKRTADGSEFESPKKKAKVE

SEQ ID NO: 2811 - protein, 2094 aa, synthetic construct
MPAAKRVKLDGGDKKYSIGLDIGTNSVGWAVITDEYKVPSKKFKVLGNTDRHSIKKNLIGALLFDSGETAEATRLKRTARRRYTRRKNRICYLQEIFSNEMAKVDDSFFHRLEESFLVEEDKKHERHPIFGNIVDEVAYHEKYPTIYHLRKKLVDSTDKADLRLIYLALAHMIKFRGHFLIEGDLNPDNSDVDKLFIQLVQTYNQLFEENPINASGVDAKAILSARLSKSRRLENLIAQLPGEKKNGLFGNLIALSLGLTPNFKSNFDLAEDAKLQLSKDTYDDDLDNLLAQIGDQYADLFLAAKNLSDAILLSDILRVNTEITKAPLSASMIKRYDEHHQDLTLLKALVRQQLPEKYKEIFFDQSKNGYAGYIDGGASQEEFYKFIKPILEKMDGTEELLVKLNREDLLRKQRTFDNGSIPHQIHLGELHAILRRQEDFYPFLKDNREKIEKILTFRIPYYVGPLARGNSRFAWMTRKSEETITPWNFEEVVDKGASAQSFIERMTNFDKNLPNEKVLPKHSLLYEYFTVYNELTKVKYVTEGMRKPAFLSGEQKKAIVDLLFKTNRKVTVKQLKEDYFKKIECFDSVEISGVEDRFNASLGTYHDLLKIIKDKDFLDNEENEDILEDIVLTLTLFEDREMIEERLKTYAHLFDDKVMKQLKRRRYTGWGRLSRKLINGIRDKQSGKTILDFLKSDGFANRNFMQLIHDDSLTFKEDIQKAQVSGQGDSLHEHIANLAGSPAIKKGILQTVKVVDELVKVMGRHKPENIVIEMARENQTTQKGQKNSRERMKRIEEGIKELGSQILKEHPVENTQLQNEKLYLYYLQNGRDMYVDQELDINRLSDYDVDHIVPQSFLKDDSIDNKVLTRSDKARGKSDNVPSEEVVKKMKNYWRQLLNAKLITQRKFDNLTKAERGGLSELDKAGFIKRQLVETRQITKHVAQILDSRMNTKYDENDKLIREVKVITLKSKLVSDFRKDFQFYKVREINNYHHAHDAYLNAVVGTALIKKYPKLESEFVYGDYKVYDVRKMIAKSEQEIGKATAKYFFYSNIMNFFKTEITLANGEIRKRPLIETNGETGEIVWDKGRDFATVRKVLSMPQVNIVKKTEVQTGGFSKESILPKRNSDKLIARKKDWDPKKYGGFDSPTVAYSVLVVAKVEKGKSKKLKSVKELLGITIMERSSFEKNPIDFLEAKGYKEVKKDLIIKLPKYSLFELENGRKRMLASAGELQKGNELALPSKYVNFLYLASHYEKLKGSPEDNEQKQLFVEQHKHYLDEIIEQISEFSKRVILADANLDKVLSAYNKHRDKPIREQAENIIHLFTLTNLGAPAAFKYFDTTIDRKRYTSTKEVLDATLIHQSITGLYETRIDLSQLGGDGGGSSGSSGSSGGTLNIEDEHRLHETSKEPDVSLGSTWLSDFPQAWAETGGMGLAVRQAPLIIPLKATSTPVSIKQYPMSQEARLGIKPHIQRLLDQGILVPCQSPWNTPLLPVKKPGTNDYRPVQDLREVNKRVEDIHPTVPNPYNLLSGLPPSHQWYTVLDLKDAFFCLRLHPTSQPLFAFEWRDPEMGISGQLTWTRLPQGFKNSPTLFNEALHRDLADFRIQHPDLILLQYVDDLLLAATSELDCQQGTRALLQTLGNLGYRASAKKAQICQKQVKYLGYLLKEGQRWLTEARKETVMGQPTPKTPRQLREFLGKAGFCRLFIPGFAEMAAPLYPLTKPGTLFNWGPDQQKAYQEIKQALLTAPALGLPDLTKPFELFVDEKQGYAKGVLTQKLGPWRRPVAYLSKKLDPVAAGWPPCLRMVAAIAVLTKDAGKLTMGQPLVILAPHAVEALVKQPPDRWLSNARMTHYQALLLDTDRVQFGPVVALNPATLLPLPEEGLQHNCLDILAEAHGTRPDLTDQPLPDADHTWYTDGSSLLQEGQRKAGAAVTTETEVIWAKALPAGTSAQRAELIALTQALKMAEGKKLNVYTDSRYAFATAHIHGEIYRRRGWLTSEGKEIKNKDEILALLKALFLPKRLSIIHCPGHQKGHSAEARGNRMADQAARKAAITETPDTSTLLAGKRTADGSEFEKRTADGSEFESPKKKAKVE

SEQ ID NO: 2812 - protein, 2088 aa, synthetic construct
MPAAKRVKLDGGDKKYSIGLDIGTNSVGWAVITDEYKVPSKKFKVLGNTDRHSIKKNLIGALLFDSGETAEATRLKRTARRRYTRRKNRICYLQEIFSNEMAKVDDSFFHRLEESFLVEEDKKHERHPIFGNIVDEVAYHEKYPTIYHLRKKLVDSTDKADLRLIYLALAHMIKFRGHFLIEGDLNPDNSDVDKLFIQLVQTYNQLFEENPINASGVDAKAILSARLSKSRRLENLIAQLPGEKKNGLFGNLIALSLGLTPNFKSNFDLAEDAKLQLSKDTYDDDLDNLLAQIGDQYADLFLAAKNLSDAILLSDILRVNTEITKAPLSASMIKRYDEHHQDLTLLKALVRQQLPEKYKEIFFDQSKNGYAGYIDGGASQEEFYKFIKPILEKMDGTEELLVKLNREDLLRKQRTFDNGSIPHQIHLGELHAILRRQEDFYPFLKDNREKIEKILTFRIPYYVGPLARGNSRFAWMTRKSEETITPWNFEEVVDKGASAQSFIERMTNFDKNLPNEKVLPKHSLLYEYFTVYNELTKVKYVTEGMRKPAFLSGEQKKAIVDLLFKTNRKVTVKQLKEDYFKKIECFDSVEISGVEDRFNASLGTYHDLLKIIKDKDFLDNEENEDILEDIVLTLTLFEDREMIEERLKTYAHLFDDKVMKQLKRRRYTGWGRLSRKLINGIRDKQSGKTILDFLKSDGFANRNFMQLIHDDSLTFKEDIQKAQVSGQGDSLHEHIANLAGSPAIKKGILQTVKVVDELVKVMGRHKPENIVIEMARENQTTQKGQKNSRERMKRIEEGIKELGSQILKEHPVENTQLQNEKLYLYYLQNGRDMYVDQELDINRLSDYDVDHIVPQSFLKDDSIDNKVLTRSDKARGKSDNVPSEEVVKKMKNYWRQLLNAKLITQRKFDNLTKAERGGLSELDKAGFIKRQLVETRQITKHVAQILDSRMNTKYDENDKLIREVKVITLKSKLVSDFRKDFQFYKVREINNYHHAHDAYLNAVVGTALIKKYPKLESEFVYGDYKVYDVRKMIAKSEQEIGKATAKYFFYSNIMNFFKTEITLANGEIRKRPLIETNGETGEIVWDKGRDFATVRKVLSMPQVNIVKKTEVQTGGFSKESILPKRNSDKLIARKKDWDPKKYGGFDSPTVAYSVLVVAKVEKGKSKKLKSVKELLGITIMERSSFEKNPIDFLEAKGYKEVKKDLIIKLPKYSLFELENGRKRMLASAGELQKGNELALPSKYVNFLYLASHYEKLKGSPEDNEQKQLFVEQHKHYLDEIIEQISEFSKRVILADANLDKVLSAYNKHRDKPIREQAENIIHLFTLTNLGAPAAFKYFDTTIDRKRYTSTKEVLDATLIHQSITGLYETRIDLSQLGGDGGPAPGGTLNIEDEHRLHETSKEPDVSLGSTWLSDFPQAWAETGGMGLAVRQAPLIIPLKATSTPVSIKQYPMSQEARLGIKPHIQRLLDQGILVPCQSPWNTPLLPVKKPGTNDYRPVQDLREVNKRVEDIHPTVPNPYNLLSGLPPSHQWYTVLDLKDAFFCLRLHPTSQPLFAFEWRDPEMGISGQLTWTRLPQGFKNSPTLFNEALHRDLADFRIQHPDLILLQYVDDLLLAATSELDCQQGTRALLQTLGNLGYRASAKKAQICQKQVKYLGYLLKEGQRWLTEARKETVMGQPTPKTPRQLREFLGKAGFCRLFIPGFAEMAAPLYPLTKPGTLFNWGPDQQKAYQEIKQALLTAPALGLPDLTKPFELFVDEKQGYAKGVLTQKLGPWRRPVAYLSKKLDPVAAGWPPCLRMVAAIAVLTKDAGKLTMGQPLVILAPHAVEALVKQPPDRWLSNARMTHYQALLLDTDRVQFGPVVALNPATLLPLPEEGLQHNCLDILAEAHGTRPDLTDQPLPDADHTWYTDGSSLLQEGQRKAGAAVTTETEVIWAKALPAGTSAQRAELIALTQALKMAEGKKLNVYTDSRYAFATAHIHGEIYRRRGWLTSEGKEIKNKDEILALLKALFLPKRLSIIHCPGHQKGHSAEARGNRMADQAARKAAITETPDTSTLLAGKRTADGSEFEKRTADGSEFESPKKKAKVE

SEQ ID NO: 2813 - protein, 2115 aa, synthetic construct
MPAAKRVKLDGGDKKYSIGLDIGTNSVGWAVITDEYKVPSKKFKVLGNTDRHSIKKNLIGALLFDSGETAEATRLKRTARRRYTRRKNRICYLQEIFSNEMAKVDDSFFHRLEESFLVEEDKKHERHPIFGNIVDEVAYHEKYPTIYHLRKKLVDSTDKADLRLIYLALAHMIKFRGHFLIEGDLNPDNSDVDKLFIQLVQTYNQLFEENPINASGVDAKAILSARLSKSRRLENLIAQLPGEKKNGLFGNLIALSLGLTPNFKSNFDLAEDAKLQLSKDTYDDDLDNLLAQIGDQYADLFLAAKNLSDAILLSDILRVNTEITKAPLSASMIKRYDEHHQDLTLLKALVRQQLPEKYKEIFFDQSKNGYAGYIDGGASQEEFYKFIKPILEKMDGTEELLVKLNREDLLRKQRTFDNGSIPHQIHLGELHAILRRQEDFYPFLKDNREKIEKILTFRIPYYVGPLARGNSRFAWMTRKSEETITPWNFEEVVDKGASAQSFIERMTNFDKNLPNEKVLPKHSLLYEYFTVYNELTKVKYVTEGMRKPAFLSGEQKKAIVDLLFKTNRKVTVKQLKEDYFKKIECFDSVEISGVEDRFNASLGTYHDLLKIIKDKDFLDNEENEDILEDIVLTLTLFEDREMIEERLKTYAHLFDDKVMKQLKRRRYTGWGRLSRKLINGIRDKQSGKTILDFLKSDGFANRNFMQLIHDDSLTFKEDIQKAQVSGQGDSLHEHIANLAGSPAIKKGILQTVKVVDELVKVMGRHKPENIVIEMARENQTTQKGQKNSRERMKRIEEGIKELGSQILKEHPVENTQLQNEKLYLYYLQNGRDMYVDQELDINRLSDYDVDHIVPQSFLKDDSIDNKVLTRSDKARGKSDNVPSEEVVKKMKNYWRQLLNAKLITQRKFDNLTKAERGGLSELDKAGFIKRQLVETRQITKHVAQILDSRMNTKYDENDKLIREVKVITLKSKLVSDFRKDFQFYKVREINNYHHAHDAYLNAVVGTALIKKYPKLESEFVYGDYKVYDVRKMIAKSEQEIGKATAKYFFYSNIMNFFKTEITLANGEIRKRPLIETNGETGEIVWDKGRDFATVRKVLSMPQVNIVKKTEVQTGGFSKESILPKRNSDKLIARKKDWDPKKYGGFDSPTVAYSVLVVAKVEKGKSKKLKSVKELLGITIMERSSFEKNPIDFLEAKGYKEVKKDLIIKLPKYSLFELENGRKRMLASAGELQKGNELALPSKYVNFLYLASHYEKLKGSPEDNEQKQLFVEQHKHYLDEIIEQISEFSKRVILADANLDKVLSAYNKHRDKPIREQAENIIHLFTLTNLGAPAAFKYFDTTIDRKRYTSTKEVLDATLIHQSITGLYETRIDLSQLGGDGGEAAAKEAAAKEAAAKEAAAKEAAAKEAAAKGGTLNIEDEHRLHETSKEPDVSLGSTWLSDFPQAWAETGGMGLAVRQAPLIIPLKATSTPVSIKQYPMSQEARLGIKPHIQRLLDQGILVPCQSPWNTPLLPVKKPGTNDYRPVQDLREVNKRVEDIHPTVPNPYNLLSGLPPSHQWYTVLDLKDAFFCLRLHPTSQPLFAFEWRDPEMGISGQLTWTRLPQGFKNSPTLFNEALHRDLADFRIQHPDLILLQYVDDLLLAATSELDCQQGTRALLQTLGNLGYRASAKKAQICQKQVKYLGYLLKEGQRWLTEARKETVMGQPTPKTPRQLREFLGKAGFCRLFIPGFAEMAAPLYPLTKPGTLFNWGPDQQKAYQEIKQALLTAPALGLPDLTKPFELFVDEKQGYAKGVLTQKLGPWRRPVAYLSKKLDPVAAGWPPCLRMVAAIAVLTKDAGKLTMGQPLVILAPHAVEALVKQPPDRWLSNARMTHYQALLLDTDRVQFGPVVALNPATLLPLPEEGLQHNCLDILAEAHGTRPDLTDQPLPDADHTWYTDGSSLLQEGQRKAGAAVTTETEVIWAKALPAGTSAQRAELIALTQALKMAEGKKLNVYTDSRYAFATAHIHGEIYRRRGWLTSEGKEIKNKDEILALLKALFLPKRLSIIHCPGHQKGHSAEARGNRMADQAARKAAITETPDTSTLLAGKRTADGSEFEKRTADGSEFESPKKKAKVE

SEQ ID NO: 2814 - protein, 2097 aa, synthetic construct
MPAAKRVKLDGGDKKYSIGLDIGTNSVGWAVITDEYKVPSKKFKVLGNTDRHSIKKNLIGALLFDSGETAEATRLKRTARRRYTRRKNRICYLQEIFSNEMAKVDDSFFHRLEESFLVEEDKKHERHPIFGNIVDEVAYHEKYPTIYHLRKKLVDSTDKADLRLIYLALAHMIKFRGHFLIEGDLNPDNSDVDKLFIQLVQTYNQLFEENPINASGVDAKAILSARLSKSRRLENLIAQLPGEKKNGLFGNLIALSLGLTPNFKSNFDLAEDAKLQLSKDTYDDDLDNLLAQIGDQYADLFLAAKNLSDAILLSDILRVNTEITKAPLSASMIKRYDEHHQDLTLLKALVRQQLPEKYKEIFFDQSKNGYAGYIDGGASQEEFYKFIKPILEKMDGTEELLVKLNREDLLRKQRTFDNGSIPHQIHLGELHAILRRQEDFYPFLKDNREKIEKILTFRIPYYVGPLARGNSRFAWMTRKSEETITPWNFEEVVDKGASAQSFIERMTNFDKNLPNEKVLPKHSLLYEYFTVYNELTKVKYVTEGMRKPAFLSGEQKKAIVDLLFKTNRKVTVKQLKEDYFKKIECFDSVEISGVEDRFNASLGTYHDLLKIIKDKDFLDNEENEDILEDIVLTLTLFEDREMIEERLKTYAHLFDDKVMKQLKRRRYTGWGRLSRKLINGIRDKQSGKTILDFLKSDGFANRNFMQLIHDDSLTFKEDIQKAQVSGQGDSLHEHIANLAGSPAIKKGILQTVKVVDELVKVMGRHKPENIVIEMARENQTTQKGQKNSRERMKRIEEGIKELGSQILKEHPVENTQLQNEKLYLYYLQNGRDMYVDQELDINRLSDYDVDHIVPQSFLKDDSIDNKVLTRSDKARGKSDNVPSEEVVKKMKNYWRQLLNAKLITQRKFDNLTKAERGGLSELDKAGFIKRQLVETRQITKHVAQILDSRMNTKYDENDKLIREVKVITLKSKLVSDFRKDFQFYKVREINNYHHAHDAYLNAVVGTALIKKYPKLESEFVYGDYKVYDVRKMIAKSEQEIGKATAKYFFYSNIMNFFKTEITLANGEIRKRPLIETNGETGEIVWDKGRDFATVRKVLSMPQVNIVKKTEVQTGGFSKESILPKRNSDKLIARKKDWDPKKYGGFDSPTVAYSVLVVAKVEKGKSKKLKSVKELLGITIMERSSFEKNPIDFLEAKGYKEVKKDLIIKLPKYSLFELENGRKRMLASAGELQKGNELALPSKYVNFLYLASHYEKLKGSPEDNEQKQLFVEQHKHYLDEIIEQISEFSKRVILADANLDKVLSAYNKHRDKPIREQAENIIHLFTLTNLGAPAAFKYFDTTIDRKRYTSTKEVLDATLIHQSITGLYETRIDLSQLGGDGGGSAGSAAGSGEFGGTLNIEDEHRLHETSKEPDVSLGSTWLSDFPQAWAETGGMGLAVRQAPLIIPLKATSTPVSIKQYPMSQEARLGIKPHIQRLLDQGILVPCQSPWNTPLLPVKKPGTNDYRPVQDLREVNKRVEDIHPTVPNPYNLLSGLPPSHQWYTVLDLKDAFFCLRLHPTSQPLFAFEWRDPEMGISGQLTWTRLPQGFKNSPTLFNEALHRDLADFRIQHPDLILLQYVDDLLLAATSELDCQQGTRALLQTLGNLGYRASAKKAQICQKQVKYLGYLLKEGQRWLTEARKETVMGQPTPKTPRQLREFLGKAGFCRLFIPGFAEMAAPLYPLTKPGTLFNWGPDQQKAYQEIKQALLTAPALGLPDLTKPFELFVDEKQGYAKGVLTQKLGPWRRPVAYLSKKLDPVAAGWPPCLRMVAAIAVLTKDAGKLTMGQPLVILAPHAVEALVKQPPDRWLSNARMTHYQALLLDTDRVQFGPVVALNPATLLPLPEEGLQHNCLDILAEAHGTRPDLTDQPLPDADHTWYTDGSSLLQEGQRKAGAAVTTETEVIWAKALPAGTSAQRAELIALTQALKMAEGKKLNVYTDSRYAFATAHIHGEIYRRRGWLTSEGKEIKNKDEILALLKALFLPKRLSIIHCPGHQKGHSAEARGNRMADQAARKAAITETPDTSTLLAGKRTADGSEFEKRTADGSEFESPKKKAKVE

SEQ ID NO: 2815 - protein, 2096 aa, synthetic construct
MPAAKRVKLDGGDKKYSIGLDIGTNSVGWAVITDEYKVPSKKFKVLGNTDRHSIKKNLIGALLFDSGETAEATRLKRTARRRYTRRKNRICYLQEIFSNEMAKVDDSFFHRLEESFLVEEDKKHERHPIFGNIVDEVAYHEKYPTIYHLRKKLVDSTDKADLRLIYLALAHMIKFRGHFLIEGDLNPDNSDVDKLFIQLVQTYNQLFEENPINASGVDAKAILSARLSKSRRLENLIAQLPGEKKNGLFGNLIALSLGLTPNFKSNFDLAEDAKLQLSKDTYDDDLDNLLAQIGDQYADLFLAAKNLSDAILLSDILRVNTEITKAPLSASMIKRYDEHHQDLTLLKALVRQQLPEKYKEIFFDQSKNGYAGYIDGGASQEEFYKFIKPILEKMDGTEELLVKLNREDLLRKQRTFDNGSIPHQIHLGELHAILRRQEDFYPFLKDNREKIEKILTFRIPYYVGPLARGNSRFAWMTRKSEETITPWNFEEVVDKGASAQSFIERMTNFDKNLPNEKVLPKHSLLYEYFTVYNELTKVKYVTEGMRKPAFLSGEQKKAIVDLLFKTNRKVTVKQLKEDYFKKIECFDSVEISGVEDRFNASLGTYHDLLKIIKDKDFLDNEENEDILEDIVLTLTLFEDREMIEERLKTYAHLFDDKVMKQLKRRRYTGWGRLSRKLINGIRDKQSGKTILDFLKSDGFANRNFMQLIHDDSLTFKEDIQKAQVSGQGDSLHEHIANLAGSPAIKKGILQTVKVVDELVKVMGRHKPENIVIEMARENQTTQKGQKNSRERMKRIEEGIKELGSQILKEHPVENTQLQNEKLYLYYLQNGRDMYVDQELDINRLSDYDVDHIVPQSFLKDDSIDNKVLTRSDKARGKSDNVPSEEVVKKMKNYWRQLLNAKLITQRKFDNLTKAERGGLSELDKAGFIKRQLVETRQITKHVAQILDSRMNTKYDENDKLIREVKVITLKSKLVSDFRKDFQFYKVREINNYHHAHDAYLNAVVGTALIKKYPKLESEFVYGDYKVYDVRKMIAKSEQEIGKATAKYFFYSNIMNFFKTEITLANGEIRKRPLIETNGETGEIVWDKGRDFATVRKVLSMPQVNIVKKTEVQTGGFSKESILPKRNSDKLIARKKDWDPKKYGGFDSPTVAYSVLVVAKVEKGKSKKLKSVKELLGITIMERSSFEKNPIDFLEAKGYKEVKKDLIIKLPKYSLFELENGRKRMLASAGELQKGNELALPSKYVNFLYLASHYEKLKGSPEDNEQKQLFVEQHKHYLDEIIEQISEFSKRVILADANLDKVLSAYNKHRDKPIREQAENIIHLFTLTNLGAPAAFKYFDTTIDRKRYTSTKEVLDATLIHQSITGLYETRIDLSQLGGDGGEAAAKGGGGGSGGTLNIEDEHRLHETSKEPDVSLGSTWLSDFPQAWAETGGMGLAVRQAPLIIPLKATSTPVSIKQYPMSQEARLGIKPHIQRLLDQGILVPCQSPWNTPLLPVKKPGTNDYRPVQDLREVNKRVEDIHPTVPNPYNLLSGLPPSHQWYTVLDLKDAFFCLRLHPTSQPLFAFEWRDPEMGISGQLTWTRLPQGFKNSPTLFNEALHRDLADFRIQHPDLILLQYVDDLLLAATSELDCQQGTRALLQTLGNLGYRASAKKAQICQKQVKYLGYLLKEGQRWLTEARKETVMGQPTPKTPRQLREFLGKAGFCRLFIPGFAEMAAPLYPLTKPGTLFNWGPDQQKAYQEIKQALLTAPALGLPDLTKPFELFVDEKQGYAKGVLTQKLGPWRRPVAYLSKKLDPVAAGWPPCLRMVAAIAVLTKDAGKLTMGQPLVILAPHAVEALVKQPPDRWLSNARMTHYQALLLDTDRVQFGPVVALNPATLLPLPEEGLQHNCLDILAEAHGTRPDLTDQPLPDADHTWYTDGSSLLQEGQRKAGAAVTTETEVIWAKALPAGTSAQRAELIALTQALKMAEGKKLNVYTDSRYAFATAHIHGEIYRRRGWLTSEGKEIKNKDEILALLKALFLPKRLSIIHCPGHQKGHSAEARGNRMADQAARKAAITETPDTSTLLAGKRTADGSEFEKRTADGSEFESPKKKAKVE

SEQ ID NO: 2816 - protein, 2103 aa, synthetic construct
MPAAKRVKLDGGDKKYSIGLDIGTNSVGWAVITDEYKVPSKKFKVLGNTDRHSIKKNLIGALLFDSGETAEATRLKRTARRRYTRRKNRICYLQEIFSNEMAKVDDSFFHRLEESFLVEEDKKHERHPIFGNIVDEVAYHEKYPTIYHLRKKLVDSTDKADLRLIYLALAHMIKFRGHFLIEGDLNPDNSDVDKLFIQLVQTYNQLFEENPINASGVDAKAILSARLSKSRRLENLIAQLPGEKKNGLFGNLIALSLGLTPNFKSNFDLAEDAKLQLSKDTYDDDLDNLLAQIGDQYADLFLAAKNLSDAILLSDILRVNTEITKAPLSASMIKRYDEHHQDLTLLKALVRQQLPEKYKEIFFDQSKNGYAGYIDGGASQEEFYKFIKPILEKMDGTEELLVKLNREDLLRKQRTFDNGSIPHQIHLGELHAILRRQEDFYPFLKDNREKIEKILTFRIPYYVGPLARGNSRFAWMTRKSEETITPWNFEEVVDKGASAQSFIERMTNFDKNLPNEKVLPKHSLLYEYFTVYNELTKVKYVTEGMRKPAFLSGEQKKAIVDLLFKTNRKVTVKQLKEDYFKKIECFDSVEISGVEDRFNASLGTYHDLLKIIKDKDFLDNEENEDILEDIVLTLTLFEDREMIEERLKTYAHLFDDKVMKQLKRRRYTGWGRLSRKLINGIRDKQSGKTILDFLKSDGFANRNFMQLIHDDSLTFKEDIQKAQVSGQGDSLHEHIANLAGSPAIKKGILQTVKVVDELVKVMGRHKPENIVIEMARENQTTQKGQKNSRERMKRIEEGIKELGSQILKEHPVENTQLQNEKLYLYYLQNGRDMYVDQELDINRLSDYDVDHIVPQSFLKDDSIDNKVLTRSDKARGKSDNVPSEEVVKKMKNYWRQLLNAKLITQRKFDNLTKAERGGLSELDKAGFIKRQLVETRQITKHVAQILDSRMNTKYDENDKLIREVKVITLKSKLVSDFRKDFQFYKVREINNYHHAHDAYLNAVVGTALIKKYPKLESEFVYGDYKVYDVRKMIAKSEQEIGKATAKYFFYSNIMNFFKTEITLANGEIRKRPLIETNGETGEIVWDKGRDFATVRKVLSMPQVNIVKKTEVQTGGFSKESILPKRNSDKLIARKKDWDPKKYGGFDSPTVAYSVLVVAKVEKGKSKKLKSVKELLGITIMERSSFEKNPIDFLEAKGYKEVKKDLIIKLPKYSLFELENGRKRMLASAGELQKGNELALPSKYVNFLYLASHYEKLKGSPEDNEQKQLFVEQHKHYLDEIIEQISEFSKRVILADANLDKVLSAYNKHRDKPIREQAENIIHLFTLTNLGAPAAFKYFDTTIDRKRYTSTKEVLDATLIHQSITGLYETRIDLSQLGGDGGGSSGSSGSSGSSGSSGSSGGTLNIEDEHRLHETSKEPDVSLGSTWLSDFPQAWAETGGMGLAVRQAPLIIPLKATSTPVSIKQYPMSQEARLGIKPHIQRLLDQGILVPCQSPWNTPLLPVKKPGTNDYRPVQDLREVNKRVEDIHPTVPNPYNLLSGLPPSHQWYTVLDLKDAFFCLRLHPTSQPLFAFEWRDPEMGISGQLTWTRLPQGFKNSPTLFNEALHRDLADFRIQHPDLILLQYVDDLLLAATSELDCQQGTRALLQTLGNLGYRASAKKAQICQKQVKYLGYLLKEGQRWLTEARKETVMGQPTPKTPRQLREFLGKAGFCRLFIPGFAEMAAPLYPLTKPGTLFNWGPDQQKAYQEIKQALLTAPALGLPDLTKPFELFVDEKQGYAKGVLTQKLGPWRRPVAYLSKKLDPVAAGWPPCLRMVAAIAVLTKDAGKLTMGQPLVILAPHAVEALVKQPPDRWLSNARMTHYQALLLDTDRVQFGPVVALNPATLLPLPEEGLQHNCLDILAEAHGTRPDLTDQPLPDADHTWYTDGSSLLQEGQRKAGAAVTTETEVIWAKALPAGTSAQRAELIALTQALKMAEGKKLNVYTDSRYAFATAHIHGEIYRRRGWLTSEGKEIKNKDEILALLKALFLPKRLSIIHCPGHQKGHSAEARGNRMADQAARKAAITETPDTSTLLAGKRTADGSEFEKRTADGSEFESPKKKAKVE

SEQ ID NO: 2817 - protein, 2096 aa, synthetic construct
MPAAKRVKLDGGDKKYSIGLDIGTNSVGWAVITDEYKVPSKKFKVLGNTDRHSIKKNLIGALLFDSGETAEATRLKRTARRRYTRRKNRICYLQEIFSNEMAKVDDSFFHRLEESFLVEEDKKHERHPIFGNIVDEVAYHEKYPTIYHLRKKLVDSTDKADLRLIYLALAHMIKFRGHFLIEGDLNPDNSDVDKLFIQLVQTYNQLFEENPINASGVDAKAILSARLSKSRRLENLIAQLPGEKKNGLFGNLIALSLGLTPNFKSNFDLAEDAKLQLSKDTYDDDLDNLLAQIGDQYADLFLAAKNLSDAILLSDILRVNTEITKAPLSASMIKRYDEHHQDLTLLKALVRQQLPEKYKEIFFDQSKNGYAGYIDGGASQEEFYKFIKPILEKMDGTEELLVKLNREDLLRKQRTFDNGSIPHQIHLGELHAILRRQEDFYPFLKDNREKIEKILTFRIPYYVGPLARGNSRFAWMTRKSEETITPWNFEEVVDKGASAQSFIERMTNFDKNLPNEKVLPKHSLLYEYFTVYNELTKVKYVTEGMRKPAFLSGEQKKAIVDLLFKTNRKVTVKQLKEDYFKKIECFDSVEISGVEDRFNASLGTYHDLLKIIKDKDFLDNEENEDILEDIVLTLTLFEDREMIEERLKTYAHLFDDKVMKQLKRRRYTGWGRLSRKLINGIRDKQSGKTILDFLKSDGFANRNFMQLIHDDSLTFKEDIQKAQVSGQGDSLHEHIANLAGSPAIKKGILQTVKVVDELVKVMGRHKPENIVIEMARENQTTQKGQKNSRERMKRIEEGIKELGSQILKEHPVENTQLQNEKLYLYYLQNGRDMYVDQELDINRLSDYDVDHIVPQSFLKDDSIDNKVLTRSDKARGKSDNVPSEEVVKKMKNYWRQLLNAKLITQRKFDNLTKAERGGLSELDKAGFIKRQLVETRQITKHVAQILDSRMNTKYDENDKLIREVKVITLKSKLVSDFRKDFQFYKVREINNYHHAHDAYLNAVVGTALIKKYPKLESEFVYGDYKVYDVRKMIAKSEQEIGKATAKYFFYSNIMNFFKTEITLANGEIRKRPLIETNGETGEIVWDKGRDFATVRKVLSMPQVNIVKKTEVQTGGFSKESILPKRNSDKLIARKKDWDPKKYGGFDSPTVAYSVLVVAKVEKGKSKKLKSVKELLGITIMERSSFEKNPIDFLEAKGYKEVKKDLIIKLPKYSLFELENGRKRMLASAGELQKGNELALPSKYVNFLYLASHYEKLKGSPEDNEQKQLFVEQHKHYLDEIIEQISEFSKRVILADANLDKVLSAYNKHRDKPIREQAENIIHLFTLTNLGAPAAFKYFDTTIDRKRYTSTKEVLDATLIHQSITGLYETRIDLSQLGGDGGEAAAKGGSGSSGGTLNIEDEHRLHETSKEPDVSLGSTWLSDFPQAWAETGGMGLAVRQAPLIIPLKATSTPVSIKQYPMSQEARLGIKPHIQRLLDQGILVPCQSPWNTPLLPVKKPGTNDYRPVQDLREVNKRVEDIHPTVPNPYNLLSGLPPSHQWYTVLDLKDAFFCLRLHPTSQPLFAFEWRDPEMGISGQLTWTRLPQGFKNSPTLFNEALHRDLADFRIQHPDLILLQYVDDLLLAATSELDCQQGTRALLQTLGNLGYRASAKKAQICQKQVKYLGYLLKEGQRWLTEARKETVMGQPTPKTPRQLREFLGKAGFCRLFIPGFAEMAAPLYPLTKPGTLFNWGPDQQKAYQEIKQALLTAPALGLPDLTKPFELFVDEKQGYAKGVLTQKLGPWRRPVAYLSKKLDPVAAGWPPCLRMVAAIAVLTKDAGKLTMGQPLVILAPHAVEALVKQPPDRWLSNARMTHYQALLLDTDRVQFGPVVALNPATLLPLPEEGLQHNCLDILAEAHGTRPDLTDQPLPDADHTWYTDGSSLLQEGQRKAGAAVTTETEVIWAKALPAGTSAQRAELIALTQALKMAEGKKLNVYTDSRYAFATAHIHGEIYRRRGWLTSEGKEIKNKDEILALLKALFLPKRLSIIHCPGHQKGHSAEARGNRMADQAARKAAITETPDTSTLLAGKRTADGSEFEKRTADGSEFESPKKKAKVE

SEQ ID NO: 2818 - protein, 2094 aa, synthetic construct
MPAAKRVKLDGGDKKYSIGLDIGTNSVGWAVITDEYKVPSKKFKVLGNTDRHSIKKNLIGALLFDSGETAEATRLKRTARRRYTRRKNRICYLQEIFSNEMAKVDDSFFHRLEESFLVEEDKKHERHPIFGNIVDEVAYHEKYPTIYHLRKKLVDSTDKADLRLIYLALAHMIKFRGHFLIEGDLNPDNSDVDKLFIQLVQTYNQLFEENPINASGVDAKAILSARLSKSRRLENLIAQLPGEKKNGLFGNLIALSLGLTPNFKSNFDLAEDAKLQLSKDTYDDDLDNLLAQIGDQYADLFLAAKNLSDAILLSDILRVNTEITKAPLSASMIKRYDEHHQDLTLLKALVRQQLPEKYKEIFFDQSKNGYAGYIDGGASQEEFYKFIKPILEKMDGTEELLVKLNREDLLRKQRTFDNGSIPHQIHLGELHAILRRQEDFYPFLKDNREKIEKILTFRIPYYVGPLARGNSRFAWMTRKSEETITPWNFEEVVDKGASAQSFIERMTNFDKNLPNEKVLPKHSLLYEYFTVYNELTKVKYVTEGMRKPAFLSGEQKKAIVDLLFKTNRKVTVKQLKEDYFKKIECFDSVEISGVEDRFNASLGTYHDLLKIIKDKDFLDNEENEDILEDIVLTLTLFEDREMIEERLKTYAHLFDDKVMKQLKRRRYTGWGRLSRKLINGIRDKQSGKTILDFLKSDGFANRNFMQLIHDDSLTFKEDIQKAQVSGQGDSLHEHIANLAGSPAIKKGILQTVKVVDELVKVMGRHKPENIVIEMARENQTTQKGQKNSRERMKRIEEGIKELGSQILKEHPVENTQLQNEKLYLYYLQNGRDMYVDQELDINRLSDYDVDHIVPQSFLKDDSIDNKVLTRSDKARGKSDNVPSEEVVKKMKNYWRQLLNAKLITQRKFDNLTKAERGGLSELDKAGFIKRQLVETRQITKHVAQILDSRMNTKYDENDKLIREVKVITLKSKLVSDFRKDFQFYKVREINNYHHAHDAYLNAVVGTALIKKYPKLESEFVYGDYKVYDVRKMIAKSEQEIGKATAKYFFYSNIMNFFKTEITLANGEIRKRPLIETNGETGEIVWDKGRDFATVRKVLSMPQVNIVKKTEVQTGGFSKESILPKRNSDKLIARKKDWDPKKYGGFDSPTVAYSVLVVAKVEKGKSKKLKSVKELLGITIMERSSFEKNPIDFLEAKGYKEVKKDLIIKLPKYSLFELENGRKRMLASAGELQKGNELALPSKYVNFLYLASHYEKLKGSPEDNEQKQLFVEQHKHYLDEIIEQISEFSKRVILADANLDKVLSAYNKHRDKPIREQAENIIHLFTLTNLGAPAAFKYFDTTIDRKRYTSTKEVLDATLIHQSITGLYETRIDLSQLGGDGGGGSGSSGGGGGTLNIEDEHRLHETSKEPDVSLGSTWLSDFPQAWAETGGMGLAVRQAPLIIPLKATSTPVSIKQYPMSQEARLGIKPHIQRLLDQGILVPCQSPWNTPLLPVKKPGTNDYRPVQDLREVNKRVEDIHPTVPNPYNLLSGLPPSHQWYTVLDLKDAFFCLRLHPTSQPLFAFEWRDPEMGISGQLTWTRLPQGFKNSPTLFNEALHRDLADFRIQHPDLILLQYVDDLLLAATSELDCQQGTRALLQTLGNLGYRASAKKAQICQKQVKYLGYLLKEGQRWLTEARKETVMGQPTPKTPRQLREFLGKAGFCRLFIPGFAEMAAPLYPLTKPGTLFNWGPDQQKAYQEIKQALLTAPALGLPDLTKPFELFVDEKQGYAKGVLTQKLGPWRRPVAYLSKKLDPVAAGWPPCLRMVAAIAVLTKDAGKLTMGQPLVILAPHAVEALVKQPPDRWLSNARMTHYQALLLDTDRVQFGPVVALNPATLLPLPEEGLQHNCLDILAEAHGTRPDLTDQPLPDADHTWYTDGSSLLQEGQRKAGAAVTTETEVIWAKALPAGTSAQRAELIALTQALKMAEGKKLNVYTDSRYAFATAHIHGEIYRRRGWLTSEGKEIKNKDEILALLKALFLPKRLSIIHCPGHQKGHSAEARGNRMADQAARKAAITETPDTSTLLAGKRTADGSEFEKRTADGSEFESPKKKAKVE

SEQ ID NO: 2819 - protein, 2100 aa, synthetic construct
MPAAKRVKLDGGDKKYSIGLDIGTNSVGWAVITDEYKVPSKKFKVLGNTDRHSIKKNLIGALLFDSGETAEATRLKRTARRRYTRRKNRICYLQEIFSNEMAKVDDSFFHRLEESFLVEEDKKHERHPIFGNIVDEVAYHEKYPTIYHLRKKLVDSTDKADLRLIYLALAHMIKFRGHFLIEGDLNPDNSDVDKLFIQLVQTYNQLFEENPINASGVDAKAILSARLSKSRRLENLIAQLPGEKKNGLFGNLIALSLGLTPNFKSNFDLAEDAKLQLSKDTYDDDLDNLLAQIGDQYADLFLAAKNLSDAILLSDILRVNTEITKAPLSASMIKRYDEHHQDLTLLKALVRQQLPEKYKEIFFDQSKNGYAGYIDGGASQEEFYKFIKPILEKMDGTEELLVKLNREDLLRKQRTFDNGSIPHQIHLGELHAILRRQEDFYPFLKDNREKIEKILTFRIPYYVGPLARGNSRFAWMTRKSEETITPWNFEEVVDKGASAQSFIERMTNFDKNLPNEKVLPKHSLLYEYFTVYNELTKVKYVTEGMRKPAFLSGEQKKAIVDLLFKTNRKVTVKQLKEDYFKKIECFDSVEISGVEDRFNASLGTYHDLLKIIKDKDFLDNEENEDILEDIVLTLTLFEDREMIEERLKTYAHLFDDKVMKQLKRRRYTGWGRLSRKLINGIRDKQSGKTILDFLKSDGFANRNFMQLIHDDSLTFKEDIQKAQVSGQGDSLHEHIANLAGSPAIKKGILQTVKVVDELVKVMGRHKPENIVIEMARENQTTQKGQKNSRERMKRIEEGIKELGSQILKEHPVENTQLQNEKLYLYYLQNGRDMYVDQELDINRLSDYDVDHIVPQSFLKDDSIDNKVLTRSDKARGKSDNVPSEEVVKKMKNYWRQLLNAKLITQRKFDNLTKAERGGLSELDKAGFIKRQLVETRQITKHVAQILDSRMNTKYDENDKLIREVKVITLKSKLVSDFRKDFQFYKVREINNYHHAHDAYLNAVVGTALIKKYPKLESEFVYGDYKVYDVRKMIAKSEQEIGKATAKYFFYSNIMNFFKTEITLANGEIRKRPLIETNGETGEIVWDKGRDFATVRKVLSMPQVNIVKKTEVQTGGFSKESILPKRNSDKLIARKKDWDPKKYGGFDSPTVAYSVLVVAKVEKGKSKKLKSVKELLGITIMERSSFEKNPIDFLEAKGYKEVKKDLIIKLPKYSLFELENGRKRMLASAGELQKGNELALPSKYVNFLYLASHYEKLKGSPEDNEQKQLFVEQHKHYLDEIIEQISEFSKRVILADANLDKVLSAYNKHRDKPIREQAENIIHLFTLTNLGAPAAFKYFDTTIDRKRYTSTKEVLDATLIHQSITGLYETRIDLSQLGGDGGGGGGSGGGGSGGGGSGGTLNIEDEHRLHETSKEPDVSLGSTWLSDFPQAWAETGGMGLAVRQAPLIIPLKATSTPVSIKQYPMSQEARLGIKPHIQRLLDQGILVPCQSPWNTPLLPVKKPGTNDYRPVQDLREVNKRVEDIHPTVPNPYNLLSGLPPSHQWYTVLDLKDAFFCLRLHPTSQPLFAFEWRDPEMGISGQLTWTRLPQGFKNSPTLFNEALHRDLADFRIQHPDLILLQYVDDLLLAATSELDCQQGTRALLQTLGNLGYRASAKKAQICQKQVKYLGYLLKEGQRWLTEARKETVMGQPTPKTPRQLREFLGKAGFCRLFIPGFAEMAAPLYPLTKPGTLFNWGPDQQKAYQEIKQALLTAPALGLPDLTKPFELFVDEKQGYAKGVLTQKLGPWRRPVAYLSKKLDPVAAGWPPCLRMVAAIAVLTKDAGKLTMGQPLVILAPHAVEALVKQPPDRWLSNARMTHYQALLLDTDRVQFGPVVALNPATLLPLPEEGLQHNCLDILAEAHGTRPDLTDQPLPDADHTWYTDGSSLLQEGQRKAGAAVTTETEVIWAKALPAGTSAQRAELIALTQALKMAEGKKLNVYTDSRYAFATAHIHGEIYRRRGWLTSEGKEIKNKDEILALLKALFLPKRLSIIHCPGHQKGHSAEARGNRMADQAARKAAITETPDTSTLLAGKRTADGSEFEKRTADGSEFESPKKKAKVE

SEQ ID NO: 2820 - protein, 2091 aa, synthetic construct
MPAAKRVKLDGGDKKYSIGLDIGTNSVGWAVITDEYKVPSKKFKVLGNTDRHSIKKNLIGALLFDSGETAEATRLKRTARRRYTRRKNRICYLQEIFSNEMAKVDDSFFHRLEESFLVEEDKKHERHPIFGNIVDEVAYHEKYPTIYHLRKKLVDSTDKADLRLIYLALAHMIKFRGHFLIEGDLNPDNSDVDKLFIQLVQTYNQLFEENPINASGVDAKAILSARLSKSRRLENLIAQLPGEKKNGLFGNLIALSLGLTPNFKSNFDLAEDAKLQLSKDTYDDDLDNLLAQIGDQYADLFLAAKNLSDAILLSDILRVNTEITKAPLSASMIKRYDEHHQDLTLLKALVRQQLPEKYKEIFFDQSKNGYAGYIDGGASQEEFYKFIKPILEKMDGTEELLVKLNREDLLRKQRTFDNGSIPHQIHLGELHAILRRQEDFYPFLKDNREKIEKILTFRIPYYVGPLARGNSRFAWMTRKSEETITPWNFEEVVDKGASAQSFIERMTNFDKNLPNEKVLPKHSLLYEYFTVYNELTKVKYVTEGMRKPAFLSGEQKKAIVDLLFKTNRKVTVKQLKEDYFKKIECFDSVEISGVEDRFNASLGTYHDLLKIIKDKDFLDNEENEDILEDIVLTLTLFEDREMIEERLKTYAHLFDDKVMKQLKRRRYTGWGRLSRKLINGIRDKQSGKTILDFLKSDGFANRNFMQLIHDDSLTFKEDIQKAQVSGQGDSLHEHIANLAGSPAIKKGILQTVKVVDELVKVMGRHKPENIVIEMARENQTTQKGQKNSRERMKRIEEGIKELGSQILKEHPVENTQLQNEKLYLYYLQNGRDMYVDQELDINRLSDYDVDHIVPQSFLKDDSIDNKVLTRSDKARGKSDNVPSEEVVKKMKNYWRQLLNAKLITQRKFDNLTKAERGGLSELDKAGFIKRQLVETRQITKHVAQILDSRMNTKYDENDKLIREVKVITLKSKLVSDFRKDFQFYKVREINNYHHAHDAYLNAVVGTALIKKYPKLESEFVYGDYKVYDVRKMIAKSEQEIGKATAKYFFYSNIMNFFKTEITLANGEIRKRPLIETNGETGEIVWDKGRDFATVRKVLSMPQVNIVKKTEVQTGGFSKESILPKRNSDKLIARKKDWDPKKYGGFDSPTVAYSVLVVAKVEKGKSKKLKSVKELLGITIMERSSFEKNPIDFLEAKGYKEVKKDLIIKLPKYSLFELENGRKRMLASAGELQKGNELALPSKYVNFLYLASHYEKLKGSPEDNEQKQLFVEQHKHYLDEIIEQISEFSKRVILADANLDKVLSAYNKHRDKPIREQAENIIHLFTLTNLGAPAAFKYFDTTIDRKRYTSTKEVLDATLIHQSITGLYETRIDLSQLGGDGGGGGGSSGGTLNIEDEHRLHETSKEPDVSLGSTWLSDFPQAWAETGGMGLAVRQAPLIIPLKATSTPVSIKQYPMSQEARLGIKPHIQRLLDQGILVPCQSPWNTPLLPVKKPGTNDYRPVQDLREVNKRVEDIHPTVPNPYNLLSGLPPSHQWYTVLDLKDAFFCLRLHPTSQPLFAFEWRDPEMGISGQLTWTRLPQGFKNSPTLFNEALHRDLADFRIQHPDLILLQYVDDLLLAATSELDCQQGTRALLQTLGNLGYRASAKKAQICQKQVKYLGYLLKEGQRWLTEARKETVMGQPTPKTPRQLREFLGKAGFCRLFIPGFAEMAAPLYPLTKPGTLFNWGPDQQKAYQEIKQALLTAPALGLPDLTKPFELFVDEKQGYAKGVLTQKLGPWRRPVAYLSKKLDPVAAGWPPCLRMVAAIAVLTKDAGKLTMGQPLVILAPHAVEALVKQPPDRWLSNARMTHYQALLLDTDRVQFGPVVALNPATLLPLPEEGLQHNCLDILAEAHGTRPDLTDQPLPDADHTWYTDGSSLLQEGQRKAGAAVTTETEVIWAKALPAGTSAQRAELIALTQALKMAEGKKLNVYTDSRYAFATAHIHGEIYRRRGWLTSEGKEIKNKDEILALLKALFLPKRLSIIHCPGHQKGHSAEARGNRMADQAARKAAITETPDTSTLLAGKRTADGSEFEKRTADGSEFESPKKKAKVE

SEQ ID NO: 2821 - protein, 2093 aa, synthetic construct
MPAAKRVKLDGGDKKYSIGLDIGTNSVGWAVITDEYKVPSKKFKVLGNTDRHSIKKNLIGALLFDSGETAEATRLKRTARRRYTRRKNRICYLQEIFSNEMAKVDDSFFHRLEESFLVEEDKKHERHPIFGNIVDEVAYHEKYPTIYHLRKKLVDSTDKADLRLIYLALAHMIKFRGHFLIEGDLNPDNSDVDKLFIQLVQTYNQLFEENPINASGVDAKAILSARLSKSRRLENLIAQLPGEKKNGLFGNLIALSLGLTPNFKSNFDLAEDAKLQLSKDTYDDDLDNLLAQIGDQYADLFLAAKNLSDAILLSDILRVNTEITKAPLSASMIKRYDEHHQDLTLLKALVRQQLPEKYKEIFFDQSKNGYAGYIDGGASQEEFYKFIKPILEKMDGTEELLVKLNREDLLRKQRTFDNGSIPHQIHLGELHAILRRQEDFYPFLKDNREKIEKILTFRIPYYVGPLARGNSRFAWMTRKSEETITPWNFEEVVDKGASAQSFIERMTNFDKNLPNEKVLPKHSLLYEYFTVYNELTKVKYVTEGMRKPAFLSGEQKKAIVDLLFKTNRKVTVKQLKEDYFKKIECFDSVEISGVEDRFNASLGTYHDLLKIIKDKDFLDNEENEDILEDIVLTLTLFEDREMIEERLKTYAHLFDDKVMKQLKRRRYTGWGRLSRKLINGIRDKQSGKTILDFLKSDGFANRNFMQLIHDDSLTFKEDIQKAQVSGQGDSLHEHIANLAGSPAIKKGILQTVKVVDELVKVMGRHKPENIVIEMARENQTTQKGQKNSRERMKRIEEGIKELGSQILKEHPVENTQLQNEKLYLYYLQNGRDMYVDQELDINRLSDYDVDHIVPQSFLKDDSIDNKVLTRSDKARGKSDNVPSEEVVKKMKNYWRQLLNAKLITQRKFDNLTKAERGGLSELDKAGFIKRQLVETRQITKHVAQILDSRMNTKYDENDKLIREVKVITLKSKLVSDFRKDFQFYKVREINNYHHAHDAYLNAVVGTALIKKYPKLESEFVYGDYKVYDVRKMIAKSEQEIGKATAKYFFYSNIMNFFKTEITLANGEIRKRPLIETNGETGEIVWDKGRDFATVRKVLSMPQVNIVKKTEVQTGGFSKESILPKRNSDKLIARKKDWDPKKYGGFDSPTVAYSVLVVAKVEKGKSKKLKSVKELLGITIMERSSFEKNPIDFLEAKGYKEVKKDLIIKLPKYSLFELENGRKRMLASAGELQKGNELALPSKYVNFLYLASHYEKLKGSPEDNEQKQLFVEQHKHYLDEIIEQISEFSKRVILADANLDKVLSAYNKHRDKPIREQAENIIHLFTLTNLGAPAAFKYFDTTIDRKRYTSTKEVLDATLIHQSITGLYETRIDLSQLGGDGGEAAAKGSSGGTLNIEDEHRLHETSKEPDVSLGSTWLSDFPQAWAETGGMGLAVRQAPLIIPLKATSTPVSIKQYPMSQEARLGIKPHIQRLLDQGILVPCQSPWNTPLLPVKKPGTNDYRPVQDLREVNKRVEDIHPTVPNPYNLLSGLPPSHQWYTVLDLKDAFFCLRLHPTSQPLFAFEWRDPEMGISGQLTWTRLPQGFKNSPTLFNEALHRDLADFRIQHPDLILLQYVDDLLLAATSELDCQQGTRALLQTLGNLGYRASAKKAQICQKQVKYLGYLLKEGQRWLTEARKETVMGQPTPKTPRQLREFLGKAGFCRLFIPGFAEMAAPLYPLTKPGTLFNWGPDQQKAYQEIKQALLTAPALGLPDLTKPFELFVDEKQGYAKGVLTQKLGPWRRPVAYLSKKLDPVAAGWPPCLRMVAAIAVLTKDAGKLTMGQPLVILAPHAVEALVKQPPDRWLSNARMTHYQALLLDTDRVQFGPVVALNPATLLPLPEEGLQHNCLDILAEAHGTRPDLTDQPLPDADHTWYTDGSSLLQEGQRKAGAAVTTETEVIWAKALPAGTSAQRAELIALTQALKMAEGKKLNVYTDSRYAFATAHIHGEIYRRRGWLTSEGKEIKNKDEILALLKALFLPKRLSIIHCPGHQKGHSAEARGNRMADQAARKAAITETPDTSTLLAGKRTADGSEFEKRTADGSEFESPKKKAKVE

SEQ ID NO: 2822 - protein, 2096 aa, synthetic construct
MPAAKRVKLDGGDKKYSIGLDIGTNSVGWAVITDEYKVPSKKFKVLGNTDRHSIKKNLIGALLFDSGETAEATRLKRTARRRYTRRKNRICYLQEIFSNEMAKVDDSFFHRLEESFLVEEDKKHERHPIFGNIVDEVAYHEKYPTIYHLRKKLVDSTDKADLRLIYLALAHMIKFRGHFLIEGDLNPDNSDVDKLFIQLVQTYNQLFEENPINASGVDAKAILSARLSKSRRLENLIAQLPGEKKNGLFGNLIALSLGLTPNFKSNFDLAEDAKLQLSKDTYDDDLDNLLAQIGDQYADLFLAAKNLSDAILLSDILRVNTEITKAPLSASMIKRYDEHHQDLTLLKALVRQQLPEKYKEIFFDQSKNGYAGYIDGGASQEEFYKFIKPILEKMDGTEELLVKLNREDLLRKQRTFDNGSIPHQIHLGELHAILRRQEDFYPFLKDNREKIEKILTFRIPYYVGPLARGNSRFAWMTRKSEETITPWNFEEVVDKGASAQSFIERMTNFDKNLPNEKVLPKHSLLYEYFTVYNELTKVKYVTEGMRKPAFLSGEQKKAIVDLLFKTNRKVTVKQLKEDYFKKIECFDSVEISGVEDRFNASLGTYHDLLKIIKDKDFLDNEENEDILEDIVLTLTLFEDREMIEERLKTYAHLFDDKVMKQLKRRRYTGWGRLSRKLINGIRDKQSGKTILDFLKSDGFANRNFMQLIHDDSLTFKEDIQKAQVSGQGDSLHEHIANLAGSPAIKKGILQTVKVVDELVKVMGRHKPENIVIEMARENQTTQKGQKNSRERMKRIEEGIKELGSQILKEHPVENTQLQNEKLYLYYLQNGRDMYVDQELDINRLSDYDVDHIVPQSFLKDDSIDNKVLTRSDKARGKSDNVPSEEVVKKMKNYWRQLLNAKLITQRKFDNLTKAERGGLSELDKAGFIKRQLVETRQITKHVAQILDSRMNTKYDENDKLIREVKVITLKSKLVSDFRKDFQFYKVREINNYHHAHDAYLNAVVGTALIKKYPKLESEFVYGDYKVYDVRKMIAKSEQEIGKATAKYFFYSNIMNFFKTEITLANGEIRKRPLIETNGETGEIVWDKGRDFATVRKVLSMPQVNIVKKTEVQTGGFSKESILPKRNSDKLIARKKDWDPKKYGGFDSPTVAYSVLVVAKVEKGKSKKLKSVKELLGITIMERSSFEKNPIDFLEAKGYKEVKKDLIIKLPKYSLFELENGRKRMLASAGELQKGNELALPSKYVNFLYLASHYEKLKGSPEDNEQKQLFVEQHKHYLDEIIEQISEFSKRVILADANLDKVLSAYNKHRDKPIREQAENIIHLFTLTNLGAPAAFKYFDTTIDRKRYTSTKEVLDATLIHQSITGLYETRIDLSQLGGDGGPAPGGGEAAAKGGTLNIEDEHRLHETSKEPDVSLGSTWLSDFPQAWAETGGMGLAVRQAPLIIPLKATSTPVSIKQYPMSQEARLGIKPHIQRLLDQGILVPCQSPWNTPLLPVKKPGTNDYRPVQDLREVNKRVEDIHPTVPNPYNLLSGLPPSHQWYTVLDLKDAFFCLRLHPTSQPLFAFEWRDPEMGISGQLTWTRLPQGFKNSPTLFNEALHRDLADFRIQHPDLILLQYVDDLLLAATSELDCQQGTRALLQTLGNLGYRASAKKAQICQKQVKYLGYLLKEGQRWLTEARKETVMGQPTPKTPRQLREFLGKAGFCRLFIPGFAEMAAPLYPLTKPGTLFNWGPDQQKAYQEIKQALLTAPALGLPDLTKPFELFVDEKQGYAKGVLTQKLGPWRRPVAYLSKKLDPVAAGWPPCLRMVAAIAVLTKDAGKLTMGQPLVILAPHAVEALVKQPPDRWLSNARMTHYQALLLDTDRVQFGPVVALNPATLLPLPEEGLQHNCLDILAEAHGTRPDLTDQPLPDADHTWYTDGSSLLQEGQRKAGAAVTTETEVIWAKALPAGTSAQRAELIALTQALKMAEGKKLNVYTDSRYAFATAHIHGEIYRRRGWLTSEGKEIKNKDEILALLKALFLPKRLSIIHCPGHQKGHSAEARGNRMADQAARKAAITETPDTSTLLAGKRTADGSEFEKRTADGSEFESPKKKAKVE

SEQ ID NO: 2823 - protein, 2090 aa, synthetic construct
MPAAKRVKLDGGDKKYSIGLDIGTNSVGWAVITDEYKVPSKKFKVLGNTDRHSIKKNLIGALLFDSGETAEATRLKRTARRRYTRRKNRICYLQEIFSNEMAKVDDSFFHRLEESFLVEEDKKHERHPIFGNIVDEVAYHEKYPTIYHLRKKLVDSTDKADLRLIYLALAHMIKFRGHFLIEGDLNPDNSDVDKLFIQLVQTYNQLFEENPINASGVDAKAILSARLSKSRRLENLIAQLPGEKKNGLFGNLIALSLGLTPNFKSNFDLAEDAKLQLSKDTYDDDLDNLLAQIGDQYADLFLAAKNLSDAILLSDILRVNTEITKAPLSASMIKRYDEHHQDLTLLKALVRQQLPEKYKEIFFDQSKNGYAGYIDGGASQEEFYKFIKPILEKMDGTEELLVKLNREDLLRKQRTFDNGSIPHQIHLGELHAILRRQEDFYPFLKDNREKIEKILTFRIPYYVGPLARGNSRFAWMTRKSEETITPWNFEEVVDKGASAQSFIERMTNFDKNLPNEKVLPKHSLLYEYFTVYNELTKVKYVTEGMRKPAFLSGEQKKAIVDLLFKTNRKVTVKQLKEDYFKKIECFDSVEISGVEDRFNASLGTYHDLLKIIKDKDFLDNEENEDILEDIVLTLTLFEDREMIEERLKTYAHLFDDKVMKQLKRRRYTGWGRLSRKLINGIRDKQSGKTILDFLKSDGFANRNFMQLIHDDSLTFKEDIQKAQVSGQGDSLHEHIANLAGSPAIKKGILQTVKVVDELVKVMGRHKPENIVIEMARENQTTQKGQKNSRERMKRIEEGIKELGSQILKEHPVENTQLQNEKLYLYYLQNGRDMYVDQELDINRLSDYDVDHIVPQSFLKDDSIDNKVLTRSDKARGKSDNVPSEEVVKKMKNYWRQLLNAKLITQRKFDNLTKAERGGLSELDKAGFIKRQLVETRQITKHVAQILDSRMNTKYDENDKLIREVKVITLKSKLVSDFRKDFQFYKVREINNYHHAHDAYLNAVVGTALIKKYPKLESEFVYGDYKVYDVRKMIAKSEQEIGKATAKYFFYSNIMNFFKTEITLANGEIRKRPLIETNGETGEIVWDKGRDFATVRKVLSMPQVNIVKKTEVQTGGFSKESILPKRNSDKLIARKKDWDPKKYGGFDSPTVAYSVLVVAKVEKGKSKKLKSVKELLGITIMERSSFEKNPIDFLEAKGYKEVKKDLIIKLPKYSLFELENGRKRMLASAGELQKGNELALPSKYVNFLYLASHYEKLKGSPEDNEQKQLFVEQHKHYLDEIIEQISEFSKRVILADANLDKVLSAYNKHRDKPIREQAENIIHLFTLTNLGAPAAFKYFDTTIDRKRYTSTKEVLDATLIHQSITGLYETRIDLSQLGGDGGEAAAKGGTLNIEDEHRLHETSKEPDVSLGSTWLSDFPQAWAETGGMGLAVRQAPLIIPLKATSTPVSIKQYPMSQEARLGIKPHIQRLLDQGILVPCQSPWNTPLLPVKKPGTNDYRPVQDLREVNKRVEDIHPTVPNPYNLLSGLPPSHQWYTVLDLKDAFFCLRLHPTSQPLFAFEWRDPEMGISGQLTWTRLPQGFKNSPTLFNEALHRDLADFRIQHPDLILLQYVDDLLLAATSELDCQQGTRALLQTLGNLGYRASAKKAQICQKQVKYLGYLLKEGQRWLTEARKETVMGQPTPKTPRQLREFLGKAGFCRLFIPGFAEMAAPLYPLTKPGTLFNWGPDQQKAYQEIKQALLTAPALGLPDLTKPFELFVDEKQGYAKGVLTQKLGPWRRPVAYLSKKLDPVAAGWPPCLRMVAAIAVLTKDAGKLTMGQPLVILAPHAVEALVKQPPDRWLSNARMTHYQALLLDTDRVQFGPVVALNPATLLPLPEEGLQHNCLDILAEAHGTRPDLTDQPLPDADHTWYTDGSSLLQEGQRKAGAAVTTETEVIWAKALPAGTSAQRAELIALTQALKMAEGKKLNVYTDSRYAFATAHIHGEIYRRRGWLTSEGKEIKNKDEILALLKALFLPKRLSIIHCPGHQKGHSAEARGNRMADQAARKAAITETPDTSTLLAGKRTADGSEFEKRTADGSEFESPKKKAKVE

SEQ ID NO: 2824 - protein, 2088 aa, synthetic construct
MPAAKRVKLDGGDKKYSIGLDIGTNSVGWAVITDEYKVPSKKFKVLGNTDRHSIKKNLIGALLFDSGETAEATRLKRTARRRYTRRKNRICYLQEIFSNEMAKVDDSFFHRLEESFLVEEDKKHERHPIFGNIVDEVAYHEKYPTIYHLRKKLVDSTDKADLRLIYLALAHMIKFRGHFLIEGDLNPDNSDVDKLFIQLVQTYNQLFEENPINASGVDAKAILSARLSKSRRLENLIAQLPGEKKNGLFGNLIALSLGLTPNFKSNFDLAEDAKLQLSKDTYDDDLDNLLAQIGDQYADLFLAAKNLSDAILLSDILRVNTEITKAPLSASMIKRYDEHHQDLTLLKALVRQQLPEKYKEIFFDQSKNGYAGYIDGGASQEEFYKFIKPILEKMDGTEELLVKLNREDLLRKQRTFDNGSIPHQIHLGELHAILRRQEDFYPFLKDNREKIEKILTFRIPYYVGPLARGNSRFAWMTRKSEETITPWNFEEVVDKGASAQSFIERMTNFDKNLPNEKVLPKHSLLYEYFTVYNELTKVKYVTEGMRKPAFLSGEQKKAIVDLLFKTNRKVTVKQLKEDYFKKIECFDSVEISGVEDRFNASLGTYHDLLKIIKDKDFLDNEENEDILEDIVLTLTLFEDREMIEERLKTYAHLFDDKVMKQLKRRRYTGWGRLSRKLINGIRDKQSGKTILDFLKSDGFANRNFMQLIHDDSLTFKEDIQKAQVSGQGDSLHEHIANLAGSPAIKKGILQTVKVVDELVKVMGRHKPENIVIEMARENQTTQKGQKNSRERMKRIEEGIKELGSQILKEHPVENTQLQNEKLYLYYLQNGRDMYVDQELDINRLSDYDVDHIVPQSFLKDDSIDNKVLTRSDKARGKSDNVPSEEVVKKMKNYWRQLLNAKLITQRKFDNLTKAERGGLSELDKAGFIKRQLVETRQITKHVAQILDSRMNTKYDENDKLIREVKVITLKSKLVSDFRKDFQFYKVREINNYHHAHDAYLNAVVGTALIKKYPKLESEFVYGDYKVYDVRKMIAKSEQEIGKATAKYFFYSNIMNFFKTEITLANGEIRKRPLIETNGETGEIVWDKGRDFATVRKVLSMPQVNIVKKTEVQTGGFSKESILPKRNSDKLIARKKDWDPKKYGGFDSPTVAYSVLVVAKVEKGKSKKLKSVKELLGITIMERSSFEKNPIDFLEAKGYKEVKKDLIIKLPKYSLFELENGRKRMLASAGELQKGNELALPSKYVNFLYLASHYEKLKGSPEDNEQKQLFVEQHKHYLDEIIEQISEFSKRVILADANLDKVLSAYNKHRDKPIREQAENIIHLFTLTNLGAPAAFKYFDTTIDRKRYTSTKEVLDATLIHQSITGLYETRIDLSQLGGDGGGGGGGTLNIEDEHRLHETSKEPDVSLGSTWLSDFPQAWAETGGMGLAVRQAPLIIPLKATSTPVSIKQYPMSQEARLGIKPHIQRLLDQGILVPCQSPWNTPLLPVKKPGTNDYRPVQDLREVNKRVEDIHPTVPNPYNLLSGLPPSHQWYTVLDLKDAFFCLRLHPTSQPLFAFEWRDPEMGISGQLTWTRLPQGFKNSPTLFNEALHRDLADFRIQHPDLILLQYVDDLLLAATSELDCQQGTRALLQTLGNLGYRASAKKAQICQKQVKYLGYLLKEGQRWLTEARKETVMGQPTPKTPRQLREFLGKAGFCRLFIPGFAEMAAPLYPLTKPGTLFNWGPDQQKAYQEIKQALLTAPALGLPDLTKPFELFVDEKQGYAKGVLTQKLGPWRRPVAYLSKKLDPVAAGWPPCLRMVAAIAVLTKDAGKLTMGQPLVILAPHAVEALVKQPPDRWLSNARMTHYQALLLDTDRVQFGPVVALNPATLLPLPEEGLQHNCLDILAEAHGTRPDLTDQPLPDADHTWYTDGSSLLQEGQRKAGAAVTTETEVIWAKALPAGTSAQRAELIALTQALKMAEGKKLNVYTDSRYAFATAHIHGEIYRRRGWLTSEGKEIKNKDEILALLKALFLPKRLSIIHCPGHQKGHSAEARGNRMADQAARKAAITETPDTSTLLAGKRTADGSEFEKRTADGSEFESPKKKAKVE

SEQ ID NO: 2825 - protein, 2090 aa, synthetic construct
MPAAKRVKLDGGDKKYSIGLDIGTNSVGWAVITDEYKVPSKKFKVLGNTDRHSIKKNLIGALLFDSGETAEATRLKRTARRRYTRRKNRICYLQEIFSNEMAKVDDSFFHRLEESFLVEEDKKHERHPIFGNIVDEVAYHEKYPTIYHLRKKLVDSTDKADLRLIYLALAHMIKFRGHFLIEGDLNPDNSDVDKLFIQLVQTYNQLFEENPINASGVDAKAILSARLSKSRRLENLIAQLPGEKKNGLFGNLIALSLGLTPNFKSNFDLAEDAKLQLSKDTYDDDLDNLLAQIGDQYADLFLAAKNLSDAILLSDILRVNTEITKAPLSASMIKRYDEHHQDLTLLKALVRQQLPEKYKEIFFDQSKNGYAGYIDGGASQEEFYKFIKPILEKMDGTEELLVKLNREDLLRKQRTFDNGSIPHQIHLGELHAILRRQEDFYPFLKDNREKIEKILTFRIPYYVGPLARGNSRFAWMTRKSEETITPWNFEEVVDKGASAQSFIERMTNFDKNLPNEKVLPKHSLLYEYFTVYNELTKVKYVTEGMRKPAFLSGEQKKAIVDLLFKTNRKVTVKQLKEDYFKKIECFDSVEISGVEDRFNASLGTYHDLLKIIKDKDFLDNEENEDILEDIVLTLTLFEDREMIEERLKTYAHLFDDKVMKQLKRRRYTGWGRLSRKLINGIRDKQSGKTILDFLKSDGFANRNFMQLIHDDSLTFKEDIQKAQVSGQGDSLHEHIANLAGSPAIKKGILQTVKVVDELVKVMGRHKPENIVIEMARENQTTQKGQKNSRERMKRIEEGIKELGSQILKEHPVENTQLQNEKLYLYYLQNGRDMYVDQELDINRLSDYDVDHIVPQSFLKDDSIDNKVLTRSDKARGKSDNVPSEEVVKKMKNYWRQLLNAKLITQRKFDNLTKAERGGLSELDKAGFIKRQLVETRQITKHVAQILDSRMNTKYDENDKLIREVKVITLKSKLVSDFRKDFQFYKVREINNYHHAHDAYLNAVVGTALIKKYPKLESEFVYGDYKVYDVRKMIAKSEQEIGKATAKYFFYSNIMNFFKTEITLANGEIRKRPLIETNGETGEIVWDKGRDFATVRKVLSMPQVNIVKKTEVQTGGFSKESILPKRNSDKLIARKKDWDPKKYGGFDSPTVAYSVLVVAKVEKGKSKKLKSVKELLGITIMERSSFEKNPIDFLEAKGYKEVKKDLIIKLPKYSLFELENGRKRMLASAGELQKGNELALPSKYVNFLYLASHYEKLKGSPEDNEQKQLFVEQHKHYLDEIIEQISEFSKRVILADANLDKVLSAYNKHRDKPIREQAENIIHLFTLTNLGAPAAFKYFDTTIDRKRYTSTKEVLDATLIHQSITGLYETRIDLSQLGGDGGGGGGSGGTLNIEDEHRLHETSKEPDVSLGSTWLSDFPQAWAETGGMGLAVRQAPLIIPLKATSTPVSIKQYPMSQEARLGIKPHIQRLLDQGILVPCQSPWNTPLLPVKKPGTNDYRPVQDLREVNKRVEDIHPTVPNPYNLLSGLPPSHQWYTVLDLKDAFFCLRLHPTSQPLFAFEWRDPEMGISGQLTWTRLPQGFKNSPTLFNEALHRDLADFRIQHPDLILLQYVDDLLLAATSELDCQQGTRALLQTLGNLGYRASAKKAQICQKQVKYLGYLLKEGQRWLTEARKETVMGQPTPKTPRQLREFLGKAGFCRLFIPGFAEMAAPLYPLTKPGTLFNWGPDQQKAYQEIKQALLTAPALGLPDLTKPFELFVDEKQGYAKGVLTQKLGPWRRPVAYLSKKLDPVAAGWPPCLRMVAAIAVLTKDAGKLTMGQPLVILAPHAVEALVKQPPDRWLSNARMTHYQALLLDTDRVQFGPVVALNPATLLPLPEEGLQHNCLDILAEAHGTRPDLTDQPLPDADHTWYTDGSSLLQEGQRKAGAAVTTETEVIWAKALPAGTSAQRAELIALTQALKMAEGKKLNVYTDSRYAFATAHIHGEIYRRRGWLTSEGKEIKNKDEILALLKALFLPKRLSIIHCPGHQKGHSAEARGNRMADQAARKAAITETPDTSTLLAGKRTADGSEFEKRTADGSEFESPKKKAKVE

SEQ ID NO: 2826 - protein, 2096 aa, synthetic construct
MPAAKRVKLDGGDKKYSIGLDIGTNSVGWAVITDEYKVPSKKFKVLGNTDRHSIKKNLIGALLFDSGETAEATRLKRTARRRYTRRKNRICYLQEIFSNEMAKVDDSFFHRLEESFLVEEDKKHERHPIFGNIVDEVAYHEKYPTIYHLRKKLVDSTDKADLRLIYLALAHMIKFRGHFLIEGDLNPDNSDVDKLFIQLVQTYNQLFEENPINASGVDAKAILSARLSKSRRLENLIAQLPGEKKNGLFGNLIALSLGLTPNFKSNFDLAEDAKLQLSKDTYDDDLDNLLAQIGDQYADLFLAAKNLSDAILLSDILRVNTEITKAPLSASMIKRYDEHHQDLTLLKALVRQQLPEKYKEIFFDQSKNGYAGYIDGGASQEEFYKFIKPILEKMDGTEELLVKLNREDLLRKQRTFDNGSIPHQIHLGELHAILRRQEDFYPFLKDNREKIEKILTFRIPYYVGPLARGNSRFAWMTRKSEETITPWNFEEVVDKGASAQSFIERMTNFDKNLPNEKVLPKHSLLYEYFTVYNELTKVKYVTEGMRKPAFLSGEQKKAIVDLLFKTNRKVTVKQLKEDYFKKIECFDSVEISGVEDRFNASLGTYHDLLKIIKDKDFLDNEENEDILEDIVLTLTLFEDREMIEERLKTYAHLFDDKVMKQLKRRRYTGWGRLSRKLINGIRDKQSGKTILDFLKSDGFANRNFMQLIHDDSLTFKEDIQKAQVSGQGDSLHEHIANLAGSPAIKKGILQTVKVVDELVKVMGRHKPENIVIEMARENQTTQKGQKNSRERMKRIEEGIKELGSQILKEHPVENTQLQNEKLYLYYLQNGRDMYVDQELDINRLSDYDVDHIVPQSFLKDDSIDNKVLTRSDKARGKSDNVPSEEVVKKMKNYWRQLLNAKLITQRKFDNLTKAERGGLSELDKAGFIKRQLVETRQITKHVAQILDSRMNTKYDENDKLIREVKVITLKSKLVSDFRKDFQFYKVREINNYHHAHDAYLNAVVGTALIKKYPKLESEFVYGDYKVYDVRKMIAKSEQEIGKATAKYFFYSNIMNFFKTEITLANGEIRKRPLIETNGETGEIVWDKGRDFATVRKVLSMPQVNIVKKTEVQTGGFSKESILPKRNSDKLIARKKDWDPKKYGGFDSPTVAYSVLVVAKVEKGKSKKLKSVKELLGITIMERSSFEKNPIDFLEAKGYKEVKKDLIIKLPKYSLFELENGRKRMLASAGELQKGNELALPSKYVNFLYLASHYEKLKGSPEDNEQKQLFVEQHKHYLDEIIEQISEFSKRVILADANLDKVLSAYNKHRDKPIREQAENIIHLFTLTNLGAPAAFKYFDTTIDRKRYTSTKEVLDATLIHQSITGLYETRIDLSQLGGDGGGGSEAAAKGSSGGTLNIEDEHRLHETSKEPDVSLGSTWLSDFPQAWAETGGMGLAVRQAPLIIPLKATSTPVSIKQYPMSQEARLGIKPHIQRLLDQGILVPCQSPWNTPLLPVKKPGTNDYRPVQDLREVNKRVEDIHPTVPNPYNLLSGLPPSHQWYTVLDLKDAFFCLRLHPTSQPLFAFEWRDPEMGISGQLTWTRLPQGFKNSPTLFNEALHRDLADFRIQHPDLILLQYVDDLLLAATSELDCQQGTRALLQTLGNLGYRASAKKAQICQKQVKYLGYLLKEGQRWLTEARKETVMGQPTPKTPRQLREFLGKAGFCRLFIPGFAEMAAPLYPLTKPGTLFNWGPDQQKAYQEIKQALLTAPALGLPDLTKPFELFVDEKQGYAKGVLTQKLGPWRRPVAYLSKKLDPVAAGWPPCLRMVAAIAVLTKDAGKLTMGQPLVILAPHAVEALVKQPPDRWLSNARMTHYQALLLDTDRVQFGPVVALNPATLLPLPEEGLQHNCLDILAEAHGTRPDLTDQPLPDADHTWYTDGSSLLQEGQRKAGAAVTTETEVIWAKALPAGTSAQRAELIALTQALKMAEGKKLNVYTDSRYAFATAHIHGEIYRRRGWLTSEGKEIKNKDEILALLKALFLPKRLSIIHCPGHQKGHSAEARGNRMADQAARKAAITETPDTSTLLAGKRTADGSEFEKRTADGSEFESPKKKAKVE

SEQ ID NO: 2827 - protein, 2115 aa, synthetic construct
MPAAKRVKLDGGDKKYSIGLDIGTNSVGWAVITDEYKVPSKKFKVLGNTDRHSIKKNLIGALLFDSGETAEATRLKRTARRRYTRRKNRICYLQEIFSNEMAKVDDSFFHRLEESFLVEEDKKHERHPIFGNIVDEVAYHEKYPTIYHLRKKLVDSTDKADLRLIYLALAHMIKFRGHFLIEGDLNPDNSDVDKLFIQLVQTYNQLFEENPINASGVDAKAILSARLSKSRRLENLIAQLPGEKKNGLFGNLIALSLGLTPNFKSNFDLAEDAKLQLSKDTYDDDLDNLLAQIGDQYADLFLAAKNLSDAILLSDILRVNTEITKAPLSASMIKRYDEHHQDLTLLKALVRQQLPEKYKEIFFDQSKNGYAGYIDGGASQEEFYKFIKPILEKMDGTEELLVKLNREDLLRKQRTFDNGSIPHQIHLGELHAILRRQEDFYPFLKDNREKIEKILTFRIPYYVGPLARGNSRFAWMTRKSEETITPWNFEEVVDKGASAQSFIERMTNFDKNLPNEKVLPKHSLLYEYFTVYNELTKVKYVTEGMRKPAFLSGEQKKAIVDLLFKTNRKVTVKQLKEDYFKKIECFDSVEISGVEDRFNASLGTYHDLLKIIKDKDFLDNEENEDILEDIVLTLTLFEDREMIEERLKTYAHLFDDKVMKQLKRRRYTGWGRLSRKLINGIRDKQSGKTILDFLKSDGFANRNFMQLIHDDSLTFKEDIQKAQVSGQGDSLHEHIANLAGSPAIKKGILQTVKVVDELVKVMGRHKPENIVIEMARENQTTQKGQKNSRERMKRIEEGIKELGSQILKEHPVENTQLQNEKLYLYYLQNGRDMYVDQELDINRLSDYDVDHIVPQSFLKDDSIDNKVLTRSDKARGKSDNVPSEEVVKKMKNYWRQLLNAKLITQRKFDNLTKAERGGLSELDKAGFIKRQLVETRQITKHVAQILDSRMNTKYDENDKLIREVKVITLKSKLVSDFRKDFQFYKVREINNYHHAHDAYLNAVVGTALIKKYPKLESEFVYGDYKVYDVRKMIAKSEQEIGKATAKYFFYSNIMNFFKTEITLANGEIRKRPLIETNGETGEIVWDKGRDFATVRKVLSMPQVNIVKKTEVQTGGFSKESILPKRNSDKLIARKKDWDPKKYGGFDSPTVAYSVLVVAKVEKGKSKKLKSVKELLGITIMERSSFEKNPIDFLEAKGYKEVKKDLIIKLPKYSLFELENGRKRMLASAGELQKGNELALPSKYVNFLYLASHYEKLKGSPEDNEQKQLFVEQHKHYLDEIIEQISEFSKRVILADANLDKVLSAYNKHRDKPIREQAENIIHLFTLTNLGAPAAFKYFDTTIDRKRYTSTKEVLDATLIHQSITGLYETRIDLSQLGGDGGGGGGSGGGGSGGGGSGGGGSGGGGSGGGGSGGTLNIEDEHRLHETSKEPDVSLGSTWLSDFPQAWAETGGMGLAVRQAPLIIPLKATSTPVSIKQYPMSQEARLGIKPHIQRLLDQGILVPCQSPWNTPLLPVKKPGTNDYRPVQDLREVNKRVEDIHPTVPNPYNLLSGLPPSHQWYTVLDLKDAFFCLRLHPTSQPLFAFEWRDPEMGISGQLTWTRLPQGFKNSPTLFNEALHRDLADFRIQHPDLILLQYVDDLLLAATSELDCQQGTRALLQTLGNLGYRASAKKAQICQKQVKYLGYLLKEGQRWLTEARKETVMGQPTPKTPRQLREFLGKAGFCRLFIPGFAEMAAPLYPLTKPGTLFNWGPDQQKAYQEIKQALLTAPALGLPDLTKPFELFVDEKQGYAKGVLTQKLGPWRRPVAYLSKKLDPVAAGWPPCLRMVAAIAVLTKDAGKLTMGQPLVILAPHAVEALVKQPPDRWLSNARMTHYQALLLDTDRVQFGPVVALNPATLLPLPEEGLQHNCLDILAEAHGTRPDLTDQPLPDADHTWYTDGSSLLQEGQRKAGAAVTTETEVIWAKALPAGTSAQRAELIALTQALKMAEGKKLNVYTDSRYAFATAHIHGEIYRRRGWLTSEGKEIKNKDEILALLKALFLPKRLSIIHCPGHQKGHSAEARGNRMADQAARKAAITETPDTSTLLAGKRTADGSEFEKRTADGSEFESPKKKAKVE

SEQ ID NO: 2828 - protein, 2093 aa, synthetic construct
MPAAKRVKLDGGDKKYSIGLDIGTNSVGWAVITDEYKVPSKKFKVLGNTDRHSIKKNLIGALLFDSGETAEATRLKRTARRRYTRRKNRICYLQEIFSNEMAKVDDSFFHRLEESFLVEEDKKHERHPIFGNIVDEVAYHEKYPTIYHLRKKLVDSTDKADLRLIYLALAHMIKFRGHFLIEGDLNPDNSDVDKLFIQLVQTYNQLFEENPINASGVDAKAILSARLSKSRRLENLIAQLPGEKKNGLFGNLIALSLGLTPNFKSNFDLAEDAKLQLSKDTYDDDLDNLLAQIGDQYADLFLAAKNLSDAILLSDILRVNTEITKAPLSASMIKRYDEHHQDLTLLKALVRQQLPEKYKEIFFDQSKNGYAGYIDGGASQEEFYKFIKPILEKMDGTEELLVKLNREDLLRKQRTFDNGSIPHQIHLGELHAILRRQEDFYPFLKDNREKIEKILTFRIPYYVGPLARGNSRFAWMTRKSEETITPWNFEEVVDKGASAQSFIERMTNFDKNLPNEKVLPKHSLLYEYFTVYNELTKVKYVTEGMRKPAFLSGEQKKAIVDLLFKTNRKVTVKQLKEDYFKKIECFDSVEISGVEDRFNASLGTYHDLLKIIKDKDFLDNEENEDILEDIVLTLTLFEDREMIEERLKTYAHLFDDKVMKQLKRRRYTGWGRLSRKLINGIRDKQSGKTILDFLKSDGFANRNFMQLIHDDSLTFKEDIQKAQVSGQGDSLHEHIANLAGSPAIKKGILQTVKVVDELVKVMGRHKPENIVIEMARENQTTQKGQKNSRERMKRIEEGIKELGSQILKEHPVENTQLQNEKLYLYYLQNGRDMYVDQELDINRLSDYDVDHIVPQSFLKDDSIDNKVLTRSDKARGKSDNVPSEEVVKKMKNYWRQLLNAKLITQRKFDNLTKAERGGLSELDKAGFIKRQLVETRQITKHVAQILDSRMNTKYDENDKLIREVKVITLKSKLVSDFRKDFQFYKVREINNYHHAHDAYLNAVVGTALIKKYPKLESEFVYGDYKVYDVRKMIAKSEQEIGKATAKYFFYSNIMNFFKTEITLANGEIRKRPLIETNGETGEIVWDKGRDFATVRKVLSMPQVNIVKKTEVQTGGFSKESILPKRNSDKLIARKKDWDPKKYGGFDSPTVAYSVLVVAKVEKGKSKKLKSVKELLGITIMERSSFEKNPIDFLEAKGYKEVKKDLIIKLPKYSLFELENGRKRMLASAGELQKGNELALPSKYVNFLYLASHYEKLKGSPEDNEQKQLFVEQHKHYLDEIIEQISEFSKRVILADANLDKVLSAYNKHRDKPIREQAENIIHLFTLTNLGAPAAFKYFDTTIDRKRYTSTKEVLDATLIHQSITGLYETRIDLSQLGGDGGGSSEAAAKGGTLNIEDEHRLHETSKEPDVSLGSTWLSDFPQAWAETGGMGLAVRQAPLIIPLKATSTPVSIKQYPMSQEARLGIKPHIQRLLDQGILVPCQSPWNTPLLPVKKPGTNDYRPVQDLREVNKRVEDIHPTVPNPYNLLSGLPPSHQWYTVLDLKDAFFCLRLHPTSQPLFAFEWRDPEMGISGQLTWTRLPQGFKNSPTLFNEALHRDLADFRIQHPDLILLQYVDDLLLAATSELDCQQGTRALLQTLGNLGYRASAKKAQICQKQVKYLGYLLKEGQRWLTEARKETVMGQPTPKTPRQLREFLGKAGFCRLFIPGFAEMAAPLYPLTKPGTLFNWGPDQQKAYQEIKQALLTAPALGLPDLTKPFELFVDEKQGYAKGVLTQKLGPWRRPVAYLSKKLDPVAAGWPPCLRMVAAIAVLTKDAGKLTMGQPLVILAPHAVEALVKQPPDRWLSNARMTHYQALLLDTDRVQFGPVVALNPATLLPLPEEGLQHNCLDILAEAHGTRPDLTDQPLPDADHTWYTDGSSLLQEGQRKAGAAVTTETEVIWAKALPAGTSAQRAELIALTQALKMAEGKKLNVYTDSRYAFATAHIHGEIYRRRGWLTSEGKEIKNKDEILALLKALFLPKRLSIIHCPGHQKGHSAEARGNRMADQAARKAAITETPDTSTLLAGKRTADGSEFEKRTADGSEFESPKKKAKVE

SEQ ID NO: 2829 - protein, 2096 aa, synthetic construct
MPAAKRVKLDGGDKKYSIGLDIGTNSVGWAVITDEYKVPSKKFKVLGNTDRHSIKKNLIGALLFDSGETAEATRLKRTARRRYTRRKNRICYLQEIFSNEMAKVDDSFFHRLEESFLVEEDKKHERHPIFGNIVDEVAYHEKYPTIYHLRKKLVDSTDKADLRLIYLALAHMIKFRGHFLIEGDLNPDNSDVDKLFIQLVQTYNQLFEENPINASGVDAKAILSARLSKSRRLENLIAQLPGEKKNGLFGNLIALSLGLTPNFKSNFDLAEDAKLQLSKDTYDDDLDNLLAQIGDQYADLFLAAKNLSDAILLSDILRVNTEITKAPLSASMIKRYDEHHQDLTLLKALVRQQLPEKYKEIFFDQSKNGYAGYIDGGASQEEFYKFIKPILEKMDGTEELLVKLNREDLLRKQRTFDNGSIPHQIHLGELHAILRRQEDFYPFLKDNREKIEKILTFRIPYYVGPLARGNSRFAWMTRKSEETITPWNFEEVVDKGASAQSFIERMTNFDKNLPNEKVLPKHSLLYEYFTVYNELTKVKYVTEGMRKPAFLSGEQKKAIVDLLFKTNRKVTVKQLKEDYFKKIECFDSVEISGVEDRFNASLGTYHDLLKIIKDKDFLDNEENEDILEDIVLTLTLFEDREMIEERLKTYAHLFDDKVMKQLKRRRYTGWGRLSRKLINGIRDKQSGKTILDFLKSDGFANRNFMQLIHDDSLTFKEDIQKAQVSGQGDSLHEHIANLAGSPAIKKGILQTVKVVDELVKVMGRHKPENIVIEMARENQTTQKGQKNSRERMKRIEEGIKELGSQILKEHPVENTQLQNEKLYLYYLQNGRDMYVDQELDINRLSDYDVDHIVPQSFLKDDSIDNKVLTRSDKARGKSDNVPSEEVVKKMKNYWRQLLNAKLITQRKFDNLTKAERGGLSELDKAGFIKRQLVETRQITKHVAQILDSRMNTKYDENDKLIREVKVITLKSKLVSDFRKDFQFYKVREINNYHHAHDAYLNAVVGTALIKKYPKLESEFVYGDYKVYDVRKMIAKSEQEIGKATAKYFFYSNIMNFFKTEITLANGEIRKRPLIETNGETGEIVWDKGRDFATVRKVLSMPQVNIVKKTEVQTGGFSKESILPKRNSDKLIARKKDWDPKKYGGFDSPTVAYSVLVVAKVEKGKSKKLKSVKELLGITIMERSSFEKNPIDFLEAKGYKEVKKDLIIKLPKYSLFELENGRKRMLASAGELQKGNELALPSKYVNFLYLASHYEKLKGSPEDNEQKQLFVEQHKHYLDEIIEQISEFSKRVILADANLDKVLSAYNKHRDKPIREQAENIIHLFTLTNLGAPAAFKYFDTTIDRKRYTSTKEVLDATLIHQSITGLYETRIDLSQLGGDGGPAPEAAAKGGSGGTLNIEDEHRLHETSKEPDVSLGSTWLSDFPQAWAETGGMGLAVRQAPLIIPLKATSTPVSIKQYPMSQEARLGIKPHIQRLLDQGILVPCQSPWNTPLLPVKKPGTNDYRPVQDLREVNKRVEDIHPTVPNPYNLLSGLPPSHQWYTVLDLKDAFFCLRLHPTSQPLFAFEWRDPEMGISGQLTWTRLPQGFKNSPTLFNEALHRDLADFRIQHPDLILLQYVDDLLLAATSELDCQQGTRALLQTLGNLGYRASAKKAQICQKQVKYLGYLLKEGQRWLTEARKETVMGQPTPKTPRQLREFLGKAGFCRLFIPGFAEMAAPLYPLTKPGTLFNWGPDQQKAYQEIKQALLTAPALGLPDLTKPFELFVDEKQGYAKGVLTQKLGPWRRPVAYLSKKLDPVAAGWPPCLRMVAAIAVLTKDAGKLTMGQPLVILAPHAVEALVKQPPDRWLSNARMTHYQALLLDTDRVQFGPVVALNPATLLPLPEEGLQHNCLDILAEAHGTRPDLTDQPLPDADHTWYTDGSSLLQEGQRKAGAAVTTETEVIWAKALPAGTSAQRAELIALTQALKMAEGKKLNVYTDSRYAFATAHIHGEIYRRRGWLTSEGKEIKNKDEILALLKALFLPKRLSIIHCPGHQKGHSAEARGNRMADQAARKAAITETPDTSTLLAGKRTADGSEFEKRTADGSEFESPKKKAKVE

SEQ ID NO: 2830 - protein, 2096 aa, synthetic construct
MPAAKRVKLDGGDKKYSIGLDIGTNSVGWAVITDEYKVPSKKFKVLGNTDRHSIKKNLIGALLFDSGETAEATRLKRTARRRYTRRKNRICYLQEIFSNEMAKVDDSFFHRLEESFLVEEDKKHERHPIFGNIVDEVAYHEKYPTIYHLRKKLVDSTDKADLRLIYLALAHMIKFRGHFLIEGDLNPDNSDVDKLFIQLVQTYNQLFEENPINASGVDAKAILSARLSKSRRLENLIAQLPGEKKNGLFGNLIALSLGLTPNFKSNFDLAEDAKLQLSKDTYDDDLDNLLAQIGDQYADLFLAAKNLSDAILLSDILRVNTEITKAPLSASMIKRYDEHHQDLTLLKALVRQQLPEKYKEIFFDQSKNGYAGYIDGGASQEEFYKFIKPILEKMDGTEELLVKLNREDLLRKQRTFDNGSIPHQIHLGELHAILRRQEDFYPFLKDNREKIEKILTFRIPYYVGPLARGNSRFAWMTRKSEETITPWNFEEVVDKGASAQSFIERMTNFDKNLPNEKVLPKHSLLYEYFTVYNELTKVKYVTEGMRKPAFLSGEQKKAIVDLLFKTNRKVTVKQLKEDYFKKIECFDSVEISGVEDRFNASLGTYHDLLKIIKDKDFLDNEENEDILEDIVLTLTLFEDREMIEERLKTYAHLFDDKVMKQLKRRRYTGWGRLSRKLINGIRDKQSGKTILDFLKSDGFANRNFMQLIHDDSLTFKEDIQKAQVSGQGDSLHEHIANLAGSPAIKKGILQTVKVVDELVKVMGRHKPENIVIEMARENQTTQKGQKNSRERMKRIEEGIKELGSQILKEHPVENTQLQNEKLYLYYLQNGRDMYVDQELDINRLSDYDVDHIVPQSFLKDDSIDNKVLTRSDKARGKSDNVPSEEVVKKMKNYWRQLLNAKLITQRKFDNLTKAERGGLSELDKAGFIKRQLVETRQITKHVAQILDSRMNTKYDENDKLIREVKVITLKSKLVSDFRKDFQFYKVREINNYHHAHDAYLNAVVGTALIKKYPKLESEFVYGDYKVYDVRKMIAKSEQEIGKATAKYFFYSNIMNFFKTEITLANGEIRKRPLIETNGETGEIVWDKGRDFATVRKVLSMPQVNIVKKTEVQTGGFSKESILPKRNSDKLIARKKDWDPKKYGGFDSPTVAYSVLVVAKVEKGKSKKLKSVKELLGITIMERSSFEKNPIDFLEAKGYKEVKKDLIIKLPKYSLFELENGRKRMLASAGELQKGNELALPSKYVNFLYLASHYEKLKGSPEDNEQKQLFVEQHKHYLDEIIEQISEFSKRVILADANLDKVLSAYNKHRDKPIREQAENIIHLFTLTNLGAPAAFKYFDTTIDRKRYTSTKEVLDATLIHQSITGLYETRIDLSQLGGDGGGGGEAAAKPAPGGTLNIEDEHRLHETSKEPDVSLGSTWLSDFPQAWAETGGMGLAVRQAPLIIPLKATSTPVSIKQYPMSQEARLGIKPHIQRLLDQGILVPCQSPWNTPLLPVKKPGTNDYRPVQDLREVNKRVEDIHPTVPNPYNLLSGLPPSHQWYTVLDLKDAFFCLRLHPTSQPLFAFEWRDPEMGISGQLTWTRLPQGFKNSPTLFNEALHRDLADFRIQHPDLILLQYVDDLLLAATSELDCQQGTRALLQTLGNLGYRASAKKAQICQKQVKYLGYLLKEGQRWLTEARKETVMGQPTPKTPRQLREFLGKAGFCRLFIPGFAEMAAPLYPLTKPGTLFNWGPDQQKAYQEIKQALLTAPALGLPDLTKPFELFVDEKQGYAKGVLTQKLGPWRRPVAYLSKKLDPVAAGWPPCLRMVAAIAVLTKDAGKLTMGQPLVILAPHAVEALVKQPPDRWLSNARMTHYQALLLDTDRVQFGPVVALNPATLLPLPEEGLQHNCLDILAEAHGTRPDLTDQPLPDADHTWYTDGSSLLQEGQRKAGAAVTTETEVIWAKALPAGTSAQRAELIALTQALKMAEGKKLNVYTDSRYAFATAHIHGEIYRRRGWLTSEGKEIKNKDEILALLKALFLPKRLSIIHCPGHQKGHSAEARGNRMADQAARKAAITETPDTSTLLAGKRTADGSEFEKRTADGSEFESPKKKAKVE

SEQ ID NO: 2831 - protein, 2096 aa, synthetic construct
MPAAKRVKLDGGDKKYSIGLDIGTNSVGWAVITDEYKVPSKKFKVLGNTDRHSIKKNLIGALLFDSGETAEATRLKRTARRRYTRRKNRICYLQEIFSNEMAKVDDSFFHRLEESFLVEEDKKHERHPIFGNIVDEVAYHEKYPTIYHLRKKLVDSTDKADLRLIYLALAHMIKFRGHFLIEGDLNPDNSDVDKLFIQLVQTYNQLFEENPINASGVDAKAILSARLSKSRRLENLIAQLPGEKKNGLFGNLIALSLGLTPNFKSNFDLAEDAKLQLSKDTYDDDLDNLLAQIGDQYADLFLAAKNLSDAILLSDILRVNTEITKAPLSASMIKRYDEHHQDLTLLKALVRQQLPEKYKEIFFDQSKNGYAGYIDGGASQEEFYKFIKPILEKMDGTEELLVKLNREDLLRKQRTFDNGSIPHQIHLGELHAILRRQEDFYPFLKDNREKIEKILTFRIPYYVGPLARGNSRFAWMTRKSEETITPWNFEEVVDKGASAQSFIERMTNFDKNLPNEKVLPKHSLLYEYFTVYNELTKVKYVTEGMRKPAFLSGEQKKAIVDLLFKTNRKVTVKQLKEDYFKKIECFDSVEISGVEDRFNASLGTYHDLLKIIKDKDFLDNEENEDILEDIVLTLTLFEDREMIEERLKTYAHLFDDKVMKQLKRRRYTGWGRLSRKLINGIRDKQSGKTILDFLKSDGFANRNFMQLIHDDSLTFKEDIQKAQVSGQGDSLHEHIANLAGSPAIKKGILQTVKVVDELVKVMGRHKPENIVIEMARENQTTQKGQKNSRERMKRIEEGIKELGSQILKEHPVENTQLQNEKLYLYYLQNGRDMYVDQELDINRLSDYDVDHIVPQSFLKDDSIDNKVLTRSDKARGKSDNVPSEEVVKKMKNYWRQLLNAKLITQRKFDNLTKAERGGLSELDKAGFIKRQLVETRQITKHVAQILDSRMNTKYDENDKLIREVKVITLKSKLVSDFRKDFQFYKVREINNYHHAHDAYLNAVVGTALIKKYPKLESEFVYGDYKVYDVRKMIAKSEQEIGKATAKYFFYSNIMNFFKTEITLANGEIRKRPLIETNGETGEIVWDKGRDFATVRKVLSMPQVNIVKKTEVQTGGFSKESILPKRNSDKLIARKKDWDPKKYGGFDSPTVAYSVLVVAKVEKGKSKKLKSVKELLGITIMERSSFEKNPIDFLEAKGYKEVKKDLIIKLPKYSLFELENGRKRMLASAGELQKGNELALPSKYVNFLYLASHYEKLKGSPEDNEQKQLFVEQHKHYLDEIIEQISEFSKRVILADANLDKVLSAYNKHRDKPIREQAENIIHLFTLTNLGAPAAFKYFDTTIDRKRYTSTKEVLDATLIHQSITGLYETRIDLSQLGGDGGGGGGSSEAAAKGGTLNIEDEHRLHETSKEPDVSLGSTWLSDFPQAWAETGGMGLAVRQAPLIIPLKATSTPVSIKQYPMSQEARLGIKPHIQRLLDQGILVPCQSPWNTPLLPVKKPGTNDYRPVQDLREVNKRVEDIHPTVPNPYNLLSGLPPSHQWYTVLDLKDAFFCLRLHPTSQPLFAFEWRDPEMGISGQLTWTRLPQGFKNSPTLFNEALHRDLADFRIQHPDLILLQYVDDLLLAATSELDCQQGTRALLQTLGNLGYRASAKKAQICQKQVKYLGYLLKEGQRWLTEARKETVMGQPTPKTPRQLREFLGKAGFCRLFIPGFAEMAAPLYPLTKPGTLFNWGPDQQKAYQEIKQALLTAPALGLPDLTKPFELFVDEKQGYAKGVLTQKLGPWRRPVAYLSKKLDPVAAGWPPCLRMVAAIAVLTKDAGKLTMGQPLVILAPHAVEALVKQPPDRWLSNARMTHYQALLLDTDRVQFGPVVALNPATLLPLPEEGLQHNCLDILAEAHGTRPDLTDQPLPDADHTWYTDGSSLLQEGQRKAGAAVTTETEVIWAKALPAGTSAQRAELIALTQALKMAEGKKLNVYTDSRYAFATAHIHGEIYRRRGWLTSEGKEIKNKDEILALLKALFLPKRLSIIHCPGHQKGHSAEARGNRMADQAARKAAITETPDTSTLLAGKRTADGSEFEKRTADGSEFESPKKKAKVE

SEQ ID NO: 2832 - protein, 2091 aa, synthetic construct
MPAAKRVKLDGGDKKYSIGLDIGTNSVGWAVITDEYKVPSKKFKVLGNTDRHSIKKNLIGALLFDSGETAEATRLKRTARRRYTRRKNRICYLQEIFSNEMAKVDDSFFHRLEESFLVEEDKKHERHPIFGNIVDEVAYHEKYPTIYHLRKKLVDSTDKADLRLIYLALAHMIKFRGHFLIEGDLNPDNSDVDKLFIQLVQTYNQLFEENPINASGVDAKAILSARLSKSRRLENLIAQLPGEKKNGLFGNLIALSLGLTPNFKSNFDLAEDAKLQLSKDTYDDDLDNLLAQIGDQYADLFLAAKNLSDAILLSDILRVNTEITKAPLSASMIKRYDEHHQDLTLLKALVRQQLPEKYKEIFFDQSKNGYAGYIDGGASQEEFYKFIKPILEKMDGTEELLVKLNREDLLRKQRTFDNGSIPHQIHLGELHAILRRQEDFYPFLKDNREKIEKILTFRIPYYVGPLARGNSRFAWMTRKSEETITPWNFEEVVDKGASAQSFIERMTNFDKNLPNEKVLPKHSLLYEYFTVYNELTKVKYVTEGMRKPAFLSGEQKKAIVDLLFKTNRKVTVKQLKEDYFKKIECFDSVEISGVEDRFNASLGTYHDLLKIIKDKDFLDNEENEDILEDIVLTLTLFEDREMIEERLKTYAHLFDDKVMKQLKRRRYTGWGRLSRKLINGIRDKQSGKTILDFLKSDGFANRNFMQLIHDDSLTFKEDIQKAQVSGQGDSLHEHIANLAGSPAIKKGILQTVKVVDELVKVMGRHKPENIVIEMARENQTTQKGQKNSRERMKRIEEGIKELGSQILKEHPVENTQLQNEKLYLYYLQNGRDMYVDQELDINRLSDYDVDHIVPQSFLKDDSIDNKVLTRSDKARGKSDNVPSEEVVKKMKNYWRQLLNAKLITQRKFDNLTKAERGGLSELDKAGFIKRQLVETRQITKHVAQILDSRMNTKYDENDKLIREVKVITLKSKLVSDFRKDFQFYKVREINNYHHAHDAYLNAVVGTALIKKYPKLESEFVYGDYKVYDVRKMIAKSEQEIGKATAKYFFYSNIMNFFKTEITLANGEIRKRPLIETNGETGEIVWDKGRDFATVRKVLSMPQVNIVKKTEVQTGGFSKESILPKRNSDKLIARKKDWDPKKYGGFDSPTVAYSVLVVAKVEKGKSKKLKSVKELLGITIMERSSFEKNPIDFLEAKGYKEVKKDLIIKLPKYSLFELENGRKRMLASAGELQKGNELALPSKYVNFLYLASHYEKLKGSPEDNEQKQLFVEQHKHYLDEIIEQISEFSKRVILADANLDKVLSAYNKHRDKPIREQAENIIHLFTLTNLGAPAAFKYFDTTIDRKRYTSTKEVLDATLIHQSITGLYETRIDLSQLGGDGGGSSGSSGGTLNIEDEHRLHETSKEPDVSLGSTWLSDFPQAWAETGGMGLAVRQAPLIIPLKATSTPVSIKQYPMSQEARLGIKPHIQRLLDQGILVPCQSPWNTPLLPVKKPGTNDYRPVQDLREVNKRVEDIHPTVPNPYNLLSGLPPSHQWYTVLDLKDAFFCLRLHPTSQPLFAFEWRDPEMGISGQLTWTRLPQGFKNSPTLFNEALHRDLADFRIQHPDLILLQYVDDLLLAATSELDCQQGTRALLQTLGNLGYRASAKKAQICQKQVKYLGYLLKEGQRWLTEARKETVMGQPTPKTPRQLREFLGKAGFCRLFIPGFAEMAAPLYPLTKPGTLFNWGPDQQKAYQEIKQALLTAPALGLPDLTKPFELFVDEKQGYAKGVLTQKLGPWRRPVAYLSKKLDPVAAGWPPCLRMVAAIAVLTKDAGKLTMGQPLVILAPHAVEALVKQPPDRWLSNARMTHYQALLLDTDRVQFGPVVALNPATLLPLPEEGLQHNCLDILAEAHGTRPDLTDQPLPDADHTWYTDGSSLLQEGQRKAGAAVTTETEVIWAKALPAGTSAQRAELIALTQALKMAEGKKLNVYTDSRYAFATAHIHGEIYRRRGWLTSEGKEIKNKDEILALLKALFLPKRLSIIHCPGHQKGHSAEARGNRMADQAARKAAITETPDTSTLLAGKRTADGSEFEKRTADGSEFESPKKKAKVE

SEQ ID NO: 2833 - protein, 2094 aa, synthetic construct
MPAAKRVKLDGGDKKYSIGLDIGTNSVGWAVITDEYKVPSKKFKVLGNTDRHSIKKNLIGALLFDSGETAEATRLKRTARRRYTRRKNRICYLQEIFSNEMAKVDDSFFHRLEESFLVEEDKKHERHPIFGNIVDEVAYHEKYPTIYHLRKKLVDSTDKADLRLIYLALAHMIKFRGHFLIEGDLNPDNSDVDKLFIQLVQTYNQLFEENPINASGVDAKAILSARLSKSRRLENLIAQLPGEKKNGLFGNLIALSLGLTPNFKSNFDLAEDAKLQLSKDTYDDDLDNLLAQIGDQYADLFLAAKNLSDAILLSDILRVNTEITKAPLSASMIKRYDEHHQDLTLLKALVRQQLPEKYKEIFFDQSKNGYAGYIDGGASQEEFYKFIKPILEKMDGTEELLVKLNREDLLRKQRTFDNGSIPHQIHLGELHAILRRQEDFYPFLKDNREKIEKILTFRIPYYVGPLARGNSRFAWMTRKSEETITPWNFEEVVDKGASAQSFIERMTNFDKNLPNEKVLPKHSLLYEYFTVYNELTKVKYVTEGMRKPAFLSGEQKKAIVDLLFKTNRKVTVKQLKEDYFKKIECFDSVEISGVEDRFNASLGTYHDLLKIIKDKDFLDNEENEDILEDIVLTLTLFEDREMIEERLKTYAHLFDDKVMKQLKRRRYTGWGRLSRKLINGIRDKQSGKTILDFLKSDGFANRNFMQLIHDDSLTFKEDIQKAQVSGQGDSLHEHIANLAGSPAIKKGILQTVKVVDELVKVMGRHKPENIVIEMARENQTTQKGQKNSRERMKRIEEGIKELGSQILKEHPVENTQLQNEKLYLYYLQNGRDMYVDQELDINRLSDYDVDHIVPQSFLKDDSIDNKVLTRSDKARGKSDNVPSEEVVKKMKNYWRQLLNAKLITQRKFDNLTKAERGGLSELDKAGFIKRQLVETRQITKHVAQILDSRMNTKYDENDKLIREVKVITLKSKLVSDFRKDFQFYKVREINNYHHAHDAYLNAVVGTALIKKYPKLESEFVYGDYKVYDVRKMIAKSEQEIGKATAKYFFYSNIMNFFKTEITLANGEIRKRPLIETNGETGEIVWDKGRDFATVRKVLSMPQVNIVKKTEVQTGGFSKESILPKRNSDKLIARKKDWDPKKYGGFDSPTVAYSVLVVAKVEKGKSKKLKSVKELLGITIMERSSFEKNPIDFLEAKGYKEVKKDLIIKLPKYSLFELENGRKRMLASAGELQKGNELALPSKYVNFLYLASHYEKLKGSPEDNEQKQLFVEQHKHYLDEIIEQISEFSKRVILADANLDKVLSAYNKHRDKPIREQAENIIHLFTLTNLGAPAAFKYFDTTIDRKRYTSTKEVLDATLIHQSITGLYETRIDLSQLGGDGGPAPGGSGGGGGTLNIEDEHRLHETSKEPDVSLGSTWLSDFPQAWAETGGMGLAVRQAPLIIPLKATSTPVSIKQYPMSQEARLGIKPHIQRLLDQGILVPCQSPWNTPLLPVKKPGTNDYRPVQDLREVNKRVEDIHPTVPNPYNLLSGLPPSHQWYTVLDLKDAFFCLRLHPTSQPLFAFEWRDPEMGISGQLTWTRLPQGFKNSPTLFNEALHRDLADFRIQHPDLILLQYVDDLLLAATSELDCQQGTRALLQTLGNLGYRASAKKAQICQKQVKYLGYLLKEGQRWLTEARKETVMGQPTPKTPRQLREFLGKAGFCRLFIPGFAEMAAPLYPLTKPGTLFNWGPDQQKAYQEIKQALLTAPALGLPDLTKPFELFVDEKQGYAKGVLTQKLGPWRRPVAYLSKKLDPVAAGWPPCLRMVAAIAVLTKDAGKLTMGQPLVILAPHAVEALVKQPPDRWLSNARMTHYQALLLDTDRVQFGPVVALNPATLLPLPEEGLQHNCLDILAEAHGTRPDLTDQPLPDADHTWYTDGSSLLQEGQRKAGAAVTTETEVIWAKALPAGTSAQRAELIALTQALKMAEGKKLNVYTDSRYAFATAHIHGEIYRRRGWLTSEGKEIKNKDEILALLKALFLPKRLSIIHCPGHQKGHSAEARGNRMADQAARKAAITETPDTSTLLAGKRTADGSEFEKRTADGSEFESPKKKAKVE

SEQ ID NO: 2834 - protein, 2090 aa, synthetic construct
MPAAKRVKLDGGDKKYSIGLDIGTNSVGWAVITDEYKVPSKKFKVLGNTDRHSIKKNLIGALLFDSGETAEATRLKRTARRRYTRRKNRICYLQEIFSNEMAKVDDSFFHRLEESFLVEEDKKHERHPIFGNIVDEVAYHEKYPTIYHLRKKLVDSTDKADLRLIYLALAHMIKFRGHFLIEGDLNPDNSDVDKLFIQLVQTYNQLFEENPINASGVDAKAILSARLSKSRRLENLIAQLPGEKKNGLFGNLIALSLGLTPNFKSNFDLAEDAKLQLSKDTYDDDLDNLLAQIGDQYADLFLAAKNLSDAILLSDILRVNTEITKAPLSASMIKRYDEHHQDLTLLKALVRQQLPEKYKEIFFDQSKNGYAGYIDGGASQEEFYKFIKPILEKMDGTEELLVKLNREDLLRKQRTFDNGSIPHQIHLGELHAILRRQEDFYPFLKDNREKIEKILTFRIPYYVGPLARGNSRFAWMTRKSEETITPWNFEEVVDKGASAQSFIERMTNFDKNLPNEKVLPKHSLLYEYFTVYNELTKVKYVTEGMRKPAFLSGEQKKAIVDLLFKTNRKVTVKQLKEDYFKKIECFDSVEISGVEDRFNASLGTYHDLLKIIKDKDFLDNEENEDILEDIVLTLTLFEDREMIEERLKTYAHLFDDKVMKQLKRRRYTGWGRLSRKLINGIRDKQSGKTILDFLKSDGFANRNFMQLIHDDSLTFKEDIQKAQVSGQGDSLHEHIANLAGSPAIKKGILQTVKVVDELVKVMGRHKPENIVIEMARENQTTQKGQKNSRERMKRIEEGIKELGSQILKEHPVENTQLQNEKLYLYYLQNGRDMYVDQELDINRLSDYDVDHIVPQSFLKDDSIDNKVLTRSDKARGKSDNVPSEEVVKKMKNYWRQLLNAKLITQRKFDNLTKAERGGLSELDKAGFIKRQLVETRQITKHVAQILDSRMNTKYDENDKLIREVKVITLKSKLVSDFRKDFQFYKVREINNYHHAHDAYLNAVVGTALIKKYPKLESEFVYGDYKVYDVRKMIAKSEQEIGKATAKYFFYSNIMNFFKTEITLANGEIRKRPLIETNGETGEIVWDKGRDFATVRKVLSMPQVNIVKKTEVQTGGFSKESILPKRNSDKLIARKKDWDPKKYGGFDSPTVAYSVLVVAKVEKGKSKKLKSVKELLGITIMERSSFEKNPIDFLEAKGYKEVKKDLIIKLPKYSLFELENGRKRMLASAGELQKGNELALPSKYVNFLYLASHYEKLKGSPEDNEQKQLFVEQHKHYLDEIIEQISEFSKRVILADANLDKVLSAYNKHRDKPIREQAENIIHLFTLTNLGAPAAFKYFDTTIDRKRYTSTKEVLDATLIHQSITGLYETRIDLSQLGGDGGGGGGGGGTLNIEDEHRLHETSKEPDVSLGSTWLSDFPQAWAETGGMGLAVRQAPLIIPLKATSTPVSIKQYPMSQEARLGIKPHIQRLLDQGILVPCQSPWNTPLLPVKKPGTNDYRPVQDLREVNKRVEDIHPTVPNPYNLLSGLPPSHQWYTVLDLKDAFFCLRLHPTSQPLFAFEWRDPEMGISGQLTWTRLPQGFKNSPTLFNEALHRDLADFRIQHPDLILLQYVDDLLLAATSELDCQQGTRALLQTLGNLGYRASAKKAQICQKQVKYLGYLLKEGQRWLTEARKETVMGQPTPKTPRQLREFLGKAGFCRLFIPGFAEMAAPLYPLTKPGTLFNWGPDQQKAYQEIKQALLTAPALGLPDLTKPFELFVDEKQGYAKGVLTQKLGPWRRPVAYLSKKLDPVAAGWPPCLRMVAAIAVLTKDAGKLTMGQPLVILAPHAVEALVKQPPDRWLSNARMTHYQALLLDTDRVQFGPVVALNPATLLPLPEEGLQHNCLDILAEAHGTRPDLTDQPLPDADHTWYTDGSSLLQEGQRKAGAAVTTETEVIWAKALPAGTSAQRAELIALTQALKMAEGKKLNVYTDSRYAFATAHIHGEIYRRRGWLTSEGKEIKNKDEILALLKALFLPKRLSIIHCPGHQKGHSAEARGNRMADQAARKAAITETPDTSTLLAGKRTADGSEFEKRTADGSEFESPKKKAKVE

SEQ ID NO: 2835 - protein, 2094 aa, synthetic construct
MPAAKRVKLDGGDKKYSIGLDIGTNSVGWAVITDEYKVPSKKFKVLGNTDRHSIKKNLIGALLFDSGETAEATRLKRTARRRYTRRKNRICYLQEIFSNEMAKVDDSFFHRLEESFLVEEDKKHERHPIFGNIVDEVAYHEKYPTIYHLRKKLVDSTDKADLRLIYLALAHMIKFRGHFLIEGDLNPDNSDVDKLFIQLVQTYNQLFEENPINASGVDAKAILSARLSKSRRLENLIAQLPGEKKNGLFGNLIALSLGLTPNFKSNFDLAEDAKLQLSKDTYDDDLDNLLAQIGDQYADLFLAAKNLSDAILLSDILRVNTEITKAPLSASMIKRYDEHHQDLTLLKALVRQQLPEKYKEIFFDQSKNGYAGYIDGGASQEEFYKFIKPILEKMDGTEELLVKLNREDLLRKQRTFDNGSIPHQIHLGELHAILRRQEDFYPFLKDNREKIEKILTFRIPYYVGPLARGNSRFAWMTRKSEETITPWNFEEVVDKGASAQSFIERMTNFDKNLPNEKVLPKHSLLYEYFTVYNELTKVKYVTEGMRKPAFLSGEQKKAIVDLLFKTNRKVTVKQLKEDYFKKIECFDSVEISGVEDRFNASLGTYHDLLKIIKDKDFLDNEENEDILEDIVLTLTLFEDREMIEERLKTYAHLFDDKVMKQLKRRRYTGWGRLSRKLINGIRDKQSGKTILDFLKSDGFANRNFMQLIHDDSLTFKEDIQKAQVSGQGDSLHEHIANLAGSPAIKKGILQTVKVVDELVKVMGRHKPENIVIEMARENQTTQKGQKNSRERMKRIEEGIKELGSQILKEHPVENTQLQNEKLYLYYLQNGRDMYVDQELDINRLSDYDVDHIVPQSFLKDDSIDNKVLTRSDKARGKSDNVPSEEVVKKMKNYWRQLLNAKLITQRKFDNLTKAERGGLSELDKAGFIKRQLVETRQITKHVAQILDSRMNTKYDENDKLIREVKVITLKSKLVSDFRKDFQFYKVREINNYHHAHDAYLNAVVGTALIKKYPKLESEFVYGDYKVYDVRKMIAKSEQEIGKATAKYFFYSNIMNFFKTEITLANGEIRKRPLIETNGETGEIVWDKGRDFATVRKVLSMPQVNIVKKTEVQTGGFSKESILPKRNSDKLIARKKDWDPKKYGGFDSPTVAYSVLVVAKVEKGKSKKLKSVKELLGITIMERSSFEKNPIDFLEAKGYKEVKKDLIIKLPKYSLFELENGRKRMLASAGELQKGNELALPSKYVNFLYLASHYEKLKGSPEDNEQKQLFVEQHKHYLDEIIEQISEFSKRVILADANLDKVLSAYNKHRDKPIREQAENIIHLFTLTNLGAPAAFKYFDTTIDRKRYTSTKEVLDATLIHQSITGLYETRIDLSQLGGDGGGSSPAPGGGGGTLNIEDEHRLHETSKEPDVSLGSTWLSDFPQAWAETGGMGLAVRQAPLIIPLKATSTPVSIKQYPMSQEARLGIKPHIQRLLDQGILVPCQSPWNTPLLPVKKPGTNDYRPVQDLREVNKRVEDIHPTVPNPYNLLSGLPPSHQWYTVLDLKDAFFCLRLHPTSQPLFAFEWRDPEMGISGQLTWTRLPQGFKNSPTLFNEALHRDLADFRIQHPDLILLQYVDDLLLAATSELDCQQGTRALLQTLGNLGYRASAKKAQICQKQVKYLGYLLKEGQRWLTEARKETVMGQPTPKTPRQLREFLGKAGFCRLFIPGFAEMAAPLYPLTKPGTLFNWGPDQQKAYQEIKQALLTAPALGLPDLTKPFELFVDEKQGYAKGVLTQKLGPWRRPVAYLSKKLDPVAAGWPPCLRMVAAIAVLTKDAGKLTMGQPLVILAPHAVEALVKQPPDRWLSNARMTHYQALLLDTDRVQFGPVVALNPATLLPLPEEGLQHNCLDILAEAHGTRPDLTDQPLPDADHTWYTDGSSLLQEGQRKAGAAVTTETEVIWAKALPAGTSAQRAELIALTQALKMAEGKKLNVYTDSRYAFATAHIHGEIYRRRGWLTSEGKEIKNKDEILALLKALFLPKRLSIIHCPGHQKGHSAEARGNRMADQAARKAAITETPDTSTLLAGKRTADGSEFEKRTADGSEFESPKKKAKVE

SEQ ID NO: 2836 - protein, 2100 aa, synthetic construct
MPAAKRVKLDGGDKKYSIGLDIGTNSVGWAVITDEYKVPSKKFKVLGNTDRHSIKKNLIGALLFDSGETAEATRLKRTARRRYTRRKNRICYLQEIFSNEMAKVDDSFFHRLEESFLVEEDKKHERHPIFGNIVDEVAYHEKYPTIYHLRKKLVDSTDKADLRLIYLALAHMIKFRGHFLIEGDLNPDNSDVDKLFIQLVQTYNQLFEENPINASGVDAKAILSARLSKSRRLENLIAQLPGEKKNGLFGNLIALSLGLTPNFKSNFDLAEDAKLQLSKDTYDDDLDNLLAQIGDQYADLFLAAKNLSDAILLSDILRVNTEITKAPLSASMIKRYDEHHQDLTLLKALVRQQLPEKYKEIFFDQSKNGYAGYIDGGASQEEFYKFIKPILEKMDGTEELLVKLNREDLLRKQRTFDNGSIPHQIHLGELHAILRRQEDFYPFLKDNREKIEKILTFRIPYYVGPLARGNSRFAWMTRKSEETITPWNFEEVVDKGASAQSFIERMTNFDKNLPNEKVLPKHSLLYEYFTVYNELTKVKYVTEGMRKPAFLSGEQKKAIVDLLFKTNRKVTVKQLKEDYFKKIECFDSVEISGVEDRFNASLGTYHDLLKIIKDKDFLDNEENEDILEDIVLTLTLFEDREMIEERLKTYAHLFDDKVMKQLKRRRYTGWGRLSRKLINGIRDKQSGKTILDFLKSDGFANRNFMQLIHDDSLTFKEDIQKAQVSGQGDSLHEHIANLAGSPAIKKGILQTVKVVDELVKVMGRHKPENIVIEMARENQTTQKGQKNSRERMKRIEEGIKELGSQILKEHPVENTQLQNEKLYLYYLQNGRDMYVDQELDINRLSDYDVDHIVPQSFLKDDSIDNKVLTRSDKARGKSDNVPSEEVVKKMKNYWRQLLNAKLITQRKFDNLTKAERGGLSELDKAGFIKRQLVETRQITKHVAQILDSRMNTKYDENDKLIREVKVITLKSKLVSDFRKDFQFYKVREINNYHHAHDAYLNAVVGTALIKKYPKLESEFVYGDYKVYDVRKMIAKSEQEIGKATAKYFFYSNIMNFFKTEITLANGEIRKRPLIETNGETGEIVWDKGRDFATVRKVLSMPQVNIVKKTEVQTGGFSKESILPKRNSDKLIARKKDWDPKKYGGFDSPTVAYSVLVVAKVEKGKSKKLKSVKELLGITIMERSSFEKNPIDFLEAKGYKEVKKDLIIKLPKYSLFELENGRKRMLASAGELQKGNELALPSKYVNFLYLASHYEKLKGSPEDNEQKQLFVEQHKHYLDEIIEQISEFSKRVILADANLDKVLSAYNKHRDKPIREQAENIIHLFTLTNLGAPAAFKYFDTTIDRKRYTSTKEVLDATLIHQSITGLYETRIDLSQLGGDGGGGGGSEAAAKGGGGSGGTLNIEDEHRLHETSKEPDVSLGSTWLSDFPQAWAETGGMGLAVRQAPLIIPLKATSTPVSIKQYPMSQEARLGIKPHIQRLLDQGILVPCQSPWNTPLLPVKKPGTNDYRPVQDLREVNKRVEDIHPTVPNPYNLLSGLPPSHQWYTVLDLKDAFFCLRLHPTSQPLFAFEWRDPEMGISGQLTWTRLPQGFKNSPTLFNEALHRDLADFRIQHPDLILLQYVDDLLLAATSELDCQQGTRALLQTLGNLGYRASAKKAQICQKQVKYLGYLLKEGQRWLTEARKETVMGQPTPKTPRQLREFLGKAGFCRLFIPGFAEMAAPLYPLTKPGTLFNWGPDQQKAYQEIKQALLTAPALGLPDLTKPFELFVDEKQGYAKGVLTQKLGPWRRPVAYLSKKLDPVAAGWPPCLRMVAAIAVLTKDAGKLTMGQPLVILAPHAVEALVKQPPDRWLSNARMTHYQALLLDTDRVQFGPVVALNPATLLPLPEEGLQHNCLDILAEAHGTRPDLTDQPLPDADHTWYTDGSSLLQEGQRKAGAAVTTETEVIWAKALPAGTSAQRAELIALTQALKMAEGKKLNVYTDSRYAFATAHIHGEIYRRRGWLTSEGKEIKNKDEILALLKALFLPKRLSIIHCPGHQKGHSAEARGNRMADQAARKAAITETPDTSTLLAGKRTADGSEFEKRTADGSEFESPKKKAKVE

SEQ ID NO: 2837 - protein, 2091 aa, synthetic construct
MPAAKRVKLDGGDKKYSIGLDIGTNSVGWAVITDEYKVPSKKFKVLGNTDRHSIKKNLIGALLFDSGETAEATRLKRTARRRYTRRKNRICYLQEIFSNEMAKVDDSFFHRLEESFLVEEDKKHERHPIFGNIVDEVAYHEKYPTIYHLRKKLVDSTDKADLRLIYLALAHMIKFRGHFLIEGDLNPDNSDVDKLFIQLVQTYNQLFEENPINASGVDAKAILSARLSKSRRLENLIAQLPGEKKNGLFGNLIALSLGLTPNFKSNFDLAEDAKLQLSKDTYDDDLDNLLAQIGDQYADLFLAAKNLSDAILLSDILRVNTEITKAPLSASMIKRYDEHHQDLTLLKALVRQQLPEKYKEIFFDQSKNGYAGYIDGGASQEEFYKFIKPILEKMDGTEELLVKLNREDLLRKQRTFDNGSIPHQIHLGELHAILRRQEDFYPFLKDNREKIEKILTFRIPYYVGPLARGNSRFAWMTRKSEETITPWNFEEVVDKGASAQSFIERMTNFDKNLPNEKVLPKHSLLYEYFTVYNELTKVKYVTEGMRKPAFLSGEQKKAIVDLLFKTNRKVTVKQLKEDYFKKIECFDSVEISGVEDRFNASLGTYHDLLKIIKDKDFLDNEENEDILEDIVLTLTLFEDREMIEERLKTYAHLFDDKVMKQLKRRRYTGWGRLSRKLINGIRDKQSGKTILDFLKSDGFANRNFMQLIHDDSLTFKEDIQKAQVSGQGDSLHEHIANLAGSPAIKKGILQTVKVVDELVKVMGRHKPENIVIEMARENQTTQKGQKNSRERMKRIEEGIKELGSQILKEHPVENTQLQNEKLYLYYLQNGRDMYVDQELDINRLSDYDVDHIVPQSFLKDDSIDNKVLTRSDKARGKSDNVPSEEVVKKMKNYWRQLLNAKLITQRKFDNLTKAERGGLSELDKAGFIKRQLVETRQITKHVAQILDSRMNTKYDENDKLIREVKVITLKSKLVSDFRKDFQFYKVREINNYHHAHDAYLNAVVGTALIKKYPKLESEFVYGDYKVYDVRKMIAKSEQEIGKATAKYFFYSNIMNFFKTEITLANGEIRKRPLIETNGETGEIVWDKGRDFATVRKVLSMPQVNIVKKTEVQTGGFSKESILPKRNSDKLIARKKDWDPKKYGGFDSPTVAYSVLVVAKVEKGKSKKLKSVKELLGITIMERSSFEKNPIDFLEAKGYKEVKKDLIIKLPKYSLFELENGRKRMLASAGELQKGNELALPSKYVNFLYLASHYEKLKGSPEDNEQKQLFVEQHKHYLDEIIEQISEFSKRVILADANLDKVLSAYNKHRDKPIREQAENIIHLFTLTNLGAPAAFKYFDTTIDRKRYTSTKEVLDATLIHQSITGLYETRIDLSQLGGDGGPAPGGGGGTLNIEDEHRLHETSKEPDVSLGSTWLSDFPQAWAETGGMGLAVRQAPLIIPLKATSTPVSIKQYPMSQEARLGIKPHIQRLLDQGILVPCQSPWNTPLLPVKKPGTNDYRPVQDLREVNKRVEDIHPTVPNPYNLLSGLPPSHQWYTVLDLKDAFFCLRLHPTSQPLFAFEWRDPEMGISGQLTWTRLPQGFKNSPTLFNEALHRDLADFRIQHPDLILLQYVDDLLLAATSELDCQQGTRALLQTLGNLGYRASAKKAQICQKQVKYLGYLLKEGQRWLTEARKETVMGQPTPKTPRQLREFLGKAGFCRLFIPGFAEMAAPLYPLTKPGTLFNWGPDQQKAYQEIKQALLTAPALGLPDLTKPFELFVDEKQGYAKGVLTQKLGPWRRPVAYLSKKLDPVAAGWPPCLRMVAAIAVLTKDAGKLTMGQPLVILAPHAVEALVKQPPDRWLSNARMTHYQALLLDTDRVQFGPVVALNPATLLPLPEEGLQHNCLDILAEAHGTRPDLTDQPLPDADHTWYTDGSSLLQEGQRKAGAAVTTETEVIWAKALPAGTSAQRAELIALTQALKMAEGKKLNVYTDSRYAFATAHIHGEIYRRRGWLTSEGKEIKNKDEILALLKALFLPKRLSIIHCPGHQKGHSAEARGNRMADQAARKAAITETPDTSTLLAGKRTADGSEFEKRTADGSEFESPKKKAKVE

SEQ ID NO: 2838 - protein, 2096 aa, synthetic construct
MPAAKRVKLDGGDKKYSIGLDIGTNSVGWAVITDEYKVPSKKFKVLGNTDRHSIKKNLIGALLFDSGETAEATRLKRTARRRYTRRKNRICYLQEIFSNEMAKVDDSFFHRLEESFLVEEDKKHERHPIFGNIVDEVAYHEKYPTIYHLRKKLVDSTDKADLRLIYLALAHMIKFRGHFLIEGDLNPDNSDVDKLFIQLVQTYNQLFEENPINASGVDAKAILSARLSKSRRLENLIAQLPGEKKNGLFGNLIALSLGLTPNFKSNFDLAEDAKLQLSKDTYDDDLDNLLAQIGDQYADLFLAAKNLSDAILLSDILRVNTEITKAPLSASMIKRYDEHHQDLTLLKALVRQQLPEKYKEIFFDQSKNGYAGYIDGGASQEEFYKFIKPILEKMDGTEELLVKLNREDLLRKQRTFDNGSIPHQIHLGELHAILRRQEDFYPFLKDNREKIEKILTFRIPYYVGPLARGNSRFAWMTRKSEETITPWNFEEVVDKGASAQSFIERMTNFDKNLPNEKVLPKHSLLYEYFTVYNELTKVKYVTEGMRKPAFLSGEQKKAIVDLLFKTNRKVTVKQLKEDYFKKIECFDSVEISGVEDRFNASLGTYHDLLKIIKDKDFLDNEENEDILEDIVLTLTLFEDREMIEERLKTYAHLFDDKVMKQLKRRRYTGWGRLSRKLINGIRDKQSGKTILDFLKSDGFANRNFMQLIHDDSLTFKEDIQKAQVSGQGDSLHEHIANLAGSPAIKKGILQTVKVVDELVKVMGRHKPENIVIEMARENQTTQKGQKNSRERMKRIEEGIKELGSQILKEHPVENTQLQNEKLYLYYLQNGRDMYVDQELDINRLSDYDVDHIVPQSFLKDDSIDNKVLTRSDKARGKSDNVPSEEVVKKMKNYWRQLLNAKLITQRKFDNLTKAERGGLSELDKAGFIKRQLVETRQITKHVAQILDSRMNTKYDENDKLIREVKVITLKSKLVSDFRKDFQFYKVREINNYHHAHDAYLNAVVGTALIKKYPKLESEFVYGDYKVYDVRKMIAKSEQEIGKATAKYFFYSNIMNFFKTEITLANGEIRKRPLIETNGETGEIVWDKGRDFATVRKVLSMPQVNIVKKTEVQTGGFSKESILPKRNSDKLIARKKDWDPKKYGGFDSPTVAYSVLVVAKVEKGKSKKLKSVKELLGITIMERSSFEKNPIDFLEAKGYKEVKKDLIIKLPKYSLFELENGRKRMLASAGELQKGNELALPSKYVNFLYLASHYEKLKGSPEDNEQKQLFVEQHKHYLDEIIEQISEFSKRVILADANLDKVLSAYNKHRDKPIREQAENIIHLFTLTNLGAPAAFKYFDTTIDRKRYTSTKEVLDATLIHQSITGLYETRIDLSQLGGDGGEAAAKPAPGGGGGTLNIEDEHRLHETSKEPDVSLGSTWLSDFPQAWAETGGMGLAVRQAPLIIPLKATSTPVSIKQYPMSQEARLGIKPHIQRLLDQGILVPCQSPWNTPLLPVKKPGTNDYRPVQDLREVNKRVEDIHPTVPNPYNLLSGLPPSHQWYTVLDLKDAFFCLRLHPTSQPLFAFEWRDPEMGISGQLTWTRLPQGFKNSPTLFNEALHRDLADFRIQHPDLILLQYVDDLLLAATSELDCQQGTRALLQTLGNLGYRASAKKAQICQKQVKYLGYLLKEGQRWLTEARKETVMGQPTPKTPRQLREFLGKAGFCRLFIPGFAEMAAPLYPLTKPGTLFNWGPDQQKAYQEIKQALLTAPALGLPDLTKPFELFVDEKQGYAKGVLTQKLGPWRRPVAYLSKKLDPVAAGWPPCLRMVAAIAVLTKDAGKLTMGQPLVILAPHAVEALVKQPPDRWLSNARMTHYQALLLDTDRVQFGPVVALNPATLLPLPEEGLQHNCLDILAEAHGTRPDLTDQPLPDADHTWYTDGSSLLQEGQRKAGAAVTTETEVIWAKALPAGTSAQRAELIALTQALKMAEGKKLNVYTDSRYAFATAHIHGEIYRRRGWLTSEGKEIKNKDEILALLKALFLPKRLSIIHCPGHQKGHSAEARGNRMADQAARKAAITETPDTSTLLAGKRTADGSEFEKRTADGSEFESPKKKAKVE

SEQ ID NO: 2839 - protein, 2096 aa, synthetic construct
MPAAKRVKLDGGDKKYSIGLDIGTNSVGWAVITDEYKVPSKKFKVLGNTDRHSIKKNLIGALLFDSGETAEATRLKRTARRRYTRRKNRICYLQEIFSNEMAKVDDSFFHRLEESFLVEEDKKHERHPIFGNIVDEVAYHEKYPTIYHLRKKLVDSTDKADLRLIYLALAHMIKFRGHFLIEGDLNPDNSDVDKLFIQLVQTYNQLFEENPINASGVDAKAILSARLSKSRRLENLIAQLPGEKKNGLFGNLIALSLGLTPNFKSNFDLAEDAKLQLSKDTYDDDLDNLLAQIGDQYADLFLAAKNLSDAILLSDILRVNTEITKAPLSASMIKRYDEHHQDLTLLKALVRQQLPEKYKEIFFDQSKNGYAGYIDGGASQEEFYKFIKPILEKMDGTEELLVKLNREDLLRKQRTFDNGSIPHQIHLGELHAILRRQEDFYPFLKDNREKIEKILTFRIPYYVGPLARGNSRFAWMTRKSEETITPWNFEEVVDKGASAQSFIERMTNFDKNLPNEKVLPKHSLLYEYFTVYNELTKVKYVTEGMRKPAFLSGEQKKAIVDLLFKTNRKVTVKQLKEDYFKKIECFDSVEISGVEDRFNASLGTYHDLLKIIKDKDFLDNEENEDILEDIVLTLTLFEDREMIEERLKTYAHLFDDKVMKQLKRRRYTGWGRLSRKLINGIRDKQSGKTILDFLKSDGFANRNFMQLIHDDSLTFKEDIQKAQVSGQGDSLHEHIANLAGSPAIKKGILQTVKVVDELVKVMGRHKPENIVIEMARENQTTQKGQKNSRERMKRIEEGIKELGSQILKEHPVENTQLQNEKLYLYYLQNGRDMYVDQELDINRLSDYDVDHIVPQSFLKDDSIDNKVLTRSDKARGKSDNVPSEEVVKKMKNYWRQLLNAKLITQRKFDNLTKAERGGLSELDKAGFIKRQLVETRQITKHVAQILDSRMNTKYDENDKLIREVKVITLKSKLVSDFRKDFQFYKVREINNYHHAHDAYLNAVVGTALIKKYPKLESEFVYGDYKVYDVRKMIAKSEQEIGKATAKYFFYSNIMNFFKTEITLANGEIRKRPLIETNGETGEIVWDKGRDFATVRKVLSMPQVNIVKKTEVQTGGFSKESILPKRNSDKLIARKKDWDPKKYGGFDSPTVAYSVLVVAKVEKGKSKKLKSVKELLGITIMERSSFEKNPIDFLEAKGYKEVKKDLIIKLPKYSLFELENGRKRMLASAGELQKGNELALPSKYVNFLYLASHYEKLKGSPEDNEQKQLFVEQHKHYLDEIIEQISEFSKRVILADANLDKVLSAYNKHRDKPIREQAENIIHLFTLTNLGAPAAFKYFDTTIDRKRYTSTKEVLDATLIHQSITGLYETRIDLSQLGGDGGGSSPAPEAAAKGGTLNIEDEHRLHETSKEPDVSLGSTWLSDFPQAWAETGGMGLAVRQAPLIIPLKATSTPVSIKQYPMSQEARLGIKPHIQRLLDQGILVPCQSPWNTPLLPVKKPGTNDYRPVQDLREVNKRVEDIHPTVPNPYNLLSGLPPSHQWYTVLDLKDAFFCLRLHPTSQPLFAFEWRDPEMGISGQLTWTRLPQGFKNSPTLFNEALHRDLADFRIQHPDLILLQYVDDLLLAATSELDCQQGTRALLQTLGNLGYRASAKKAQICQKQVKYLGYLLKEGQRWLTEARKETVMGQPTPKTPRQLREFLGKAGFCRLFIPGFAEMAAPLYPLTKPGTLFNWGPDQQKAYQEIKQALLTAPALGLPDLTKPFELFVDEKQGYAKGVLTQKLGPWRRPVAYLSKKLDPVAAGWPPCLRMVAAIAVLTKDAGKLTMGQPLVILAPHAVEALVKQPPDRWLSNARMTHYQALLLDTDRVQFGPVVALNPATLLPLPEEGLQHNCLDILAEAHGTRPDLTDQPLPDADHTWYTDGSSLLQEGQRKAGAAVTTETEVIWAKALPAGTSAQRAELIALTQALKMAEGKKLNVYTDSRYAFATAHIHGEIYRRRGWLTSEGKEIKNKDEILALLKALFLPKRLSIIHCPGHQKGHSAEARGNRMADQAARKAAITETPDTSTLLAGKRTADGSEFEKRTADGSEFESPKKKAKVE

SEQ ID NO: 2840 - protein, 2094 aa, synthetic construct
MPAAKRVKLDGGDKKYSIGLDIGTNSVGWAVITDEYKVPSKKFKVLGNTDRHSIKKNLIGALLFDSGETAEATRLKRTARRRYTRRKNRICYLQEIFSNEMAKVDDSFFHRLEESFLVEEDKKHERHPIFGNIVDEVAYHEKYPTIYHLRKKLVDSTDKADLRLIYLALAHMIKFRGHFLIEGDLNPDNSDVDKLFIQLVQTYNQLFEENPINASGVDAKAILSARLSKSRRLENLIAQLPGEKKNGLFGNLIALSLGLTPNFKSNFDLAEDAKLQLSKDTYDDDLDNLLAQIGDQYADLFLAAKNLSDAILLSDILRVNTEITKAPLSASMIKRYDEHHQDLTLLKALVRQQLPEKYKEIFFDQSKNGYAGYIDGGASQEEFYKFIKPILEKMDGTEELLVKLNREDLLRKQRTFDNGSIPHQIHLGELHAILRRQEDFYPFLKDNREKIEKILTFRIPYYVGPLARGNSRFAWMTRKSEETITPWNFEEVVDKGASAQSFIERMTNFDKNLPNEKVLPKHSLLYEYFTVYNELTKVKYVTEGMRKPAFLSGEQKKAIVDLLFKTNRKVTVKQLKEDYFKKIECFDSVEISGVEDRFNASLGTYHDLLKIIKDKDFLDNEENEDILEDIVLTLTLFEDREMIEERLKTYAHLFDDKVMKQLKRRRYTGWGRLSRKLINGIRDKQSGKTILDFLKSDGFANRNFMQLIHDDSLTFKEDIQKAQVSGQGDSLHEHIANLAGSPAIKKGILQTVKVVDELVKVMGRHKPENIVIEMARENQTTQKGQKNSRERMKRIEEGIKELGSQILKEHPVENTQLQNEKLYLYYLQNGRDMYVDQELDINRLSDYDVDHIVPQSFLKDDSIDNKVLTRSDKARGKSDNVPSEEVVKKMKNYWRQLLNAKLITQRKFDNLTKAERGGLSELDKAGFIKRQLVETRQITKHVAQILDSRMNTKYDENDKLIREVKVITLKSKLVSDFRKDFQFYKVREINNYHHAHDAYLNAVVGTALIKKYPKLESEFVYGDYKVYDVRKMIAKSEQEIGKATAKYFFYSNIMNFFKTEITLANGEIRKRPLIETNGETGEIVWDKGRDFATVRKVLSMPQVNIVKKTEVQTGGFSKESILPKRNSDKLIARKKDWDPKKYGGFDSPTVAYSVLVVAKVEKGKSKKLKSVKELLGITIMERSSFEKNPIDFLEAKGYKEVKKDLIIKLPKYSLFELENGRKRMLASAGELQKGNELALPSKYVNFLYLASHYEKLKGSPEDNEQKQLFVEQHKHYLDEIIEQISEFSKRVILADANLDKVLSAYNKHRDKPIREQAENIIHLFTLTNLGAPAAFKYFDTTIDRKRYTSTKEVLDATLIHQSITGLYETRIDLSQLGGDGGGGGGGSPAPGGTLNIEDEHRLHETSKEPDVSLGSTWLSDFPQAWAETGGMGLAVRQAPLIIPLKATSTPVSIKQYPMSQEARLGIKPHIQRLLDQGILVPCQSPWNTPLLPVKKPGTNDYRPVQDLREVNKRVEDIHPTVPNPYNLLSGLPPSHQWYTVLDLKDAFFCLRLHPTSQPLFAFEWRDPEMGISGQLTWTRLPQGFKNSPTLFNEALHRDLADFRIQHPDLILLQYVDDLLLAATSELDCQQGTRALLQTLGNLGYRASAKKAQICQKQVKYLGYLLKEGQRWLTEARKETVMGQPTPKTPRQLREFLGKAGFCRLFIPGFAEMAAPLYPLTKPGTLFNWGPDQQKAYQEIKQALLTAPALGLPDLTKPFELFVDEKQGYAKGVLTQKLGPWRRPVAYLSKKLDPVAAGWPPCLRMVAAIAVLTKDAGKLTMGQPLVILAPHAVEALVKQPPDRWLSNARMTHYQALLLDTDRVQFGPVVALNPATLLPLPEEGLQHNCLDILAEAHGTRPDLTDQPLPDADHTWYTDGSSLLQEGQRKAGAAVTTETEVIWAKALPAGTSAQRAELIALTQALKMAEGKKLNVYTDSRYAFATAHIHGEIYRRRGWLTSEGKEIKNKDEILALLKALFLPKRLSIIHCPGHQKGHSAEARGNRMADQAARKAAITETPDTSTLLAGKRTADGSEFEKRTADGSEFESPKKKAKVE

SEQ ID NO: 2841 - protein, 2094 aa, synthetic construct
MPAAKRVKLDGGDKKYSIGLDIGTNSVGWAVITDEYKVPSKKFKVLGNTDRHSIKKNLIGALLFDSGETAEATRLKRTARRRYTRRKNRICYLQEIFSNEMAKVDDSFFHRLEESFLVEEDKKHERHPIFGNIVDEVAYHEKYPTIYHLRKKLVDSTDKADLRLIYLALAHMIKFRGHFLIEGDLNPDNSDVDKLFIQLVQTYNQLFEENPINASGVDAKAILSARLSKSRRLENLIAQLPGEKKNGLFGNLIALSLGLTPNFKSNFDLAEDAKLQLSKDTYDDDLDNLLAQIGDQYADLFLAAKNLSDAILLSDILRVNTEITKAPLSASMIKRYDEHHQDLTLLKALVRQQLPEKYKEIFFDQSKNGYAGYIDGGASQEEFYKFIKPILEKMDGTEELLVKLNREDLLRKQRTFDNGSIPHQIHLGELHAILRRQEDFYPFLKDNREKIEKILTFRIPYYVGPLARGNSRFAWMTRKSEETITPWNFEEVVDKGASAQSFIERMTNFDKNLPNEKVLPKHSLLYEYFTVYNELTKVKYVTEGMRKPAFLSGEQKKAIVDLLFKTNRKVTVKQLKEDYFKKIECFDSVEISGVEDRFNASLGTYHDLLKIIKDKDFLDNEENEDILEDIVLTLTLFEDREMIEERLKTYAHLFDDKVMKQLKRRRYTGWGRLSRKLINGIRDKQSGKTILDFLKSDGFANRNFMQLIHDDSLTFKEDIQKAQVSGQGDSLHEHIANLAGSPAIKKGILQTVKVVDELVKVMGRHKPENIVIEMARENQTTQKGQKNSRERMKRIEEGIKELGSQILKEHPVENTQLQNEKLYLYYLQNGRDMYVDQELDINRLSDYDVDHIVPQSFLKDDSIDNKVLTRSDKARGKSDNVPSEEVVKKMKNYWRQLLNAKLITQRKFDNLTKAERGGLSELDKAGFIKRQLVETRQITKHVAQILDSRMNTKYDENDKLIREVKVITLKSKLVSDFRKDFQFYKVREINNYHHAHDAYLNAVVGTALIKKYPKLESEFVYGDYKVYDVRKMIAKSEQEIGKATAKYFFYSNIMNFFKTEITLANGEIRKRPLIETNGETGEIVWDKGRDFATVRKVLSMPQVNIVKKTEVQTGGFSKESILPKRNSDKLIARKKDWDPKKYGGFDSPTVAYSVLVVAKVEKGKSKKLKSVKELLGITIMERSSFEKNPIDFLEAKGYKEVKKDLIIKLPKYSLFELENGRKRMLASAGELQKGNELALPSKYVNFLYLASHYEKLKGSPEDNEQKQLFVEQHKHYLDEIIEQISEFSKRVILADANLDKVLSAYNKHRDKPIREQAENIIHLFTLTNLGAPAAFKYFDTTIDRKRYTSTKEVLDATLIHQSITGLYETRIDLSQLGGDGGGGGPAPGSSGGTLNIEDEHRLHETSKEPDVSLGSTWLSDFPQAWAETGGMGLAVRQAPLIIPLKATSTPVSIKQYPMSQEARLGIKPHIQRLLDQGILVPCQSPWNTPLLPVKKPGTNDYRPVQDLREVNKRVEDIHPTVPNPYNLLSGLPPSHQWYTVLDLKDAFFCLRLHPTSQPLFAFEWRDPEMGISGQLTWTRLPQGFKNSPTLFNEALHRDLADFRIQHPDLILLQYVDDLLLAATSELDCQQGTRALLQTLGNLGYRASAKKAQICQKQVKYLGYLLKEGQRWLTEARKETVMGQPTPKTPRQLREFLGKAGFCRLFIPGFAEMAAPLYPLTKPGTLFNWGPDQQKAYQEIKQALLTAPALGLPDLTKPFELFVDEKQGYAKGVLTQKLGPWRRPVAYLSKKLDPVAAGWPPCLRMVAAIAVLTKDAGKLTMGQPLVILAPHAVEALVKQPPDRWLSNARMTHYQALLLDTDRVQFGPVVALNPATLLPLPEEGLQHNCLDILAEAHGTRPDLTDQPLPDADHTWYTDGSSLLQEGQRKAGAAVTTETEVIWAKALPAGTSAQRAELIALTQALKMAEGKKLNVYTDSRYAFATAHIHGEIYRRRGWLTSEGKEIKNKDEILALLKALFLPKRLSIIHCPGHQKGHSAEARGNRMADQAARKAAITETPDTSTLLAGKRTADGSEFEKRTADGSEFESPKKKAKVE

SEQ ID NO: 2842 - protein, 2096 aa, synthetic construct
MPAAKRVKLDGGDKKYSIGLDIGTNSVGWAVITDEYKVPSKKFKVLGNTDRHSIKKNLIGALLFDSGETAEATRLKRTARRRYTRRKNRICYLQEIFSNEMAKVDDSFFHRLEESFLVEEDKKHERHPIFGNIVDEVAYHEKYPTIYHLRKKLVDSTDKADLRLIYLALAHMIKFRGHFLIEGDLNPDNSDVDKLFIQLVQTYNQLFEENPINASGVDAKAILSARLSKSRRLENLIAQLPGEKKNGLFGNLIALSLGLTPNFKSNFDLAEDAKLQLSKDTYDDDLDNLLAQIGDQYADLFLAAKNLSDAILLSDILRVNTEITKAPLSASMIKRYDEHHQDLTLLKALVRQQLPEKYKEIFFDQSKNGYAGYIDGGASQEEFYKFIKPILEKMDGTEELLVKLNREDLLRKQRTFDNGSIPHQIHLGELHAILRRQEDFYPFLKDNREKIEKILTFRIPYYVGPLARGNSRFAWMTRKSEETITPWNFEEVVDKGASAQSFIERMTNFDKNLPNEKVLPKHSLLYEYFTVYNELTKVKYVTEGMRKPAFLSGEQKKAIVDLLFKTNRKVTVKQLKEDYFKKIECFDSVEISGVEDRFNASLGTYHDLLKIIKDKDFLDNEENEDILEDIVLTLTLFEDREMIEERLKTYAHLFDDKVMKQLKRRRYTGWGRLSRKLINGIRDKQSGKTILDFLKSDGFANRNFMQLIHDDSLTFKEDIQKAQVSGQGDSLHEHIANLAGSPAIKKGILQTVKVVDELVKVMGRHKPENIVIEMARENQTTQKGQKNSRERMKRIEEGIKELGSQILKEHPVENTQLQNEKLYLYYLQNGRDMYVDQELDINRLSDYDVDHIVPQSFLKDDSIDNKVLTRSDKARGKSDNVPSEEVVKKMKNYWRQLLNAKLITQRKFDNLTKAERGGLSELDKAGFIKRQLVETRQITKHVAQILDSRMNTKYDENDKLIREVKVITLKSKLVSDFRKDFQFYKVREINNYHHAHDAYLNAVVGTALIKKYPKLESEFVYGDYKVYDVRKMIAKSEQEIGKATAKYFFYSNIMNFFKTEITLANGEIRKRPLIETNGETGEIVWDKGRDFATVRKVLSMPQVNIVKKTEVQTGGFSKESILPKRNSDKLIARKKDWDPKKYGGFDSPTVAYSVLVVAKVEKGKSKKLKSVKELLGITIMERSSFEKNPIDFLEAKGYKEVKKDLIIKLPKYSLFELENGRKRMLASAGELQKGNELALPSKYVNFLYLASHYEKLKGSPEDNEQKQLFVEQHKHYLDEIIEQISEFSKRVILADANLDKVLSAYNKHRDKPIREQAENIIHLFTLTNLGAPAAFKYFDTTIDRKRYTSTKEVLDATLIHQSITGLYETRIDLSQLGGDGGGGSGSSEAAAKGGTLNIEDEHRLHETSKEPDVSLGSTWLSDFPQAWAETGGMGLAVRQAPLIIPLKATSTPVSIKQYPMSQEARLGIKPHIQRLLDQGILVPCQSPWNTPLLPVKKPGTNDYRPVQDLREVNKRVEDIHPTVPNPYNLLSGLPPSHQWYTVLDLKDAFFCLRLHPTSQPLFAFEWRDPEMGISGQLTWTRLPQGFKNSPTLFNEALHRDLADFRIQHPDLILLQYVDDLLLAATSELDCQQGTRALLQTLGNLGYRASAKKAQICQKQVKYLGYLLKEGQRWLTEARKETVMGQPTPKTPRQLREFLGKAGFCRLFIPGFAEMAAPLYPLTKPGTLFNWGPDQQKAYQEIKQALLTAPALGLPDLTKPFELFVDEKQGYAKGVLTQKLGPWRRPVAYLSKKLDPVAAGWPPCLRMVAAIAVLTKDAGKLTMGQPLVILAPHAVEALVKQPPDRWLSNARMTHYQALLLDTDRVQFGPVVALNPATLLPLPEEGLQHNCLDILAEAHGTRPDLTDQPLPDADHTWYTDGSSLLQEGQRKAGAAVTTETEVIWAKALPAGTSAQRAELIALTQALKMAEGKKLNVYTDSRYAFATAHIHGEIYRRRGWLTSEGKEIKNKDEILALLKALFLPKRLSIIHCPGHQKGHSAEARGNRMADQAARKAAITETPDTSTLLAGKRTADGSEFEKRTADGSEFESPKKKAKVE

SEQ ID NO: 2843 - protein, 2096 aa, synthetic construct
MPAAKRVKLDGGDKKYSIGLDIGTNSVGWAVITDEYKVPSKKFKVLGNTDRHSIKKNLIGALLFDSGETAEATRLKRTARRRYTRRKNRICYLQEIFSNEMAKVDDSFFHRLEESFLVEEDKKHERHPIFGNIVDEVAYHEKYPTIYHLRKKLVDSTDKADLRLIYLALAHMIKFRGHFLIEGDLNPDNSDVDKLFIQLVQTYNQLFEENPINASGVDAKAILSARLSKSRRLENLIAQLPGEKKNGLFGNLIALSLGLTPNFKSNFDLAEDAKLQLSKDTYDDDLDNLLAQIGDQYADLFLAAKNLSDAILLSDILRVNTEITKAPLSASMIKRYDEHHQDLTLLKALVRQQLPEKYKEIFFDQSKNGYAGYIDGGASQEEFYKFIKPILEKMDGTEELLVKLNREDLLRKQRTFDNGSIPHQIHLGELHAILRRQEDFYPFLKDNREKIEKILTFRIPYYVGPLARGNSRFAWMTRKSEETITPWNFEEVVDKGASAQSFIERMTNFDKNLPNEKVLPKHSLLYEYFTVYNELTKVKYVTEGMRKPAFLSGEQKKAIVDLLFKTNRKVTVKQLKEDYFKKIECFDSVEISGVEDRFNASLGTYHDLLKIIKDKDFLDNEENEDILEDIVLTLTLFEDREMIEERLKTYAHLFDDKVMKQLKRRRYTGWGRLSRKLINGIRDKQSGKTILDFLKSDGFANRNFMQLIHDDSLTFKEDIQKAQVSGQGDSLHEHIANLAGSPAIKKGILQTVKVVDELVKVMGRHKPENIVIEMARENQTTQKGQKNSRERMKRIEEGIKELGSQILKEHPVENTQLQNEKLYLYYLQNGRDMYVDQELDINRLSDYDVDHIVPQSFLKDDSIDNKVLTRSDKARGKSDNVPSEEVVKKMKNYWRQLLNAKLITQRKFDNLTKAERGGLSELDKAGFIKRQLVETRQITKHVAQILDSRMNTKYDENDKLIREVKVITLKSKLVSDFRKDFQFYKVREINNYHHAHDAYLNAVVGTALIKKYPKLESEFVYGDYKVYDVRKMIAKSEQEIGKATAKYFFYSNIMNFFKTEITLANGEIRKRPLIETNGETGEIVWDKGRDFATVRKVLSMPQVNIVKKTEVQTGGFSKESILPKRNSDKLIARKKDWDPKKYGGFDSPTVAYSVLVVAKVEKGKSKKLKSVKELLGITIMERSSFEKNPIDFLEAKGYKEVKKDLIIKLPKYSLFELENGRKRMLASAGELQKGNELALPSKYVNFLYLASHYEKLKGSPEDNEQKQLFVEQHKHYLDEIIEQISEFSKRVILADANLDKVLSAYNKHRDKPIREQAENIIHLFTLTNLGAPAAFKYFDTTIDRKRYTSTKEVLDATLIHQSITGLYETRIDLSQLGGDGGEAAAKGGGPAPGGTLNIEDEHRLHETSKEPDVSLGSTWLSDFPQAWAETGGMGLAVRQAPLIIPLKATSTPVSIKQYPMSQEARLGIKPHIQRLLDQGILVPCQSPWNTPLLPVKKPGTNDYRPVQDLREVNKRVEDIHPTVPNPYNLLSGLPPSHQWYTVLDLKDAFFCLRLHPTSQPLFAFEWRDPEMGISGQLTWTRLPQGFKNSPTLFNEALHRDLADFRIQHPDLILLQYVDDLLLAATSELDCQQGTRALLQTLGNLGYRASAKKAQICQKQVKYLGYLLKEGQRWLTEARKETVMGQPTPKTPRQLREFLGKAGFCRLFIPGFAEMAAPLYPLTKPGTLFNWGPDQQKAYQEIKQALLTAPALGLPDLTKPFELFVDEKQGYAKGVLTQKLGPWRRPVAYLSKKLDPVAAGWPPCLRMVAAIAVLTKDAGKLTMGQPLVILAPHAVEALVKQPPDRWLSNARMTHYQALLLDTDRVQFGPVVALNPATLLPLPEEGLQHNCLDILAEAHGTRPDLTDQPLPDADHTWYTDGSSLLQEGQRKAGAAVTTETEVIWAKALPAGTSAQRAELIALTQALKMAEGKKLNVYTDSRYAFATAHIHGEIYRRRGWLTSEGKEIKNKDEILALLKALFLPKRLSIIHCPGHQKGHSAEARGNRMADQAARKAAITETPDTSTLLAGKRTADGSEFEKRTADGSEFESPKKKAKVE

SEQ ID NO: 2844 - protein, 2105 aa, synthetic construct
MPAAKRVKLDGGDKKYSIGLDIGTNSVGWAVITDEYKVPSKKFKVLGNTDRHSIKKNLIGALLFDSGETAEATRLKRTARRRYTRRKNRICYLQEIFSNEMAKVDDSFFHRLEESFLVEEDKKHERHPIFGNIVDEVAYHEKYPTIYHLRKKLVDSTDKADLRLIYLALAHMIKFRGHFLIEGDLNPDNSDVDKLFIQLVQTYNQLFEENPINASGVDAKAILSARLSKSRRLENLIAQLPGEKKNGLFGNLIALSLGLTPNFKSNFDLAEDAKLQLSKDTYDDDLDNLLAQIGDQYADLFLAAKNLSDAILLSDILRVNTEITKAPLSASMIKRYDEHHQDLTLLKALVRQQLPEKYKEIFFDQSKNGYAGYIDGGASQEEFYKFIKPILEKMDGTEELLVKLNREDLLRKQRTFDNGSIPHQIHLGELHAILRRQEDFYPFLKDNREKIEKILTFRIPYYVGPLARGNSRFAWMTRKSEETITPWNFEEVVDKGASAQSFIERMTNFDKNLPNEKVLPKHSLLYEYFTVYNELTKVKYVTEGMRKPAFLSGEQKKAIVDLLFKTNRKVTVKQLKEDYFKKIECFDSVEISGVEDRFNASLGTYHDLLKIIKDKDFLDNEENEDILEDIVLTLTLFEDREMIEERLKTYAHLFDDKVMKQLKRRRYTGWGRLSRKLINGIRDKQSGKTILDFLKSDGFANRNFMQLIHDDSLTFKEDIQKAQVSGQGDSLHEHIANLAGSPAIKKGILQTVKVVDELVKVMGRHKPENIVIEMARENQTTQKGQKNSRERMKRIEEGIKELGSQILKEHPVENTQLQNEKLYLYYLQNGRDMYVDQELDINRLSDYDVDHIVPQSFLKDDSIDNKVLTRSDKARGKSDNVPSEEVVKKMKNYWRQLLNAKLITQRKFDNLTKAERGGLSELDKAGFIKRQLVETRQITKHVAQILDSRMNTKYDENDKLIREVKVITLKSKLVSDFRKDFQFYKVREINNYHHAHDAYLNAVVGTALIKKYPKLESEFVYGDYKVYDVRKMIAKSEQEIGKATAKYFFYSNIMNFFKTEITLANGEIRKRPLIETNGETGEIVWDKGRDFATVRKVLSMPQVNIVKKTEVQTGGFSKESILPKRNSDKLIARKKDWDPKKYGGFDSPTVAYSVLVVAKVEKGKSKKLKSVKELLGITIMERSSFEKNPIDFLEAKGYKEVKKDLIIKLPKYSLFELENGRKRMLASAGELQKGNELALPSKYVNFLYLASHYEKLKGSPEDNEQKQLFVEQHKHYLDEIIEQISEFSKRVILADANLDKVLSAYNKHRDKPIREQAENIIHLFTLTNLGAPAAFKYFDTTIDRKRYTSTKEVLDATLIHQSITGLYETRIDLSQLGGDGGEAAAKEAAAKEAAAKEAAAKGGTLNIEDEHRLHETSKEPDVSLGSTWLSDFPQAWAETGGMGLAVRQAPLIIPLKATSTPVSIKQYPMSQEARLGIKPHIQRLLDQGILVPCQSPWNTPLLPVKKPGTNDYRPVQDLREVNKRVEDIHPTVPNPYNLLSGLPPSHQWYTVLDLKDAFFCLRLHPTSQPLFAFEWRDPEMGISGQLTWTRLPQGFKNSPTLFNEALHRDLADFRIQHPDLILLQYVDDLLLAATSELDCQQGTRALLQTLGNLGYRASAKKAQICQKQVKYLGYLLKEGQRWLTEARKETVMGQPTPKTPRQLREFLGKAGFCRLFIPGFAEMAAPLYPLTKPGTLFNWGPDQQKAYQEIKQALLTAPALGLPDLTKPFELFVDEKQGYAKGVLTQKLGPWRRPVAYLSKKLDPVAAGWPPCLRMVAAIAVLTKDAGKLTMGQPLVILAPHAVEALVKQPPDRWLSNARMTHYQALLLDTDRVQFGPVVALNPATLLPLPEEGLQHNCLDILAEAHGTRPDLTDQPLPDADHTWYTDGSSLLQEGQRKAGAAVTTETEVIWAKALPAGTSAQRAELIALTQALKMAEGKKLNVYTDSRYAFATAHIHGEIYRRRGWLTSEGKEIKNKDEILALLKALFLPKRLSIIHCPGHQKGHSAEARGNRMADQAARKAAITETPDTSTLLAGKRTADGSEFEKRTADGSEFESPKKKAKVE

SEQ ID NO: 2845 - protein, 2095 aa, synthetic construct
MPAAKRVKLDGGDKKYSIGLDIGTNSVGWAVITDEYKVPSKKFKVLGNTDRHSIKKNLIGALLFDSGETAEATRLKRTARRRYTRRKNRICYLQEIFSNEMAKVDDSFFHRLEESFLVEEDKKHERHPIFGNIVDEVAYHEKYPTIYHLRKKLVDSTDKADLRLIYLALAHMIKFRGHFLIEGDLNPDNSDVDKLFIQLVQTYNQLFEENPINASGVDAKAILSARLSKSRRLENLIAQLPGEKKNGLFGNLIALSLGLTPNFKSNFDLAEDAKLQLSKDTYDDDLDNLLAQIGDQYADLFLAAKNLSDAILLSDILRVNTEITKAPLSASMIKRYDEHHQDLTLLKALVRQQLPEKYKEIFFDQSKNGYAGYIDGGASQEEFYKFIKPILEKMDGTEELLVKLNREDLLRKQRTFDNGSIPHQIHLGELHAILRRQEDFYPFLKDNREKIEKILTFRIPYYVGPLARGNSRFAWMTRKSEETITPWNFEEVVDKGASAQSFIERMTNFDKNLPNEKVLPKHSLLYEYFTVYNELTKVKYVTEGMRKPAFLSGEQKKAIVDLLFKTNRKVTVKQLKEDYFKKIECFDSVEISGVEDRFNASLGTYHDLLKIIKDKDFLDNEENEDILEDIVLTLTLFEDREMIEERLKTYAHLFDDKVMKQLKRRRYTGWGRLSRKLINGIRDKQSGKTILDFLKSDGFANRNFMQLIHDDSLTFKEDIQKAQVSGQGDSLHEHIANLAGSPAIKKGILQTVKVVDELVKVMGRHKPENIVIEMARENQTTQKGQKNSRERMKRIEEGIKELGSQILKEHPVENTQLQNEKLYLYYLQNGRDMYVDQELDINRLSDYDVDHIVPQSFLKDDSIDNKVLTRSDKARGKSDNVPSEEVVKKMKNYWRQLLNAKLITQRKFDNLTKAERGGLSELDKAGFIKRQLVETRQITKHVAQILDSRMNTKYDENDKLIREVKVITLKSKLVSDFRKDFQFYKVREINNYHHAHDAYLNAVVGTALIKKYPKLESEFVYGDYKVYDVRKMIAKSEQEIGKATAKYFFYSNIMNFFKTEITLANGEIRKRPLIETNGETGEIVWDKGRDFATVRKVLSMPQVNIVKKTEVQTGGFSKESILPKRNSDKLIARKKDWDPKKYGGFDSPTVAYSVLVVAKVEKGKSKKLKSVKELLGITIMERSSFEKNPIDFLEAKGYKEVKKDLIIKLPKYSLFELENGRKRMLASAGELQKGNELALPSKYVNFLYLASHYEKLKGSPEDNEQKQLFVEQHKHYLDEIIEQISEFSKRVILADANLDKVLSAYNKHRDKPIREQAENIIHLFTLTNLGAPAAFKYFDTTIDRKRYTSTKEVLDATLIHQSITGLYETRIDLSQLGGDGGEAAAKEAAAKGGTLNIEDEHRLHETSKEPDVSLGSTWLSDFPQAWAETGGMGLAVRQAPLIIPLKATSTPVSIKQYPMSQEARLGIKPHIQRLLDQGILVPCQSPWNTPLLPVKKPGTNDYRPVQDLREVNKRVEDIHPTVPNPYNLLSGLPPSHQWYTVLDLKDAFFCLRLHPTSQPLFAFEWRDPEMGISGQLTWTRLPQGFKNSPTLFNEALHRDLADFRIQHPDLILLQYVDDLLLAATSELDCQQGTRALLQTLGNLGYRASAKKAQICQKQVKYLGYLLKEGQRWLTEARKETVMGQPTPKTPRQLREFLGKAGFCRLFIPGFAEMAAPLYPLTKPGTLFNWGPDQQKAYQEIKQALLTAPALGLPDLTKPFELFVDEKQGYAKGVLTQKLGPWRRPVAYLSKKLDPVAAGWPPCLRMVAAIAVLTKDAGKLTMGQPLVILAPHAVEALVKQPPDRWLSNARMTHYQALLLDTDRVQFGPVVALNPATLLPLPEEGLQHNCLDILAEAHGTRPDLTDQPLPDADHTWYTDGSSLLQEGQRKAGAAVTTETEVIWAKALPAGTSAQRAELIALTQALKMAEGKKLNVYTDSRYAFATAHIHGEIYRRRGWLTSEGKEIKNKDEILALLKALFLPKRLSIIHCPGHQKGHSAEARGNRMADQAARKAAITETPDTSTLLAGKRTADGSEFEKRTADGSEFESPKKKAKVE

SEQ ID NO: 2846 - protein, 2094 aa, synthetic construct
MPAAKRVKLDGGDKKYSIGLDIGTNSVGWAVITDEYKVPSKKFKVLGNTDRHSIKKNLIGALLFDSGETAEATRLKRTARRRYTRRKNRICYLQEIFSNEMAKVDDSFFHRLEESFLVEEDKKHERHPIFGNIVDEVAYHEKYPTIYHLRKKLVDSTDKADLRLIYLALAHMIKFRGHFLIEGDLNPDNSDVDKLFIQLVQTYNQLFEENPINASGVDAKAILSARLSKSRRLENLIAQLPGEKKNGLFGNLIALSLGLTPNFKSNFDLAEDAKLQLSKDTYDDDLDNLLAQIGDQYADLFLAAKNLSDAILLSDILRVNTEITKAPLSASMIKRYDEHHQDLTLLKALVRQQLPEKYKEIFFDQSKNGYAGYIDGGASQEEFYKFIKPILEKMDGTEELLVKLNREDLLRKQRTFDNGSIPHQIHLGELHAILRRQEDFYPFLKDNREKIEKILTFRIPYYVGPLARGNSRFAWMTRKSEETITPWNFEEVVDKGASAQSFIERMTNFDKNLPNEKVLPKHSLLYEYFTVYNELTKVKYVTEGMRKPAFLSGEQKKAIVDLLFKTNRKVTVKQLKEDYFKKIECFDSVEISGVEDRFNASLGTYHDLLKIIKDKDFLDNEENEDILEDIVLTLTLFEDREMIEERLKTYAHLFDDKVMKQLKRRRYTGWGRLSRKLINGIRDKQSGKTILDFLKSDGFANRNFMQLIHDDSLTFKEDIQKAQVSGQGDSLHEHIANLAGSPAIKKGILQTVKVVDELVKVMGRHKPENIVIEMARENQTTQKGQKNSRERMKRIEEGIKELGSQILKEHPVENTQLQNEKLYLYYLQNGRDMYVDQELDINRLSDYDVDHIVPQSFLKDDSIDNKVLTRSDKARGKSDNVPSEEVVKKMKNYWRQLLNAKLITQRKFDNLTKAERGGLSELDKAGFIKRQLVETRQITKHVAQILDSRMNTKYDENDKLIREVKVITLKSKLVSDFRKDFQFYKVREINNYHHAHDAYLNAVVGTALIKKYPKLESEFVYGDYKVYDVRKMIAKSEQEIGKATAKYFFYSNIMNFFKTEITLANGEIRKRPLIETNGETGEIVWDKGRDFATVRKVLSMPQVNIVKKTEVQTGGFSKESILPKRNSDKLIARKKDWDPKKYGGFDSPTVAYSVLVVAKVEKGKSKKLKSVKELLGITIMERSSFEKNPIDFLEAKGYKEVKKDLIIKLPKYSLFELENGRKRMLASAGELQKGNELALPSKYVNFLYLASHYEKLKGSPEDNEQKQLFVEQHKHYLDEIIEQISEFSKRVILADANLDKVLSAYNKHRDKPIREQAENIIHLFTLTNLGAPAAFKYFDTTIDRKRYTSTKEVLDATLIHQSITGLYETRIDLSQLGGDGGGGGGGSGSSGGTLNIEDEHRLHETSKEPDVSLGSTWLSDFPQAWAETGGMGLAVRQAPLIIPLKATSTPVSIKQYPMSQEARLGIKPHIQRLLDQGILVPCQSPWNTPLLPVKKPGTNDYRPVQDLREVNKRVEDIHPTVPNPYNLLSGLPPSHQWYTVLDLKDAFFCLRLHPTSQPLFAFEWRDPEMGISGQLTWTRLPQGFKNSPTLFNEALHRDLADFRIQHPDLILLQYVDDLLLAATSELDCQQGTRALLQTLGNLGYRASAKKAQICQKQVKYLGYLLKEGQRWLTEARKETVMGQPTPKTPRQLREFLGKAGFCRLFIPGFAEMAAPLYPLTKPGTLFNWGPDQQKAYQEIKQALLTAPALGLPDLTKPFELFVDEKQGYAKGVLTQKLGPWRRPVAYLSKKLDPVAAGWPPCLRMVAAIAVLTKDAGKLTMGQPLVILAPHAVEALVKQPPDRWLSNARMTHYQALLLDTDRVQFGPVVALNPATLLPLPEEGLQHNCLDILAEAHGTRPDLTDQPLPDADHTWYTDGSSLLQEGQRKAGAAVTTETEVIWAKALPAGTSAQRAELIALTQALKMAEGKKLNVYTDSRYAFATAHIHGEIYRRRGWLTSEGKEIKNKDEILALLKALFLPKRLSIIHCPGHQKGHSAEARGNRMADQAARKAAITETPDTSTLLAGKRTADGSEFEKRTADGSEFESPKKKAKVE

SEQ ID NO: 2847 - protein, 2094 aa, synthetic construct
MPAAKRVKLDGGDKKYSIGLDIGTNSVGWAVITDEYKVPSKKFKVLGNTDRHSIKKNLIGALLFDSGETAEATRLKRTARRRYTRRKNRICYLQEIFSNEMAKVDDSFFHRLEESFLVEEDKKHERHPIFGNIVDEVAYHEKYPTIYHLRKKLVDSTDKADLRLIYLALAHMIKFRGHFLIEGDLNPDNSDVDKLFIQLVQTYNQLFEENPINASGVDAKAILSARLSKSRRLENLIAQLPGEKKNGLFGNLIALSLGLTPNFKSNFDLAEDAKLQLSKDTYDDDLDNLLAQIGDQYADLFLAAKNLSDAILLSDILRVNTEITKAPLSASMIKRYDEHHQDLTLLKALVRQQLPEKYKEIFFDQSKNGYAGYIDGGASQEEFYKFIKPILEKMDGTEELLVKLNREDLLRKQRTFDNGSIPHQIHLGELHAILRRQEDFYPFLKDNREKIEKILTFRIPYYVGPLARGNSRFAWMTRKSEETITPWNFEEVVDKGASAQSFIERMTNFDKNLPNEKVLPKHSLLYEYFTVYNELTKVKYVTEGMRKPAFLSGEQKKAIVDLLFKTNRKVTVKQLKEDYFKKIECFDSVEISGVEDRFNASLGTYHDLLKIIKDKDFLDNEENEDILEDIVLTLTLFEDREMIEERLKTYAHLFDDKVMKQLKRRRYTGWGRLSRKLINGIRDKQSGKTILDFLKSDGFANRNFMQLIHDDSLTFKEDIQKAQVSGQGDSLHEHIANLAGSPAIKKGILQTVKVVDELVKVMGRHKPENIVIEMARENQTTQKGQKNSRERMKRIEEGIKELGSQILKEHPVENTQLQNEKLYLYYLQNGRDMYVDQELDINRLSDYDVDHIVPQSFLKDDSIDNKVLTRSDKARGKSDNVPSEEVVKKMKNYWRQLLNAKLITQRKFDNLTKAERGGLSELDKAGFIKRQLVETRQITKHVAQILDSRMNTKYDENDKLIREVKVITLKSKLVSDFRKDFQFYKVREINNYHHAHDAYLNAVVGTALIKKYPKLESEFVYGDYKVYDVRKMIAKSEQEIGKATAKYFFYSNIMNFFKTEITLANGEIRKRPLIETNGETGEIVWDKGRDFATVRKVLSMPQVNIVKKTEVQTGGFSKESILPKRNSDKLIARKKDWDPKKYGGFDSPTVAYSVLVVAKVEKGKSKKLKSVKELLGITIMERSSFEKNPIDFLEAKGYKEVKKDLIIKLPKYSLFELENGRKRMLASAGELQKGNELALPSKYVNFLYLASHYEKLKGSPEDNEQKQLFVEQHKHYLDEIIEQISEFSKRVILADANLDKVLSAYNKHRDKPIREQAENIIHLFTLTNLGAPAAFKYFDTTIDRKRYTSTKEVLDATLIHQSITGLYETRIDLSQLGGDGGPAPGSSGGGGGTLNIEDEHRLHETSKEPDVSLGSTWLSDFPQAWAETGGMGLAVRQAPLIIPLKATSTPVSIKQYPMSQEARLGIKPHIQRLLDQGILVPCQSPWNTPLLPVKKPGTNDYRPVQDLREVNKRVEDIHPTVPNPYNLLSGLPPSHQWYTVLDLKDAFFCLRLHPTSQPLFAFEWRDPEMGISGQLTWTRLPQGFKNSPTLFNEALHRDLADFRIQHPDLILLQYVDDLLLAATSELDCQQGTRALLQTLGNLGYRASAKKAQICQKQVKYLGYLLKEGQRWLTEARKETVMGQPTPKTPRQLREFLGKAGFCRLFIPGFAEMAAPLYPLTKPGTLFNWGPDQQKAYQEIKQALLTAPALGLPDLTKPFELFVDEKQGYAKGVLTQKLGPWRRPVAYLSKKLDPVAAGWPPCLRMVAAIAVLTKDAGKLTMGQPLVILAPHAVEALVKQPPDRWLSNARMTHYQALLLDTDRVQFGPVVALNPATLLPLPEEGLQHNCLDILAEAHGTRPDLTDQPLPDADHTWYTDGSSLLQEGQRKAGAAVTTETEVIWAKALPAGTSAQRAELIALTQALKMAEGKKLNVYTDSRYAFATAHIHGEIYRRRGWLTSEGKEIKNKDEILALLKALFLPKRLSIIHCPGHQKGHSAEARGNRMADQAARKAAITETPDTSTLLAGKRTADGSEFEKRTADGSEFESPKKKAKVE

SEQ ID NO: 2848 - protein, 2094 aa, synthetic construct
MPAAKRVKLDGGDKKYSIGLDIGTNSVGWAVITDEYKVPSKKFKVLGNTDRHSIKKNLIGALLFDSGETAEATRLKRTARRRYTRRKNRICYLQEIFSNEMAKVDDSFFHRLEESFLVEEDKKHERHPIFGNIVDEVAYHEKYPTIYHLRKKLVDSTDKADLRLIYLALAHMIKFRGHFLIEGDLNPDNSDVDKLFIQLVQTYNQLFEENPINASGVDAKAILSARLSKSRRLENLIAQLPGEKKNGLFGNLIALSLGLTPNFKSNFDLAEDAKLQLSKDTYDDDLDNLLAQIGDQYADLFLAAKNLSDAILLSDILRVNTEITKAPLSASMIKRYDEHHQDLTLLKALVRQQLPEKYKEIFFDQSKNGYAGYIDGGASQEEFYKFIKPILEKMDGTEELLVKLNREDLLRKQRTFDNGSIPHQIHLGELHAILRRQEDFYPFLKDNREKIEKILTFRIPYYVGPLARGNSRFAWMTRKSEETITPWNFEEVVDKGASAQSFIERMTNFDKNLPNEKVLPKHSLLYEYFTVYNELTKVKYVTEGMRKPAFLSGEQKKAIVDLLFKTNRKVTVKQLKEDYFKKIECFDSVEISGVEDRFNASLGTYHDLLKIIKDKDFLDNEENEDILEDIVLTLTLFEDREMIEERLKTYAHLFDDKVMKQLKRRRYTGWGRLSRKLINGIRDKQSGKTILDFLKSDGFANRNFMQLIHDDSLTFKEDIQKAQVSGQGDSLHEHIANLAGSPAIKKGILQTVKVVDELVKVMGRHKPENIVIEMARENQTTQKGQKNSRERMKRIEEGIKELGSQILKEHPVENTQLQNEKLYLYYLQNGRDMYVDQELDINRLSDYDVDHIVPQSFLKDDSIDNKVLTRSDKARGKSDNVPSEEVVKKMKNYWRQLLNAKLITQRKFDNLTKAERGGLSELDKAGFIKRQLVETRQITKHVAQILDSRMNTKYDENDKLIREVKVITLKSKLVSDFRKDFQFYKVREINNYHHAHDAYLNAVVGTALIKKYPKLESEFVYGDYKVYDVRKMIAKSEQEIGKATAKYFFYSNIMNFFKTEITLANGEIRKRPLIETNGETGEIVWDKGRDFATVRKVLSMPQVNIVKKTEVQTGGFSKESILPKRNSDKLIARKKDWDPKKYGGFDSPTVAYSVLVVAKVEKGKSKKLKSVKELLGITIMERSSFEKNPIDFLEAKGYKEVKKDLIIKLPKYSLFELENGRKRMLASAGELQKGNELALPSKYVNFLYLASHYEKLKGSPEDNEQKQLFVEQHKHYLDEIIEQISEFSKRVILADANLDKVLSAYNKHRDKPIREQAENIIHLFTLTNLGAPAAFKYFDTTIDRKRYTSTKEVLDATLIHQSITGLYETRIDLSQLGGDGGGGGGSSPAPGGTLNIEDEHRLHETSKEPDVSLGSTWLSDFPQAWAETGGMGLAVRQAPLIIPLKATSTPVSIKQYPMSQEARLGIKPHIQRLLDQGILVPCQSPWNTPLLPVKKPGTNDYRPVQDLREVNKRVEDIHPTVPNPYNLLSGLPPSHQWYTVLDLKDAFFCLRLHPTSQPLFAFEWRDPEMGISGQLTWTRLPQGFKNSPTLFNEALHRDLADFRIQHPDLILLQYVDDLLLAATSELDCQQGTRALLQTLGNLGYRASAKKAQICQKQVKYLGYLLKEGQRWLTEARKETVMGQPTPKTPRQLREFLGKAGFCRLFIPGFAEMAAPLYPLTKPGTLFNWGPDQQKAYQEIKQALLTAPALGLPDLTKPFELFVDEKQGYAKGVLTQKLGPWRRPVAYLSKKLDPVAAGWPPCLRMVAAIAVLTKDAGKLTMGQPLVILAPHAVEALVKQPPDRWLSNARMTHYQALLLDTDRVQFGPVVALNPATLLPLPEEGLQHNCLDILAEAHGTRPDLTDQPLPDADHTWYTDGSSLLQEGQRKAGAAVTTETEVIWAKALPAGTSAQRAELIALTQALKMAEGKKLNVYTDSRYAFATAHIHGEIYRRRGWLTSEGKEIKNKDEILALLKALFLPKRLSIIHCPGHQKGHSAEARGNRMADQAARKAAITETPDTSTLLAGKRTADGSEFEKRTADGSEFESPKKKAKVE

SEQ ID NO: 2849 - protein, 2093 aa, synthetic construct
MPAAKRVKLDGGDKKYSIGLDIGTNSVGWAVITDEYKVPSKKFKVLGNTDRHSIKKNLIGALLFDSGETAEATRLKRTARRRYTRRKNRICYLQEIFSNEMAKVDDSFFHRLEESFLVEEDKKHERHPIFGNIVDEVAYHEKYPTIYHLRKKLVDSTDKADLRLIYLALAHMIKFRGHFLIEGDLNPDNSDVDKLFIQLVQTYNQLFEENPINASGVDAKAILSARLSKSRRLENLIAQLPGEKKNGLFGNLIALSLGLTPNFKSNFDLAEDAKLQLSKDTYDDDLDNLLAQIGDQYADLFLAAKNLSDAILLSDILRVNTEITKAPLSASMIKRYDEHHQDLTLLKALVRQQLPEKYKEIFFDQSKNGYAGYIDGGASQEEFYKFIKPILEKMDGTEELLVKLNREDLLRKQRTFDNGSIPHQIHLGELHAILRRQEDFYPFLKDNREKIEKILTFRIPYYVGPLARGNSRFAWMTRKSEETITPWNFEEVVDKGASAQSFIERMTNFDKNLPNEKVLPKHSLLYEYFTVYNELTKVKYVTEGMRKPAFLSGEQKKAIVDLLFKTNRKVTVKQLKEDYFKKIECFDSVEISGVEDRFNASLGTYHDLLKIIKDKDFLDNEENEDILEDIVLTLTLFEDREMIEERLKTYAHLFDDKVMKQLKRRRYTGWGRLSRKLINGIRDKQSGKTILDFLKSDGFANRNFMQLIHDDSLTFKEDIQKAQVSGQGDSLHEHIANLAGSPAIKKGILQTVKVVDELVKVMGRHKPENIVIEMARENQTTQKGQKNSRERMKRIEEGIKELGSQILKEHPVENTQLQNEKLYLYYLQNGRDMYVDQELDINRLSDYDVDHIVPQSFLKDDSIDNKVLTRSDKARGKSDNVPSEEVVKKMKNYWRQLLNAKLITQRKFDNLTKAERGGLSELDKAGFIKRQLVETRQITKHVAQILDSRMNTKYDENDKLIREVKVITLKSKLVSDFRKDFQFYKVREINNYHHAHDAYLNAVVGTALIKKYPKLESEFVYGDYKVYDVRKMIAKSEQEIGKATAKYFFYSNIMNFFKTEITLANGEIRKRPLIETNGETGEIVWDKGRDFATVRKVLSMPQVNIVKKTEVQTGGFSKESILPKRNSDKLIARKKDWDPKKYGGFDSPTVAYSVLVVAKVEKGKSKKLKSVKELLGITIMERSSFEKNPIDFLEAKGYKEVKKDLIIKLPKYSLFELENGRKRMLASAGELQKGNELALPSKYVNFLYLASHYEKLKGSPEDNEQKQLFVEQHKHYLDEIIEQISEFSKRVILADANLDKVLSAYNKHRDKPIREQAENIIHLFTLTNLGAPAAFKYFDTTIDRKRYTSTKEVLDATLIHQSITGLYETRIDLSQLGGDGGGGSEAAAKGGTLNIEDEHRLHETSKEPDVSLGSTWLSDFPQAWAETGGMGLAVRQAPLIIPLKATSTPVSIKQYPMSQEARLGIKPHIQRLLDQGILVPCQSPWNTPLLPVKKPGTNDYRPVQDLREVNKRVEDIHPTVPNPYNLLSGLPPSHQWYTVLDLKDAFFCLRLHPTSQPLFAFEWRDPEMGISGQLTWTRLPQGFKNSPTLFNEALHRDLADFRIQHPDLILLQYVDDLLLAATSELDCQQGTRALLQTLGNLGYRASAKKAQICQKQVKYLGYLLKEGQRWLTEARKETVMGQPTPKTPRQLREFLGKAGFCRLFIPGFAEMAAPLYPLTKPGTLFNWGPDQQKAYQEIKQALLTAPALGLPDLTKPFELFVDEKQGYAKGVLTQKLGPWRRPVAYLSKKLDPVAAGWPPCLRMVAAIAVLTKDAGKLTMGQPLVILAPHAVEALVKQPPDRWLSNARMTHYQALLLDTDRVQFGPVVALNPATLLPLPEEGLQHNCLDILAEAHGTRPDLTDQPLPDADHTWYTDGSSLLQEGQRKAGAAVTTETEVIWAKALPAGTSAQRAELIALTQALKMAEGKKLNVYTDSRYAFATAHIHGEIYRRRGWLTSEGKEIKNKDEILALLKALFLPKRLSIIHCPGHQKGHSAEARGNRMADQAARKAAITETPDTSTLLAGKRTADGSEFEKRTADGSEFESPKKKAKVE

SEQ ID NO: 2850 - protein, 2093 aa, synthetic construct
MPAAKRVKLDGGDKKYSIGLDIGTNSVGWAVITDEYKVPSKKFKVLGNTDRHSIKKNLIGALLFDSGETAEATRLKRTARRRYTRRKNRICYLQEIFSNEMAKVDDSFFHRLEESFLVEEDKKHERHPIFGNIVDEVAYHEKYPTIYHLRKKLVDSTDKADLRLIYLALAHMIKFRGHFLIEGDLNPDNSDVDKLFIQLVQTYNQLFEENPINASGVDAKAILSARLSKSRRLENLIAQLPGEKKNGLFGNLIALSLGLTPNFKSNFDLAEDAKLQLSKDTYDDDLDNLLAQIGDQYADLFLAAKNLSDAILLSDILRVNTEITKAPLSASMIKRYDEHHQDLTLLKALVRQQLPEKYKEIFFDQSKNGYAGYIDGGASQEEFYKFIKPILEKMDGTEELLVKLNREDLLRKQRTFDNGSIPHQIHLGELHAILRRQEDFYPFLKDNREKIEKILTFRIPYYVGPLARGNSRFAWMTRKSEETITPWNFEEVVDKGASAQSFIERMTNFDKNLPNEKVLPKHSLLYEYFTVYNELTKVKYVTEGMRKPAFLSGEQKKAIVDLLFKTNRKVTVKQLKEDYFKKIECFDSVEISGVEDRFNASLGTYHDLLKIIKDKDFLDNEENEDILEDIVLTLTLFEDREMIEERLKTYAHLFDDKVMKQLKRRRYTGWGRLSRKLINGIRDKQSGKTILDFLKSDGFANRNFMQLIHDDSLTFKEDIQKAQVSGQGDSLHEHIANLAGSPAIKKGILQTVKVVDELVKVMGRHKPENIVIEMARENQTTQKGQKNSRERMKRIEEGIKELGSQILKEHPVENTQLQNEKLYLYYLQNGRDMYVDQELDINRLSDYDVDHIVPQSFLKDDSIDNKVLTRSDKARGKSDNVPSEEVVKKMKNYWRQLLNAKLITQRKFDNLTKAERGGLSELDKAGFIKRQLVETRQITKHVAQILDSRMNTKYDENDKLIREVKVITLKSKLVSDFRKDFQFYKVREINNYHHAHDAYLNAVVGTALIKKYPKLESEFVYGDYKVYDVRKMIAKSEQEIGKATAKYFFYSNIMNFFKTEITLANGEIRKRPLIETNGETGEIVWDKGRDFATVRKVLSMPQVNIVKKTEVQTGGFSKESILPKRNSDKLIARKKDWDPKKYGGFDSPTVAYSVLVVAKVEKGKSKKLKSVKELLGITIMERSSFEKNPIDFLEAKGYKEVKKDLIIKLPKYSLFELENGRKRMLASAGELQKGNELALPSKYVNFLYLASHYEKLKGSPEDNEQKQLFVEQHKHYLDEIIEQISEFSKRVILADANLDKVLSAYNKHRDKPIREQAENIIHLFTLTNLGAPAAFKYFDTTIDRKRYTSTKEVLDATLIHQSITGLYETRIDLSQLGGDGGEAAAKPAPGGTLNIEDEHRLHETSKEPDVSLGSTWLSDFPQAWAETGGMGLAVRQAPLIIPLKATSTPVSIKQYPMSQEARLGIKPHIQRLLDQGILVPCQSPWNTPLLPVKKPGTNDYRPVQDLREVNKRVEDIHPTVPNPYNLLSGLPPSHQWYTVLDLKDAFFCLRLHPTSQPLFAFEWRDPEMGISGQLTWTRLPQGFKNSPTLFNEALHRDLADFRIQHPDLILLQYVDDLLLAATSELDCQQGTRALLQTLGNLGYRASAKKAQICQKQVKYLGYLLKEGQRWLTEARKETVMGQPTPKTPRQLREFLGKAGFCRLFIPGFAEMAAPLYPLTKPGTLFNWGPDQQKAYQEIKQALLTAPALGLPDLTKPFELFVDEKQGYAKGVLTQKLGPWRRPVAYLSKKLDPVAAGWPPCLRMVAAIAVLTKDAGKLTMGQPLVILAPHAVEALVKQPPDRWLSNARMTHYQALLLDTDRVQFGPVVALNPATLLPLPEEGLQHNCLDILAEAHGTRPDLTDQPLPDADHTWYTDGSSLLQEGQRKAGAAVTTETEVIWAKALPAGTSAQRAELIALTQALKMAEGKKLNVYTDSRYAFATAHIHGEIYRRRGWLTSEGKEIKNKDEILALLKALFLPKRLSIIHCPGHQKGHSAEARGNRMADQAARKAAITETPDTSTLLAGKRTADGSEFEKRTADGSEFESPKKKAKVE

SEQ ID NO: 2851 - protein, 2096 aa, synthetic construct
MPAAKRVKLDGGDKKYSIGLDIGTNSVGWAVITDEYKVPSKKFKVLGNTDRHSIKKNLIGALLFDSGETAEATRLKRTARRRYTRRKNRICYLQEIFSNEMAKVDDSFFHRLEESFLVEEDKKHERHPIFGNIVDEVAYHEKYPTIYHLRKKLVDSTDKADLRLIYLALAHMIKFRGHFLIEGDLNPDNSDVDKLFIQLVQTYNQLFEENPINASGVDAKAILSARLSKSRRLENLIAQLPGEKKNGLFGNLIALSLGLTPNFKSNFDLAEDAKLQLSKDTYDDDLDNLLAQIGDQYADLFLAAKNLSDAILLSDILRVNTEITKAPLSASMIKRYDEHHQDLTLLKALVRQQLPEKYKEIFFDQSKNGYAGYIDGGASQEEFYKFIKPILEKMDGTEELLVKLNREDLLRKQRTFDNGSIPHQIHLGELHAILRRQEDFYPFLKDNREKIEKILTFRIPYYVGPLARGNSRFAWMTRKSEETITPWNFEEVVDKGASAQSFIERMTNFDKNLPNEKVLPKHSLLYEYFTVYNELTKVKYVTEGMRKPAFLSGEQKKAIVDLLFKTNRKVTVKQLKEDYFKKIECFDSVEISGVEDRFNASLGTYHDLLKIIKDKDFLDNEENEDILEDIVLTLTLFEDREMIEERLKTYAHLFDDKVMKQLKRRRYTGWGRLSRKLINGIRDKQSGKTILDFLKSDGFANRNFMQLIHDDSLTFKEDIQKAQVSGQGDSLHEHIANLAGSPAIKKGILQTVKVVDELVKVMGRHKPENIVIEMARENQTTQKGQKNSRERMKRIEEGIKELGSQILKEHPVENTQLQNEKLYLYYLQNGRDMYVDQELDINRLSDYDVDHIVPQSFLKDDSIDNKVLTRSDKARGKSDNVPSEEVVKKMKNYWRQLLNAKLITQRKFDNLTKAERGGLSELDKAGFIKRQLVETRQITKHVAQILDSRMNTKYDENDKLIREVKVITLKSKLVSDFRKDFQFYKVREINNYHHAHDAYLNAVVGTALIKKYPKLESEFVYGDYKVYDVRKMIAKSEQEIGKATAKYFFYSNIMNFFKTEITLANGEIRKRPLIETNGETGEIVWDKGRDFATVRKVLSMPQVNIVKKTEVQTGGFSKESILPKRNSDKLIARKKDWDPKKYGGFDSPTVAYSVLVVAKVEKGKSKKLKSVKELLGITIMERSSFEKNPIDFLEAKGYKEVKKDLIIKLPKYSLFELENGRKRMLASAGELQKGNELALPSKYVNFLYLASHYEKLKGSPEDNEQKQLFVEQHKHYLDEIIEQISEFSKRVILADANLDKVLSAYNKHRDKPIREQAENIIHLFTLTNLGAPAAFKYFDTTIDRKRYTSTKEVLDATLIHQSITGLYETRIDLSQLGGDGGPAPAPAPAPAPGGTLNIEDEHRLHETSKEPDVSLGSTWLSDFPQAWAETGGMGLAVRQAPLIIPLKATSTPVSIKQYPMSQEARLGIKPHIQRLLDQGILVPCQSPWNTPLLPVKKPGTNDYRPVQDLREVNKRVEDIHPTVPNPYNLLSGLPPSHQWYTVLDLKDAFFCLRLHPTSQPLFAFEWRDPEMGISGQLTWTRLPQGFKNSPTLFNEALHRDLADFRIQHPDLILLQYVDDLLLAATSELDCQQGTRALLQTLGNLGYRASAKKAQICQKQVKYLGYLLKEGQRWLTEARKETVMGQPTPKTPRQLREFLGKAGFCRLFIPGFAEMAAPLYPLTKPGTLFNWGPDQQKAYQEIKQALLTAPALGLPDLTKPFELFVDEKQGYAKGVLTQKLGPWRRPVAYLSKKLDPVAAGWPPCLRMVAAIAVLTKDAGKLTMGQPLVILAPHAVEALVKQPPDRWLSNARMTHYQALLLDTDRVQFGPVVALNPATLLPLPEEGLQHNCLDILAEAHGTRPDLTDQPLPDADHTWYTDGSSLLQEGQRKAGAAVTTETEVIWAKALPAGTSAQRAELIALTQALKMAEGKKLNVYTDSRYAFATAHIHGEIYRRRGWLTSEGKEIKNKDEILALLKALFLPKRLSIIHCPGHQKGHSAEARGNRMADQAARKAAITETPDTSTLLAGKRTADGSEFEKRTADGSEFESPKKKAKVE

SEQ ID NO: 2852 - protein, 2094 aa, synthetic construct
MPAAKRVKLDGGDKKYSIGLDIGTNSVGWAVITDEYKVPSKKFKVLGNTDRHSIKKNLIGALLFDSGETAEATRLKRTARRRYTRRKNRICYLQEIFSNEMAKVDDSFFHRLEESFLVEEDKKHERHPIFGNIVDEVAYHEKYPTIYHLRKKLVDSTDKADLRLIYLALAHMIKFRGHFLIEGDLNPDNSDVDKLFIQLVQTYNQLFEENPINASGVDAKAILSARLSKSRRLENLIAQLPGEKKNGLFGNLIALSLGLTPNFKSNFDLAEDAKLQLSKDTYDDDLDNLLAQIGDQYADLFLAAKNLSDAILLSDILRVNTEITKAPLSASMIKRYDEHHQDLTLLKALVRQQLPEKYKEIFFDQSKNGYAGYIDGGASQEEFYKFIKPILEKMDGTEELLVKLNREDLLRKQRTFDNGSIPHQIHLGELHAILRRQEDFYPFLKDNREKIEKILTFRIPYYVGPLARGNSRFAWMTRKSEETITPWNFEEVVDKGASAQSFIERMTNFDKNLPNEKVLPKHSLLYEYFTVYNELTKVKYVTEGMRKPAFLSGEQKKAIVDLLFKTNRKVTVKQLKEDYFKKIECFDSVEISGVEDRFNASLGTYHDLLKIIKDKDFLDNEENEDILEDIVLTLTLFEDREMIEERLKTYAHLFDDKVMKQLKRRRYTGWGRLSRKLINGIRDKQSGKTILDFLKSDGFANRNFMQLIHDDSLTFKEDIQKAQVSGQGDSLHEHIANLAGSPAIKKGILQTVKVVDELVKVMGRHKPENIVIEMARENQTTQKGQKNSRERMKRIEEGIKELGSQILKEHPVENTQLQNEKLYLYYLQNGRDMYVDQELDINRLSDYDVDHIVPQSFLKDDSIDNKVLTRSDKARGKSDNVPSEEVVKKMKNYWRQLLNAKLITQRKFDNLTKAERGGLSELDKAGFIKRQLVETRQITKHVAQILDSRMNTKYDENDKLIREVKVITLKSKLVSDFRKDFQFYKVREINNYHHAHDAYLNAVVGTALIKKYPKLESEFVYGDYKVYDVRKMIAKSEQEIGKATAKYFFYSNIMNFFKTEITLANGEIRKRPLIETNGETGEIVWDKGRDFATVRKVLSMPQVNIVKKTEVQTGGFSKESILPKRNSDKLIARKKDWDPKKYGGFDSPTVAYSVLVVAKVEKGKSKKLKSVKELLGITIMERSSFEKNPIDFLEAKGYKEVKKDLIIKLPKYSLFELENGRKRMLASAGELQKGNELALPSKYVNFLYLASHYEKLKGSPEDNEQKQLFVEQHKHYLDEIIEQISEFSKRVILADANLDKVLSAYNKHRDKPIREQAENIIHLFTLTNLGAPAAFKYFDTTIDRKRYTSTKEVLDATLIHQSITGLYETRIDLSQLGGDGGGGSPAPGSSGGTLNIEDEHRLHETSKEPDVSLGSTWLSDFPQAWAETGGMGLAVRQAPLIIPLKATSTPVSIKQYPMSQEARLGIKPHIQRLLDQGILVPCQSPWNTPLLPVKKPGTNDYRPVQDLREVNKRVEDIHPTVPNPYNLLSGLPPSHQWYTVLDLKDAFFCLRLHPTSQPLFAFEWRDPEMGISGQLTWTRLPQGFKNSPTLFNEALHRDLADFRIQHPDLILLQYVDDLLLAATSELDCQQGTRALLQTLGNLGYRASAKKAQICQKQVKYLGYLLKEGQRWLTEARKETVMGQPTPKTPRQLREFLGKAGFCRLFIPGFAEMAAPLYPLTKPGTLFNWGPDQQKAYQEIKQALLTAPALGLPDLTKPFELFVDEKQGYAKGVLTQKLGPWRRPVAYLSKKLDPVAAGWPPCLRMVAAIAVLTKDAGKLTMGQPLVILAPHAVEALVKQPPDRWLSNARMTHYQALLLDTDRVQFGPVVALNPATLLPLPEEGLQHNCLDILAEAHGTRPDLTDQPLPDADHTWYTDGSSLLQEGQRKAGAAVTTETEVIWAKALPAGTSAQRAELIALTQALKMAEGKKLNVYTDSRYAFATAHIHGEIYRRRGWLTSEGKEIKNKDEILALLKALFLPKRLSIIHCPGHQKGHSAEARGNRMADQAARKAAITETPDTSTLLAGKRTADGSEFEKRTADGSEFESPKKKAKVE

SEQ ID NO: 2853 - protein, 2091 aa, synthetic construct
MPAAKRVKLDGGDKKYSIGLDIGTNSVGWAVITDEYKVPSKKFKVLGNTDRHSIKKNLIGALLFDSGETAEATRLKRTARRRYTRRKNRICYLQEIFSNEMAKVDDSFFHRLEESFLVEEDKKHERHPIFGNIVDEVAYHEKYPTIYHLRKKLVDSTDKADLRLIYLALAHMIKFRGHFLIEGDLNPDNSDVDKLFIQLVQTYNQLFEENPINASGVDAKAILSARLSKSRRLENLIAQLPGEKKNGLFGNLIALSLGLTPNFKSNFDLAEDAKLQLSKDTYDDDLDNLLAQIGDQYADLFLAAKNLSDAILLSDILRVNTEITKAPLSASMIKRYDEHHQDLTLLKALVRQQLPEKYKEIFFDQSKNGYAGYIDGGASQEEFYKFIKPILEKMDGTEELLVKLNREDLLRKQRTFDNGSIPHQIHLGELHAILRRQEDFYPFLKDNREKIEKILTFRIPYYVGPLARGNSRFAWMTRKSEETITPWNFEEVVDKGASAQSFIERMTNFDKNLPNEKVLPKHSLLYEYFTVYNELTKVKYVTEGMRKPAFLSGEQKKAIVDLLFKTNRKVTVKQLKEDYFKKIECFDSVEISGVEDRFNASLGTYHDLLKIIKDKDFLDNEENEDILEDIVLTLTLFEDREMIEERLKTYAHLFDDKVMKQLKRRRYTGWGRLSRKLINGIRDKQSGKTILDFLKSDGFANRNFMQLIHDDSLTFKEDIQKAQVSGQGDSLHEHIANLAGSPAIKKGILQTVKVVDELVKVMGRHKPENIVIEMARENQTTQKGQKNSRERMKRIEEGIKELGSQILKEHPVENTQLQNEKLYLYYLQNGRDMYVDQELDINRLSDYDVDHIVPQSFLKDDSIDNKVLTRSDKARGKSDNVPSEEVVKKMKNYWRQLLNAKLITQRKFDNLTKAERGGLSELDKAGFIKRQLVETRQITKHVAQILDSRMNTKYDENDKLIREVKVITLKSKLVSDFRKDFQFYKVREINNYHHAHDAYLNAVVGTALIKKYPKLESEFVYGDYKVYDVRKMIAKSEQEIGKATAKYFFYSNIMNFFKTEITLANGEIRKRPLIETNGETGEIVWDKGRDFATVRKVLSMPQVNIVKKTEVQTGGFSKESILPKRNSDKLIARKKDWDPKKYGGFDSPTVAYSVLVVAKVEKGKSKKLKSVKELLGITIMERSSFEKNPIDFLEAKGYKEVKKDLIIKLPKYSLFELENGRKRMLASAGELQKGNELALPSKYVNFLYLASHYEKLKGSPEDNEQKQLFVEQHKHYLDEIIEQISEFSKRVILADANLDKVLSAYNKHRDKPIREQAENIIHLFTLTNLGAPAAFKYFDTTIDRKRYTSTKEVLDATLIHQSITGLYETRIDLSQLGGDGGGGSGGSGGTLNIEDEHRLHETSKEPDVSLGSTWLSDFPQAWAETGGMGLAVRQAPLIIPLKATSTPVSIKQYPMSQEARLGIKPHIQRLLDQGILVPCQSPWNTPLLPVKKPGTNDYRPVQDLREVNKRVEDIHPTVPNPYNLLSGLPPSHQWYTVLDLKDAFFCLRLHPTSQPLFAFEWRDPEMGISGQLTWTRLPQGFKNSPTLFNEALHRDLADFRIQHPDLILLQYVDDLLLAATSELDCQQGTRALLQTLGNLGYRASAKKAQICQKQVKYLGYLLKEGQRWLTEARKETVMGQPTPKTPRQLREFLGKAGFCRLFIPGFAEMAAPLYPLTKPGTLFNWGPDQQKAYQEIKQALLTAPALGLPDLTKPFELFVDEKQGYAKGVLTQKLGPWRRPVAYLSKKLDPVAAGWPPCLRMVAAIAVLTKDAGKLTMGQPLVILAPHAVEALVKQPPDRWLSNARMTHYQALLLDTDRVQFGPVVALNPATLLPLPEEGLQHNCLDILAEAHGTRPDLTDQPLPDADHTWYTDGSSLLQEGQRKAGAAVTTETEVIWAKALPAGTSAQRAELIALTQALKMAEGKKLNVYTDSRYAFATAHIHGEIYRRRGWLTSEGKEIKNKDEILALLKALFLPKRLSIIHCPGHQKGHSAEARGNRMADQAARKAAITETPDTSTLLAGKRTADGSEFEKRTADGSEFESPKKKAKVE

SEQ ID NO: 2854 - protein, 2094 aa, synthetic construct
MPAAKRVKLDGGDKKYSIGLDIGTNSVGWAVITDEYKVPSKKFKVLGNTDRHSIKKNLIGALLFDSGETAEATRLKRTARRRYTRRKNRICYLQEIFSNEMAKVDDSFFHRLEESFLVEEDKKHERHPIFGNIVDEVAYHEKYPTIYHLRKKLVDSTDKADLRLIYLALAHMIKFRGHFLIEGDLNPDNSDVDKLFIQLVQTYNQLFEENPINASGVDAKAILSARLSKSRRLENLIAQLPGEKKNGLFGNLIALSLGLTPNFKSNFDLAEDAKLQLSKDTYDDDLDNLLAQIGDQYADLFLAAKNLSDAILLSDILRVNTEITKAPLSASMIKRYDEHHQDLTLLKALVRQQLPEKYKEIFFDQSKNGYAGYIDGGASQEEFYKFIKPILEKMDGTEELLVKLNREDLLRKQRTFDNGSIPHQIHLGELHAILRRQEDFYPFLKDNREKIEKILTFRIPYYVGPLARGNSRFAWMTRKSEETITPWNFEEVVDKGASAQSFIERMTNFDKNLPNEKVLPKHSLLYEYFTVYNELTKVKYVTEGMRKPAFLSGEQKKAIVDLLFKTNRKVTVKQLKEDYFKKIECFDSVEISGVEDRFNASLGTYHDLLKIIKDKDFLDNEENEDILEDIVLTLTLFEDREMIEERLKTYAHLFDDKVMKQLKRRRYTGWGRLSRKLINGIRDKQSGKTILDFLKSDGFANRNFMQLIHDDSLTFKEDIQKAQVSGQGDSLHEHIANLAGSPAIKKGILQTVKVVDELVKVMGRHKPENIVIEMARENQTTQKGQKNSRERMKRIEEGIKELGSQILKEHPVENTQLQNEKLYLYYLQNGRDMYVDQELDINRLSDYDVDHIVPQSFLKDDSIDNKVLTRSDKARGKSDNVPSEEVVKKMKNYWRQLLNAKLITQRKFDNLTKAERGGLSELDKAGFIKRQLVETRQITKHVAQILDSRMNTKYDENDKLIREVKVITLKSKLVSDFRKDFQFYKVREINNYHHAHDAYLNAVVGTALIKKYPKLESEFVYGDYKVYDVRKMIAKSEQEIGKATAKYFFYSNIMNFFKTEITLANGEIRKRPLIETNGETGEIVWDKGRDFATVRKVLSMPQVNIVKKTEVQTGGFSKESILPKRNSDKLIARKKDWDPKKYGGFDSPTVAYSVLVVAKVEKGKSKKLKSVKELLGITIMERSSFEKNPIDFLEAKGYKEVKKDLIIKLPKYSLFELENGRKRMLASAGELQKGNELALPSKYVNFLYLASHYEKLKGSPEDNEQKQLFVEQHKHYLDEIIEQISEFSKRVILADANLDKVLSAYNKHRDKPIREQAENIIHLFTLTNLGAPAAFKYFDTTIDRKRYTSTKEVLDATLIHQSITGLYETRIDLSQLGGDGGGGGGSSGGSGGTLNIEDEHRLHETSKEPDVSLGSTWLSDFPQAWAETGGMGLAVRQAPLIIPLKATSTPVSIKQYPMSQEARLGIKPHIQRLLDQGILVPCQSPWNTPLLPVKKPGTNDYRPVQDLREVNKRVEDIHPTVPNPYNLLSGLPPSHQWYTVLDLKDAFFCLRLHPTSQPLFAFEWRDPEMGISGQLTWTRLPQGFKNSPTLFNEALHRDLADFRIQHPDLILLQYVDDLLLAATSELDCQQGTRALLQTLGNLGYRASAKKAQICQKQVKYLGYLLKEGQRWLTEARKETVMGQPTPKTPRQLREFLGKAGFCRLFIPGFAEMAAPLYPLTKPGTLFNWGPDQQKAYQEIKQALLTAPALGLPDLTKPFELFVDEKQGYAKGVLTQKLGPWRRPVAYLSKKLDPVAAGWPPCLRMVAAIAVLTKDAGKLTMGQPLVILAPHAVEALVKQPPDRWLSNARMTHYQALLLDTDRVQFGPVVALNPATLLPLPEEGLQHNCLDILAEAHGTRPDLTDQPLPDADHTWYTDGSSLLQEGQRKAGAAVTTETEVIWAKALPAGTSAQRAELIALTQALKMAEGKKLNVYTDSRYAFATAHIHGEIYRRRGWLTSEGKEIKNKDEILALLKALFLPKRLSIIHCPGHQKGHSAEARGNRMADQAARKAAITETPDTSTLLAGKRTADGSEFEKRTADGSEFESPKKKAKVE

SEQ ID NO: 2855 - protein, 2091 aa, synthetic construct
MPAAKRVKLDGGDKKYSIGLDIGTNSVGWAVITDEYKVPSKKFKVLGNTDRHSIKKNLIGALLFDSGETAEATRLKRTARRRYTRRKNRICYLQEIFSNEMAKVDDSFFHRLEESFLVEEDKKHERHPIFGNIVDEVAYHEKYPTIYHLRKKLVDSTDKADLRLIYLALAHMIKFRGHFLIEGDLNPDNSDVDKLFIQLVQTYNQLFEENPINASGVDAKAILSARLSKSRRLENLIAQLPGEKKNGLFGNLIALSLGLTPNFKSNFDLAEDAKLQLSKDTYDDDLDNLLAQIGDQYADLFLAAKNLSDAILLSDILRVNTEITKAPLSASMIKRYDEHHQDLTLLKALVRQQLPEKYKEIFFDQSKNGYAGYIDGGASQEEFYKFIKPILEKMDGTEELLVKLNREDLLRKQRTFDNGSIPHQIHLGELHAILRRQEDFYPFLKDNREKIEKILTFRIPYYVGPLARGNSRFAWMTRKSEETITPWNFEEVVDKGASAQSFIERMTNFDKNLPNEKVLPKHSLLYEYFTVYNELTKVKYVTEGMRKPAFLSGEQKKAIVDLLFKTNRKVTVKQLKEDYFKKIECFDSVEISGVEDRFNASLGTYHDLLKIIKDKDFLDNEENEDILEDIVLTLTLFEDREMIEERLKTYAHLFDDKVMKQLKRRRYTGWGRLSRKLINGIRDKQSGKTILDFLKSDGFANRNFMQLIHDDSLTFKEDIQKAQVSGQGDSLHEHIANLAGSPAIKKGILQTVKVVDELVKVMGRHKPENIVIEMARENQTTQKGQKNSRERMKRIEEGIKELGSQILKEHPVENTQLQNEKLYLYYLQNGRDMYVDQELDINRLSDYDVDHIVPQSFLKDDSIDNKVLTRSDKARGKSDNVPSEEVVKKMKNYWRQLLNAKLITQRKFDNLTKAERGGLSELDKAGFIKRQLVETRQITKHVAQILDSRMNTKYDENDKLIREVKVITLKSKLVSDFRKDFQFYKVREINNYHHAHDAYLNAVVGTALIKKYPKLESEFVYGDYKVYDVRKMIAKSEQEIGKATAKYFFYSNIMNFFKTEITLANGEIRKRPLIETNGETGEIVWDKGRDFATVRKVLSMPQVNIVKKTEVQTGGFSKESILPKRNSDKLIARKKDWDPKKYGGFDSPTVAYSVLVVAKVEKGKSKKLKSVKELLGITIMERSSFEKNPIDFLEAKGYKEVKKDLIIKLPKYSLFELENGRKRMLASAGELQKGNELALPSKYVNFLYLASHYEKLKGSPEDNEQKQLFVEQHKHYLDEIIEQISEFSKRVILADANLDKVLSAYNKHRDKPIREQAENIIHLFTLTNLGAPAAFKYFDTTIDRKRYTSTKEVLDATLIHQSITGLYETRIDLSQLGGDGGGSSGGSGGTLNIEDEHRLHETSKEPDVSLGSTWLSDFPQAWAETGGMGLAVRQAPLIIPLKATSTPVSIKQYPMSQEARLGIKPHIQRLLDQGILVPCQSPWNTPLLPVKKPGTNDYRPVQDLREVNKRVEDIHPTVPNPYNLLSGLPPSHQWYTVLDLKDAFFCLRLHPTSQPLFAFEWRDPEMGISGQLTWTRLPQGFKNSPTLFNEALHRDLADFRIQHPDLILLQYVDDLLLAATSELDCQQGTRALLQTLGNLGYRASAKKAQICQKQVKYLGYLLKEGQRWLTEARKETVMGQPTPKTPRQLREFLGKAGFCRLFIPGFAEMAAPLYPLTKPGTLFNWGPDQQKAYQEIKQALLTAPALGLPDLTKPFELFVDEKQGYAKGVLTQKLGPWRRPVAYLSKKLDPVAAGWPPCLRMVAAIAVLTKDAGKLTMGQPLVILAPHAVEALVKQPPDRWLSNARMTHYQALLLDTDRVQFGPVVALNPATLLPLPEEGLQHNCLDILAEAHGTRPDLTDQPLPDADHTWYTDGSSLLQEGQRKAGAAVTTETEVIWAKALPAGTSAQRAELIALTQALKMAEGKKLNVYTDSRYAFATAHIHGEIYRRRGWLTSEGKEIKNKDEILALLKALFLPKRLSIIHCPGHQKGHSAEARGNRMADQAARKAAITETPDTSTLLAGKRTADGSEFEKRTADGSEFESPKKKAKVE

SEQ ID NO: 2856 - protein, 2093 aa, synthetic construct
MPAAKRVKLDGGDKKYSIGLDIGTNSVGWAVITDEYKVPSKKFKVLGNTDRHSIKKNLIGALLFDSGETAEATRLKRTARRRYTRRKNRICYLQEIFSNEMAKVDDSFFHRLEESFLVEEDKKHERHPIFGNIVDEVAYHEKYPTIYHLRKKLVDSTDKADLRLIYLALAHMIKFRGHFLIEGDLNPDNSDVDKLFIQLVQTYNQLFEENPINASGVDAKAILSARLSKSRRLENLIAQLPGEKKNGLFGNLIALSLGLTPNFKSNFDLAEDAKLQLSKDTYDDDLDNLLAQIGDQYADLFLAAKNLSDAILLSDILRVNTEITKAPLSASMIKRYDEHHQDLTLLKALVRQQLPEKYKEIFFDQSKNGYAGYIDGGASQEEFYKFIKPILEKMDGTEELLVKLNREDLLRKQRTFDNGSIPHQIHLGELHAILRRQEDFYPFLKDNREKIEKILTFRIPYYVGPLARGNSRFAWMTRKSEETITPWNFEEVVDKGASAQSFIERMTNFDKNLPNEKVLPKHSLLYEYFTVYNELTKVKYVTEGMRKPAFLSGEQKKAIVDLLFKTNRKVTVKQLKEDYFKKIECFDSVEISGVEDRFNASLGTYHDLLKIIKDKDFLDNEENEDILEDIVLTLTLFEDREMIEERLKTYAHLFDDKVMKQLKRRRYTGWGRLSRKLINGIRDKQSGKTILDFLKSDGFANRNFMQLIHDDSLTFKEDIQKAQVSGQGDSLHEHIANLAGSPAIKKGILQTVKVVDELVKVMGRHKPENIVIEMARENQTTQKGQKNSRERMKRIEEGIKELGSQILKEHPVENTQLQNEKLYLYYLQNGRDMYVDQELDINRLSDYDVDHIVPQSFLKDDSIDNKVLTRSDKARGKSDNVPSEEVVKKMKNYWRQLLNAKLITQRKFDNLTKAERGGLSELDKAGFIKRQLVETRQITKHVAQILDSRMNTKYDENDKLIREVKVITLKSKLVSDFRKDFQFYKVREINNYHHAHDAYLNAVVGTALIKKYPKLESEFVYGDYKVYDVRKMIAKSEQEIGKATAKYFFYSNIMNFFKTEITLANGEIRKRPLIETNGETGEIVWDKGRDFATVRKVLSMPQVNIVKKTEVQTGGFSKESILPKRNSDKLIARKKDWDPKKYGGFDSPTVAYSVLVVAKVEKGKSKKLKSVKELLGITIMERSSFEKNPIDFLEAKGYKEVKKDLIIKLPKYSLFELENGRKRMLASAGELQKGNELALPSKYVNFLYLASHYEKLKGSPEDNEQKQLFVEQHKHYLDEIIEQISEFSKRVILADANLDKVLSAYNKHRDKPIREQAENIIHLFTLTNLGAPAAFKYFDTTIDRKRYTSTKEVLDATLIHQSITGLYETRIDLSQLGGDGGGGGEAAAKGGTLNIEDEHRLHETSKEPDVSLGSTWLSDFPQAWAETGGMGLAVRQAPLIIPLKATSTPVSIKQYPMSQEARLGIKPHIQRLLDQGILVPCQSPWNTPLLPVKKPGTNDYRPVQDLREVNKRVEDIHPTVPNPYNLLSGLPPSHQWYTVLDLKDAFFCLRLHPTSQPLFAFEWRDPEMGISGQLTWTRLPQGFKNSPTLFNEALHRDLADFRIQHPDLILLQYVDDLLLAATSELDCQQGTRALLQTLGNLGYRASAKKAQICQKQVKYLGYLLKEGQRWLTEARKETVMGQPTPKTPRQLREFLGKAGFCRLFIPGFAEMAAPLYPLTKPGTLFNWGPDQQKAYQEIKQALLTAPALGLPDLTKPFELFVDEKQGYAKGVLTQKLGPWRRPVAYLSKKLDPVAAGWPPCLRMVAAIAVLTKDAGKLTMGQPLVILAPHAVEALVKQPPDRWLSNARMTHYQALLLDTDRVQFGPVVALNPATLLPLPEEGLQHNCLDILAEAHGTRPDLTDQPLPDADHTWYTDGSSLLQEGQRKAGAAVTTETEVIWAKALPAGTSAQRAELIALTQALKMAEGKKLNVYTDSRYAFATAHIHGEIYRRRGWLTSEGKEIKNKDEILALLKALFLPKRLSIIHCPGHQKGHSAEARGNRMADQAARKAAITETPDTSTLLAGKRTADGSEFEKRTADGSEFESPKKKAKVE

SEQ ID NO: 2857 - protein, 2096 aa, synthetic construct
MPAAKRVKLDGGDKKYSIGLDIGTNSVGWAVITDEYKVPSKKFKVLGNTDRHSIKKNLIGALLFDSGETAEATRLKRTARRRYTRRKNRICYLQEIFSNEMAKVDDSFFHRLEESFLVEEDKKHERHPIFGNIVDEVAYHEKYPTIYHLRKKLVDSTDKADLRLIYLALAHMIKFRGHFLIEGDLNPDNSDVDKLFIQLVQTYNQLFEENPINASGVDAKAILSARLSKSRRLENLIAQLPGEKKNGLFGNLIALSLGLTPNFKSNFDLAEDAKLQLSKDTYDDDLDNLLAQIGDQYADLFLAAKNLSDAILLSDILRVNTEITKAPLSASMIKRYDEHHQDLTLLKALVRQQLPEKYKEIFFDQSKNGYAGYIDGGASQEEFYKFIKPILEKMDGTEELLVKLNREDLLRKQRTFDNGSIPHQIHLGELHAILRRQEDFYPFLKDNREKIEKILTFRIPYYVGPLARGNSRFAWMTRKSEETITPWNFEEVVDKGASAQSFIERMTNFDKNLPNEKVLPKHSLLYEYFTVYNELTKVKYVTEGMRKPAFLSGEQKKAIVDLLFKTNRKVTVKQLKEDYFKKIECFDSVEISGVEDRFNASLGTYHDLLKIIKDKDFLDNEENEDILEDIVLTLTLFEDREMIEERLKTYAHLFDDKVMKQLKRRRYTGWGRLSRKLINGIRDKQSGKTILDFLKSDGFANRNFMQLIHDDSLTFKEDIQKAQVSGQGDSLHEHIANLAGSPAIKKGILQTVKVVDELVKVMGRHKPENIVIEMARENQTTQKGQKNSRERMKRIEEGIKELGSQILKEHPVENTQLQNEKLYLYYLQNGRDMYVDQELDINRLSDYDVDHIVPQSFLKDDSIDNKVLTRSDKARGKSDNVPSEEVVKKMKNYWRQLLNAKLITQRKFDNLTKAERGGLSELDKAGFIKRQLVETRQITKHVAQILDSRMNTKYDENDKLIREVKVITLKSKLVSDFRKDFQFYKVREINNYHHAHDAYLNAVVGTALIKKYPKLESEFVYGDYKVYDVRKMIAKSEQEIGKATAKYFFYSNIMNFFKTEITLANGEIRKRPLIETNGETGEIVWDKGRDFATVRKVLSMPQVNIVKKTEVQTGGFSKESILPKRNSDKLIARKKDWDPKKYGGFDSPTVAYSVLVVAKVEKGKSKKLKSVKELLGITIMERSSFEKNPIDFLEAKGYKEVKKDLIIKLPKYSLFELENGRKRMLASAGELQKGNELALPSKYVNFLYLASHYEKLKGSPEDNEQKQLFVEQHKHYLDEIIEQISEFSKRVILADANLDKVLSAYNKHRDKPIREQAENIIHLFTLTNLGAPAAFKYFDTTIDRKRYTSTKEVLDATLIHQSITGLYETRIDLSQLGGDGGGGSEAAAKPAPGGTLNIEDEHRLHETSKEPDVSLGSTWLSDFPQAWAETGGMGLAVRQAPLIIPLKATSTPVSIKQYPMSQEARLGIKPHIQRLLDQGILVPCQSPWNTPLLPVKKPGTNDYRPVQDLREVNKRVEDIHPTVPNPYNLLSGLPPSHQWYTVLDLKDAFFCLRLHPTSQPLFAFEWRDPEMGISGQLTWTRLPQGFKNSPTLFNEALHRDLADFRIQHPDLILLQYVDDLLLAATSELDCQQGTRALLQTLGNLGYRASAKKAQICQKQVKYLGYLLKEGQRWLTEARKETVMGQPTPKTPRQLREFLGKAGFCRLFIPGFAEMAAPLYPLTKPGTLFNWGPDQQKAYQEIKQALLTAPALGLPDLTKPFELFVDEKQGYAKGVLTQKLGPWRRPVAYLSKKLDPVAAGWPPCLRMVAAIAVLTKDAGKLTMGQPLVILAPHAVEALVKQPPDRWLSNARMTHYQALLLDTDRVQFGPVVALNPATLLPLPEEGLQHNCLDILAEAHGTRPDLTDQPLPDADHTWYTDGSSLLQEGQRKAGAAVTTETEVIWAKALPAGTSAQRAELIALTQALKMAEGKKLNVYTDSRYAFATAHIHGEIYRRRGWLTSEGKEIKNKDEILALLKALFLPKRLSIIHCPGHQKGHSAEARGNRMADQAARKAAITETPDTSTLLAGKRTADGSEFEKRTADGSEFESPKKKAKVE

SEQ ID NO: 2858 - protein, 2101 aa, synthetic construct
MPAAKRVKLDGGDKKYSIGLDIGTNSVGWAVITDEYKVPSKKFKVLGNTDRHSIKKNLIGALLFDSGETAEATRLKRTARRRYTRRKNRICYLQEIFSNEMAKVDDSFFHRLEESFLVEEDKKHERHPIFGNIVDEVAYHEKYPTIYHLRKKLVDSTDKADLRLIYLALAHMIKFRGHFLIEGDLNPDNSDVDKLFIQLVQTYNQLFEENPINASGVDAKAILSARLSKSRRLENLIAQLPGEKKNGLFGNLIALSLGLTPNFKSNFDLAEDAKLQLSKDTYDDDLDNLLAQIGDQYADLFLAAKNLSDAILLSDILRVNTEITKAPLSASMIKRYDEHHQDLTLLKALVRQQLPEKYKEIFFDQSKNGYAGYIDGGASQEEFYKFIKPILEKMDGTEELLVKLNREDLLRKQRTFDNGSIPHQIHLGELHAILRRQEDFYPFLKDNREKIEKILTFRIPYYVGPLARGNSRFAWMTRKSEETITPWNFEEVVDKGASAQSFIERMTNFDKNLPNEKVLPKHSLLYEYFTVYNELTKVKYVTEGMRKPAFLSGEQKKAIVDLLFKTNRKVTVKQLKEDYFKKIECFDSVEISGVEDRFNASLGTYHDLLKIIKDKDFLDNEENEDILEDIVLTLTLFEDREMIEERLKTYAHLFDDKVMKQLKRRRYTGWGRLSRKLINGIRDKQSGKTILDFLKSDGFANRNFMQLIHDDSLTFKEDIQKAQVSGQGDSLHEHIANLAGSPAIKKGILQTVKVVDELVKVMGRHKPENIVIEMARENQTTQKGQKNSRERMKRIEEGIKELGSQILKEHPVENTQLQNEKLYLYYLQNGRDMYVDQELDINRLSDYDVDHIVPQSFLKDDSIDNKVLTRSDKARGKSDNVPSEEVVKKMKNYWRQLLNAKLITQRKFDNLTKAERGGLSELDKAGFIKRQLVETRQITKHVAQILDSRMNTKYDENDKLIREVKVITLKSKLVSDFRKDFQFYKVREINNYHHAHDAYLNAVVGTALIKKYPKLESEFVYGDYKVYDVRKMIAKSEQEIGKATAKYFFYSNIMNFFKTEITLANGEIRKRPLIETNGETGEIVWDKGRDFATVRKVLSMPQVNIVKKTEVQTGGFSKESILPKRNSDKLIARKKDWDPKKYGGFDSPTVAYSVLVVAKVEKGKSKKLKSVKELLGITIMERSSFEKNPIDFLEAKGYKEVKKDLIIKLPKYSLFELENGRKRMLASAGELQKGNELALPSKYVNFLYLASHYEKLKGSPEDNEQKQLFVEQHKHYLDEIIEQISEFSKRVILADANLDKVLSAYNKHRDKPIREQAENIIHLFTLTNLGAPAAFKYFDTTIDRKRYTSTKEVLDATLIHQSITGLYETRIDLSQLGGDGGSGSETPGTSESATPESGGTLNIEDEHRLHETSKEPDVSLGSTWLSDFPQAWAETGGMGLAVRQAPLIIPLKATSTPVSIKQYPMSQEARLGIKPHIQRLLDQGILVPCQSPWNTPLLPVKKPGTNDYRPVQDLREVNKRVEDIHPTVPNPYNLLSGLPPSHQWYTVLDLKDAFFCLRLHPTSQPLFAFEWRDPEMGISGQLTWTRLPQGFKNSPTLFNEALHRDLADFRIQHPDLILLQYVDDLLLAATSELDCQQGTRALLQTLGNLGYRASAKKAQICQKQVKYLGYLLKEGQRWLTEARKETVMGQPTPKTPRQLREFLGKAGFCRLFIPGFAEMAAPLYPLTKPGTLFNWGPDQQKAYQEIKQALLTAPALGLPDLTKPFELFVDEKQGYAKGVLTQKLGPWRRPVAYLSKKLDPVAAGWPPCLRMVAAIAVLTKDAGKLTMGQPLVILAPHAVEALVKQPPDRWLSNARMTHYQALLLDTDRVQFGPVVALNPATLLPLPEEGLQHNCLDILAEAHGTRPDLTDQPLPDADHTWYTDGSSLLQEGQRKAGAAVTTETEVIWAKALPAGTSAQRAELIALTQALKMAEGKKLNVYTDSRYAFATAHIHGEIYRRRGWLTSEGKEIKNKDEILALLKALFLPKRLSIIHCPGHQKGHSAEARGNRMADQAARKAAITETPDTSTLLAGKRTADGSEFEKRTADGSEFESPKKKAKVE

SEQ ID NO: 2859 - protein, 2094 aa, synthetic construct
MPAAKRVKLDGGDKKYSIGLDIGTNSVGWAVITDEYKVPSKKFKVLGNTDRHSIKKNLIGALLFDSGETAEATRLKRTARRRYTRRKNRICYLQEIFSNEMAKVDDSFFHRLEESFLVEEDKKHERHPIFGNIVDEVAYHEKYPTIYHLRKKLVDSTDKADLRLIYLALAHMIKFRGHFLIEGDLNPDNSDVDKLFIQLVQTYNQLFEENPINASGVDAKAILSARLSKSRRLENLIAQLPGEKKNGLFGNLIALSLGLTPNFKSNFDLAEDAKLQLSKDTYDDDLDNLLAQIGDQYADLFLAAKNLSDAILLSDILRVNTEITKAPLSASMIKRYDEHHQDLTLLKALVRQQLPEKYKEIFFDQSKNGYAGYIDGGASQEEFYKFIKPILEKMDGTEELLVKLNREDLLRKQRTFDNGSIPHQIHLGELHAILRRQEDFYPFLKDNREKIEKILTFRIPYYVGPLARGNSRFAWMTRKSEETITPWNFEEVVDKGASAQSFIERMTNFDKNLPNEKVLPKHSLLYEYFTVYNELTKVKYVTEGMRKPAFLSGEQKKAIVDLLFKTNRKVTVKQLKEDYFKKIECFDSVEISGVEDRFNASLGTYHDLLKIIKDKDFLDNEENEDILEDIVLTLTLFEDREMIEERLKTYAHLFDDKVMKQLKRRRYTGWGRLSRKLINGIRDKQSGKTILDFLKSDGFANRNFMQLIHDDSLTFKEDIQKAQVSGQGDSLHEHIANLAGSPAIKKGILQTVKVVDELVKVMGRHKPENIVIEMARENQTTQKGQKNSRERMKRIEEGIKELGSQILKEHPVENTQLQNEKLYLYYLQNGRDMYVDQELDINRLSDYDVDHIVPQSFLKDDSIDNKVLTRSDKARGKSDNVPSEEVVKKMKNYWRQLLNAKLITQRKFDNLTKAERGGLSELDKAGFIKRQLVETRQITKHVAQILDSRMNTKYDENDKLIREVKVITLKSKLVSDFRKDFQFYKVREINNYHHAHDAYLNAVVGTALIKKYPKLESEFVYGDYKVYDVRKMIAKSEQEIGKATAKYFFYSNIMNFFKTEITLANGEIRKRPLIETNGETGEIVWDKGRDFATVRKVLSMPQVNIVKKTEVQTGGFSKESILPKRNSDKLIARKKDWDPKKYGGFDSPTVAYSVLVVAKVEKGKSKKLKSVKELLGITIMERSSFEKNPIDFLEAKGYKEVKKDLIIKLPKYSLFELENGRKRMLASAGELQKGNELALPSKYVNFLYLASHYEKLKGSPEDNEQKQLFVEQHKHYLDEIIEQISEFSKRVILADANLDKVLSAYNKHRDKPIREQAENIIHLFTLTNLGAPAAFKYFDTTIDRKRYTSTKEVLDATLIHQSITGLYETRIDLSQLGGDGGGSSGGSGGGGGTLNIEDEHRLHETSKEPDVSLGSTWLSDFPQAWAETGGMGLAVRQAPLIIPLKATSTPVSIKQYPMSQEARLGIKPHIQRLLDQGILVPCQSPWNTPLLPVKKPGTNDYRPVQDLREVNKRVEDIHPTVPNPYNLLSGLPPSHQWYTVLDLKDAFFCLRLHPTSQPLFAFEWRDPEMGISGQLTWTRLPQGFKNSPTLFNEALHRDLADFRIQHPDLILLQYVDDLLLAATSELDCQQGTRALLQTLGNLGYRASAKKAQICQKQVKYLGYLLKEGQRWLTEARKETVMGQPTPKTPRQLREFLGKAGFCRLFIPGFAEMAAPLYPLTKPGTLFNWGPDQQKAYQEIKQALLTAPALGLPDLTKPFELFVDEKQGYAKGVLTQKLGPWRRPVAYLSKKLDPVAAGWPPCLRMVAAIAVLTKDAGKLTMGQPLVILAPHAVEALVKQPPDRWLSNARMTHYQALLLDTDRVQFGPVVALNPATLLPLPEEGLQHNCLDILAEAHGTRPDLTDQPLPDADHTWYTDGSSLLQEGQRKAGAAVTTETEVIWAKALPAGTSAQRAELIALTQALKMAEGKKLNVYTDSRYAFATAHIHGEIYRRRGWLTSEGKEIKNKDEILALLKALFLPKRLSIIHCPGHQKGHSAEARGNRMADQAARKAAITETPDTSTLLAGKRTADGSEFEKRTADGSEFESPKKKAKVE

SEQ ID NO: 2860 - protein, 2096 aa, synthetic construct
MPAAKRVKLDGGDKKYSIGLDIGTNSVGWAVITDEYKVPSKKFKVLGNTDRHSIKKNLIGALLFDSGETAEATRLKRTARRRYTRRKNRICYLQEIFSNEMAKVDDSFFHRLEESFLVEEDKKHERHPIFGNIVDEVAYHEKYPTIYHLRKKLVDSTDKADLRLIYLALAHMIKFRGHFLIEGDLNPDNSDVDKLFIQLVQTYNQLFEENPINASGVDAKAILSARLSKSRRLENLIAQLPGEKKNGLFGNLIALSLGLTPNFKSNFDLAEDAKLQLSKDTYDDDLDNLLAQIGDQYADLFLAAKNLSDAILLSDILRVNTEITKAPLSASMIKRYDEHHQDLTLLKALVRQQLPEKYKEIFFDQSKNGYAGYIDGGASQEEFYKFIKPILEKMDGTEELLVKLNREDLLRKQRTFDNGSIPHQIHLGELHAILRRQEDFYPFLKDNREKIEKILTFRIPYYVGPLARGNSRFAWMTRKSEETITPWNFEEVVDKGASAQSFIERMTNFDKNLPNEKVLPKHSLLYEYFTVYNELTKVKYVTEGMRKPAFLSGEQKKAIVDLLFKTNRKVTVKQLKEDYFKKIECFDSVEISGVEDRFNASLGTYHDLLKIIKDKDFLDNEENEDILEDIVLTLTLFEDREMIEERLKTYAHLFDDKVMKQLKRRRYTGWGRLSRKLINGIRDKQSGKTILDFLKSDGFANRNFMQLIHDDSLTFKEDIQKAQVSGQGDSLHEHIANLAGSPAIKKGILQTVKVVDELVKVMGRHKPENIVIEMARENQTTQKGQKNSRERMKRIEEGIKELGSQILKEHPVENTQLQNEKLYLYYLQNGRDMYVDQELDINRLSDYDVDHIVPQSFLKDDSIDNKVLTRSDKARGKSDNVPSEEVVKKMKNYWRQLLNAKLITQRKFDNLTKAERGGLSELDKAGFIKRQLVETRQITKHVAQILDSRMNTKYDENDKLIREVKVITLKSKLVSDFRKDFQFYKVREINNYHHAHDAYLNAVVGTALIKKYPKLESEFVYGDYKVYDVRKMIAKSEQEIGKATAKYFFYSNIMNFFKTEITLANGEIRKRPLIETNGETGEIVWDKGRDFATVRKVLSMPQVNIVKKTEVQTGGFSKESILPKRNSDKLIARKKDWDPKKYGGFDSPTVAYSVLVVAKVEKGKSKKLKSVKELLGITIMERSSFEKNPIDFLEAKGYKEVKKDLIIKLPKYSLFELENGRKRMLASAGELQKGNELALPSKYVNFLYLASHYEKLKGSPEDNEQKQLFVEQHKHYLDEIIEQISEFSKRVILADANLDKVLSAYNKHRDKPIREQAENIIHLFTLTNLGAPAAFKYFDTTIDRKRYTSTKEVLDATLIHQSITGLYETRIDLSQLGGDGGGSSGGSEAAAKGGTLNIEDEHRLHETSKEPDVSLGSTWLSDFPQAWAETGGMGLAVRQAPLIIPLKATSTPVSIKQYPMSQEARLGIKPHIQRLLDQGILVPCQSPWNTPLLPVKKPGTNDYRPVQDLREVNKRVEDIHPTVPNPYNLLSGLPPSHQWYTVLDLKDAFFCLRLHPTSQPLFAFEWRDPEMGISGQLTWTRLPQGFKNSPTLFNEALHRDLADFRIQHPDLILLQYVDDLLLAATSELDCQQGTRALLQTLGNLGYRASAKKAQICQKQVKYLGYLLKEGQRWLTEARKETVMGQPTPKTPRQLREFLGKAGFCRLFIPGFAEMAAPLYPLTKPGTLFNWGPDQQKAYQEIKQALLTAPALGLPDLTKPFELFVDEKQGYAKGVLTQKLGPWRRPVAYLSKKLDPVAAGWPPCLRMVAAIAVLTKDAGKLTMGQPLVILAPHAVEALVKQPPDRWLSNARMTHYQALLLDTDRVQFGPVVALNPATLLPLPEEGLQHNCLDILAEAHGTRPDLTDQPLPDADHTWYTDGSSLLQEGQRKAGAAVTTETEVIWAKALPAGTSAQRAELIALTQALKMAEGKKLNVYTDSRYAFATAHIHGEIYRRRGWLTSEGKEIKNKDEILALLKALFLPKRLSIIHCPGHQKGHSAEARGNRMADQAARKAAITETPDTSTLLAGKRTADGSEFEKRTADGSEFESPKKKAKVE

SEQ ID NO: 2861 - protein, 2091 aa, synthetic construct
MPAAKRVKLDGGDKKYSIGLDIGTNSVGWAVITDEYKVPSKKFKVLGNTDRHSIKKNLIGALLFDSGETAEATRLKRTARRRYTRRKNRICYLQEIFSNEMAKVDDSFFHRLEESFLVEEDKKHERHPIFGNIVDEVAYHEKYPTIYHLRKKLVDSTDKADLRLIYLALAHMIKFRGHFLIEGDLNPDNSDVDKLFIQLVQTYNQLFEENPINASGVDAKAILSARLSKSRRLENLIAQLPGEKKNGLFGNLIALSLGLTPNFKSNFDLAEDAKLQLSKDTYDDDLDNLLAQIGDQYADLFLAAKNLSDAILLSDILRVNTEITKAPLSASMIKRYDEHHQDLTLLKALVRQQLPEKYKEIFFDQSKNGYAGYIDGGASQEEFYKFIKPILEKMDGTEELLVKLNREDLLRKQRTFDNGSIPHQIHLGELHAILRRQEDFYPFLKDNREKIEKILTFRIPYYVGPLARGNSRFAWMTRKSEETITPWNFEEVVDKGASAQSFIERMTNFDKNLPNEKVLPKHSLLYEYFTVYNELTKVKYVTEGMRKPAFLSGEQKKAIVDLLFKTNRKVTVKQLKEDYFKKIECFDSVEISGVEDRFNASLGTYHDLLKIIKDKDFLDNEENEDILEDIVLTLTLFEDREMIEERLKTYAHLFDDKVMKQLKRRRYTGWGRLSRKLINGIRDKQSGKTILDFLKSDGFANRNFMQLIHDDSLTFKEDIQKAQVSGQGDSLHEHIANLAGSPAIKKGILQTVKVVDELVKVMGRHKPENIVIEMARENQTTQKGQKNSRERMKRIEEGIKELGSQILKEHPVENTQLQNEKLYLYYLQNGRDMYVDQELDINRLSDYDVDHIVPQSFLKDDSIDNKVLTRSDKARGKSDNVPSEEVVKKMKNYWRQLLNAKLITQRKFDNLTKAERGGLSELDKAGFIKRQLVETRQITKHVAQILDSRMNTKYDENDKLIREVKVITLKSKLVSDFRKDFQFYKVREINNYHHAHDAYLNAVVGTALIKKYPKLESEFVYGDYKVYDVRKMIAKSEQEIGKATAKYFFYSNIMNFFKTEITLANGEIRKRPLIETNGETGEIVWDKGRDFATVRKVLSMPQVNIVKKTEVQTGGFSKESILPKRNSDKLIARKKDWDPKKYGGFDSPTVAYSVLVVAKVEKGKSKKLKSVKELLGITIMERSSFEKNPIDFLEAKGYKEVKKDLIIKLPKYSLFELENGRKRMLASAGELQKGNELALPSKYVNFLYLASHYEKLKGSPEDNEQKQLFVEQHKHYLDEIIEQISEFSKRVILADANLDKVLSAYNKHRDKPIREQAENIIHLFTLTNLGAPAAFKYFDTTIDRKRYTSTKEVLDATLIHQSITGLYETRIDLSQLGGDGGGGSGGGGGTLNIEDEHRLHETSKEPDVSLGSTWLSDFPQAWAETGGMGLAVRQAPLIIPLKATSTPVSIKQYPMSQEARLGIKPHIQRLLDQGILVPCQSPWNTPLLPVKKPGTNDYRPVQDLREVNKRVEDIHPTVPNPYNLLSGLPPSHQWYTVLDLKDAFFCLRLHPTSQPLFAFEWRDPEMGISGQLTWTRLPQGFKNSPTLFNEALHRDLADFRIQHPDLILLQYVDDLLLAATSELDCQQGTRALLQTLGNLGYRASAKKAQICQKQVKYLGYLLKEGQRWLTEARKETVMGQPTPKTPRQLREFLGKAGFCRLFIPGFAEMAAPLYPLTKPGTLFNWGPDQQKAYQEIKQALLTAPALGLPDLTKPFELFVDEKQGYAKGVLTQKLGPWRRPVAYLSKKLDPVAAGWPPCLRMVAAIAVLTKDAGKLTMGQPLVILAPHAVEALVKQPPDRWLSNARMTHYQALLLDTDRVQFGPVVALNPATLLPLPEEGLQHNCLDILAEAHGTRPDLTDQPLPDADHTWYTDGSSLLQEGQRKAGAAVTTETEVIWAKALPAGTSAQRAELIALTQALKMAEGKKLNVYTDSRYAFATAHIHGEIYRRRGWLTSEGKEIKNKDEILALLKALFLPKRLSIIHCPGHQKGHSAEARGNRMADQAARKAAITETPDTSTLLAGKRTADGSEFEKRTADGSEFESPKKKAKVE

SEQ ID NO: 2862 - protein, 2116 aa, synthetic construct; identical to SEQ ID NO: 2637

SEQ ID NO: 2863 - protein, 2116 aa, synthetic construct
MPAAKRVKLDGGDKKYSIGLDIGTNSVGWAVITDEYKVPSKKFKVLGNTDRHSIKKNLIGALLFDSGETAEATRLKRTARRRYTRRKNRICYLQEIFSNEMAKVDDSFFHRLEESFLVEEDKKHERHPIFGNIVDEVAYHEKYPTIYHLRKKLVDSTDKADLRLIYLALAHMIKFRGHFLIEGDLNPDNSDVDKLFIQLVQTYNQLFEENPINASGVDAKAILSARLSKSRRLENLIAQLPGEKKNGLFGNLIALSLGLTPNFKSNFDLAEDAKLQLSKDTYDDDLDNLLAQIGDQYADLFLAAKNLSDAILLSDILRVNTEITKAPLSASMIKRYDEHHQDLTLLKALVRQQLPEKYKEIFFDQSKNGYAGYIDGGASQEEFYKFIKPILEKMDGTEELLVKLNREDLLRKQRTFDNGSIPHQIHLGELHAILRRQEDFYPFLKDNREKIEKILTFRIPYYVGPLARGNSRFAWMTRKSEETITPWNFEEVVDKGASAQSFIERMTNFDKNLPNEKVLPKHSLLYEYFTVYNELTKVKYVTEGMRKPAFLSGEQKKAIVDLLFKTNRKVTVKQLKEDYFKKIECFDSVEISGVEDRFNASLGTYHDLLKIIKDKDFLDNEENEDILEDIVLTLTLFEDREMIEERLKTYAHLFDDKVMKQLKRRRYTGWGRLSRKLINGIRDKQSGKTILDFLKSDGFANRNFMQLIHDDSLTFKEDIQKAQVSGQGDSLHEHIANLAGSPAIKKGILQTVKVVDELVKVMGRHKPENIVIEMARENQTTQKGQKNSRERMKRIEEGIKELGSQILKEHPVENTQLQNEKLYLYYLQNGRDMYVDQELDINRLSDYDVDHIVPQSFLKDDSIDNKVLTRSDKARGKSDNVPSEEVVKKMKNYWRQLLNAKLITQRKFDNLTKAERGGLSELDKAGFIKRQLVETRQITKHVAQILDSRMNTKYDENDKLIREVKVITLKSKLVSDFRKDFQFYKVREINNYHHAHDAYLNAVVGTALIKKYPKLESEFVYGDYKVYDVRKMIAKSEQEIGKATAKYFFYSNIMNFFKTEITLANGEIRKRPLIETNGETGEIVWDKGRDFATVRKVLSMPQVNIVKKTEVQTGGFSKESILPKRNSDKLIARKKDWDPKKYGGFDSPTVAYSVLVVAKVEKGKSKKLKSVKELLGITIMERSSFEKNPIDFLEAKGYKEVKKDLIIKLPKYSLFELENGRKRMLASAGELQKGNELALPSKYVNFLYLASHYEKLKGSPEDNEQKQLFVEQHKHYLDEIIEQISEFSKRVILADANLDKVLSAYNKHRDKPIREQAENIIHLFTLTNLGAPAAFKYFDTTIDRKRYTSTKEVLDATLIHQSITGLYETRIDLSQLGGDGGEAAAKGGGGGSGGTLNIEDEYRLHETSKEPDVSLGSTWLSDFPQAWAETGGMGLAVRQAPLIIPLKATSTPVSIKQYPMSQEARLGIKPHIQRLLDQGILVPCQSPWNTPLLPVKKPGTNDYRPVQDLREVNKRVEDIHPTVPNPYNLLSGLPPSHQWYTVLDLKDAFFCLRLHPTSQPLFAFEWRDPEMGISGQLTWTRLPQGFKNSPTLFNEALHRDLADFRIQHPDLILLQYVDDLLLAATSELDCQQGTRALLQTLGNLGYRASAKKAQICQKQVKYLGYLLKEGQRWLTEARKETVMGQPTPKTPRQLREFLGKAGFCRLFIPGFAEMAAPLYPLTKPGTLFNWGPDQQKAYQEIKQALLTAPALGLPDLTKPFELFVDEKQGYAKGVLTQKLGPWRRPVAYLSKKLDPVAAGWPPCLRMVAAIAVLTKDAGKLTMGQPLVILAPHAVEALVKQPPDRWLSNARMTHYQALLLDTDRVQFGPVVALNPATLLPLPEEGLQHNCLDILAEAHGTRPDLTDQPLPDADHTWYTDGSSLLQEGQRKAGAAVTTETEVIWAKALPAGTSAQRAELIALTQALKMAEGKKLNVYTDSRYAFATAHIHGEIYRRRGWLTSEGKEIKNKDEILALLKALFLPKRLSIIHCPGHQKGHSAEARGNRMADQAARKAAITETPDTSTLLIENSSPSGGSKRTADGSEFEAGKRTADGSEFEKRTADGSEFESPKKKAKVE

SEQ ID NO: 2864 - protein, 2108 aa, synthetic construct; identical to SEQ ID NO: 2655

SEQ ID NO: 2865 - protein, 2108 aa, synthetic construct; identical to SEQ ID NO: 2624

SEQ ID NO: 2866 - protein, 2116 aa, synthetic construct; identical to SEQ ID NO: 2692

SEQ ID NO: 2867 - protein, 2117 aa, synthetic construct; identical to SEQ ID NO: 2665

SEQ ID NO: 2868 - protein, 2118 aa, synthetic construct
MPAAKRVKLDGGDKKYSIGLDIGTNSVGWAVITDEYKVPSKKFKVLGNTDRHSIKKNLIGALLFDSGETAEATRLKRTARRRYTRRKNRICYLQEIFSNEMAKVDDSFFHRLEESFLVEEDKKHERHPIFGNIVDEVAYHEKYPTIYHLRKKLVDSTDKADLRLIYLALAHMIKFRGHFLIEGDLNPDNSDVDKLFIQLVQTYNQLFEENPINASGVDAKAILSARLSKSRRLENLIAQLPGEKKNGLFGNLIALSLGLTPNFKSNFDLAEDAKLQLSKDTYDDDLDNLLAQIGDQYADLFLAAKNLSDAILLSDILRVNTEITKAPLSASMIKRYDEHHQDLTLLKALVRQQLPEKYKEIFFDQSKNGYAGYIDGGASQEEFYKFIKPILEKMDGTEELLVKLNREDLLRKQRTFDNGSIPHQIHLGELHAILRRQEDFYPFLKDNREKIEKILTFRIPYYVGPLARGNSRFAWMTRKSEETITPWNFEEVVDKGASAQSFIERMTNFDKNLPNEKVLPKHSLLYEYFTVYNELTKVKYVTEGMRKPAFLSGEQKKAIVDLLFKTNRKVTVKQLKEDYFKKIECFDSVEISGVEDRFNASLGTYHDLLKIIKDKDFLDNEENEDILEDIVLTLTLFEDREMIEERLKTYAHLFDDKVMKQLKRRRYTGWGRLSRKLINGIRDKQSGKTILDFLKSDGFANRNFMQLIHDDSLTFKEDIQKAQVSGQGDSLHEHIANLAGSPAIKKGILQTVKVVDELVKVMGRHKPENIVIEMARENQTTQKGQKNSRERMKRIEEGIKELGSQILKEHPVENTQLQNEKLYLYYLQNGRDMYVDQELDINRLSDYDVDHIVPQSFLKDDSIDNKVLTRSDKARGKSDNVPSEEVVKKMKNYWRQLLNAKLITQRKFDNLTKAERGGLSELDKAGFIKRQLVETRQITKHVAQILDSRMNTKYDENDKLIREVKVITLKSKLVSDFRKDFQFYKVREINNYHHAHDAYLNAVVGTALIKKYPKLESEFVYGDYKVYDVRKMIAKSEQEIGKATAKYFFYSNIMNFFKTEITLANGEIRKRPLIETNGETGEIVWDKGRDFATVRKVLSMPQVNIVKKTEVQTGGFSKESILPKRNSDKLIARKKDWDPKKYGGFDSPTVAYSVLVVAKVEKGKSKKLKSVKELLGITIMERSSFEKNPIDFLEAKGYKEVKKDLIIKLPKYSLFELENGRKRMLASAGELQKGNELALPSKYVNFLYLASHYEKLKGSPEDNEQKQLFVEQHKHYLDEIIEQISEFSKRVILADANLDKVLSAYNKHRDKPIREQAENIIHLFTLTNLGAPAAFKYFDTTIDRKRYTSTKEVLDATLIHQSITGLYETRIDLSQLGGDGGPAPAPAPAPAPAPGGTLNIEDEYRLHETSKEPDVSLGSTWLSDFPQAWAETGGMGLAVRQAPLIIPLKATSTPVSIKQYPMSQEARLGIKPHIQRLLDQGILVPCQSPWNTPLLPVKKPGTNDYRPVQDLREVNKRVEDIHPTVPNPYNLLSGLPPSHQWYTVLDLKDAFFCLRLHPTSQPLFAFEWRDPEMGISGQLTWTRLPQGFKNSPTLFNEALHRDLADFRIQHPDLILLQYVDDLLLAATSELDCQQGTRALLQTLGNLGYRASAKKAQICQKQVKYLGYLLKEGQRWLTEARKETVMGQPTPKTPRQLREFLGKAGFCRLFIPGFAEMAAPLYPLTKPGTLFNWGPDQQKAYQEIKQALLTAPALGLPDLTKPFELFVDEKQGYAKGVLTQKLGPWRRPVAYLSKKLDPVAAGWPPCLRMVAAIAVLTKDAGKLTMGQPLVILAPHAVEALVKQPPDRWLSNARMTHYQALLLDTDRVQFGPVVALNPATLLPLPEEGLQHNCLDILAEAHGTRPDLTDQPLPDADHTWYTDGSSLLQEGQRKAGAAVTTETEVIWAKALPAGTSAQRAELIALTQALKMAEGKKLNVYTDSRYAFATAHIHGEIYRRRGWLTSEGKEIKNKDEILALLKALFLPKRLSIIHCPGHQKGHSAEARGNRMADQAARKAAITETPDTSTLLIENSSPSGGSKRTADGSEFEAGKRTADGSEFEKRTADGSEFESPKKKAKVE

SEQ ID NO: 2869 - protein, 2114 aa, synthetic construct
MPAAKRVKLDGGDKKYSIGLDIGTNSVGWAVITDEYKVPSKKFKVLGNTDRHSIKKNLIGALLFDSGETAEATRLKRTARRRYTRRKNRICYLQEIFSNEMAKVDDSFFHRLEESFLVEEDKKHERHPIFGNIVDEVAYHEKYPTIYHLRKKLVDSTDKADLRLIYLALAHMIKFRGHFLIEGDLNPDNSDVDKLFIQLVQTYNQLFEENPINASGVDAKAILSARLSKSRRLENLIAQLPGEKKNGLFGNLIALSLGLTPNFKSNFDLAEDAKLQLSKDTYDDDLDNLLAQIGDQYADLFLAAKNLSDAILLSDILRVNTEITKAPLSASMIKRYDEHHQDLTLLKALVRQQLPEKYKEIFFDQSKNGYAGYIDGGASQEEFYKFIKPILEKMDGTEELLVKLNREDLLRKQRTFDNGSIPHQIHLGELHAILRRQEDFYPFLKDNREKIEKILTFRIPYYVGPLARGNSRFAWMTRKSEETITPWNFEEVVDKGASAQSFIERMTNFDKNLPNEKVLPKHSLLYEYFTVYNELTKVKYVTEGMRKPAFLSGEQKKAIVDLLFKTNRKVTVKQLKEDYFKKIECFDSVEISGVEDRFNASLGTYHDLLKIIKDKDFLDNEENEDILEDIVLTLTLFEDREMIEERLKTYAHLFDDKVMKQLKRRRYTGWGRLSRKLINGIRDKQSGKTILDFLKSDGFANRNFMQLIHDDSLTFKEDIQKAQVSGQGDSLHEHIANLAGSPAIKKGILQTVKVVDELVKVMGRHKPENIVIEMARENQTTQKGQKNSRERMKRIEEGIKELGSQILKEHPVENTQLQNEKLYLYYLQNGRDMYVDQELDINRLSDYDVDHIVPQSFLKDDSIDNKVLTRSDKARGKSDNVPSEEVVKKMKNYWRQLLNAKLITQRKFDNLTKAERGGLSELDKAGFIKRQLVETRQITKHVAQILDSRMNTKYDENDKLIREVKVITLKSKLVSDFRKDFQFYKVREINNYHHAHDAYLNAVVGTALIKKYPKLESEFVYGDYKVYDVRKMIAKSEQEIGKATAKYFFYSNIMNFFKTEITLANGEIRKRPLIETNGETGEIVWDKGRDFATVRKVLSMPQVNIVKKTEVQTGGFSKESILPKRNSDKLIARKKDWDPKKYGGFDSPTVAYSVLVVAKVEKGKSKKLKSVKELLGITIMERSSFEKNPIDFLEAKGYKEVKKDLIIKLPKYSLFELENGRKRMLASAGELQKGNELALPSKYVNFLYLASHYEKLKGSPEDNEQKQLFVEQHKHYLDEIIEQISEFSKRVILADANLDKVLSAYNKHRDKPIREQAENIIHLFTLTNLGAPAAFKYFDTTIDRKRYTSTKEVLDATLIHQSITGLYETRIDLSQLGGDGGPAPGGGGSSGGTLNIEDEYRLHETSKEPDVSLGSTWLSDFPQAWAETGGMGLAVRQAPLIIPLKATSTPVSIKQYPMSQEARLGIKPHIQRLLDQGILVPCQSPWNTPLLPVKKPGTNDYRPVQDLREVNKRVEDIHPTVPNPYNLLSGLPPSHQWYTVLDLKDAFFCLRLHPTSQPLFAFEWRDPEMGISGQLTWTRLPQGFKNSPTLFNEALHRDLADFRIQHPDLILLQYVDDLLLAATSELDCQQGTRALLQTLGNLGYRASAKKAQICQKQVKYLGYLLKEGQRWLTEARKETVMGQPTPKTPRQLREFLGKAGFCRLFIPGFAEMAAPLYPLTKPGTLFNWGPDQQKAYQEIKQALLTAPALGLPDLTKPFELFVDEKQGYAKGVLTQKLGPWRRPVAYLSKKLDPVAAGWPPCLRMVAAIAVLTKDAGKLTMGQPLVILAPHAVEALVKQPPDRWLSNARMTHYQALLLDTDRVQFGPVVALNPATLLPLPEEGLQHNCLDILAEAHGTRPDLTDQPLPDADHTWYTDGSSLLQEGQRKAGAAVTTETEVIWAKALPAGTSAQRAELIALTQALKMAEGKKLNVYTDSRYAFATAHIHGEIYRRRGWLTSEGKEIKNKDEILALLKALFLPKRLSIIHCPGHQKGHSAEARGNRMADQAARKAAITETPDTSTLLIENSSPSGGSKRTADGSEFEAGKRTADGSEFEKRTADGSEFESPKKKAKVE

SEQ ID NO: 2870 - protein, 2116 aa, synthetic construct; identical to SEQ ID NO: 2677

SEQ ID NO: 2871 - protein, 2111 aa, synthetic construct; identical to SEQ ID NO: 2676

SEQ ID NO: 2872 - protein, 2116 aa, synthetic construct
MPAAKRVKLDGGDKKYSIGLDIGTNSVGWAVITDEYKVPSKKFKVLGNTDRHSIKKNLIGALLFDSGETAEATRLKRTARRRYTRRKNRICYLQEIFSNEMAKVDDSFFHRLEESFLVEEDKKHERHPIFGNIVDEVAYHEKYPTIYHLRKKLVDSTDKADLRLIYLALAHMIKFRGHFLIEGDLNPDNSDVDKLFIQLVQTYNQLFEENPINASGVDAKAILSARLSKSRRLENLIAQLPGEKKNGLFGNLIALSLGLTPNFKSNFDLAEDAKLQLSKDTYDDDLDNLLAQIGDQYADLFLAAKNLSDAILLSDILRVNTEITKAPLSASMIKRYDEHHQDLTLLKALVRQQLPEKYKEIFFDQSKNGYAGYIDGGASQEEFYKFIKPILEKMDGTEELLVKLNREDLLRKQRTFDNGSIPHQIHLGELHAILRRQEDFYPFLKDNREKIEKILTFRIPYYVGPLARGNSRFAWMTRKSEETITPWNFEEVVDKGASAQSFIERMTNFDKNLPNEKVLPKHSLLYEYFTVYNELTKVKYVTEGMRKPAFLSGEQKKAIVDLLFKTNRKVTVKQLKEDYFKKIECFDSVEISGVEDRFNASLGTYHDLLKIIKDKDFLDNEENEDILEDIVLTLTLFEDREMIEERLKTYAHLFDDKVMKQLKRRRYTGWGRLSRKLINGIRDKQSGKTILDFLKSDGFANRNFMQLIHDDSLTFKEDIQKAQVSGQGDSLHEHIANLAGSPAIKKGILQTVKVVDELVKVMGRHKPENIVIEMARENQTTQKGQKNSRERMKRIEEGIKELGSQILKEHPVENTQLQNEKLYLYYLQNGRDMYVDQELDINRLSDYDVDHIVPQSFLKDDSIDNKVLTRSDKARGKSDNVPSEEVVKKMKNYWRQLLNAKLITQRKFDNLTKAERGGLSELDKAGFIKRQLVETRQITKHVAQILDSRMNTKYDENDKLIREVKVITLKSKLVSDFRKDFQFYKVREINNYHHAHDAYLNAVVGTALIKKYPKLESEFVYGDYKVYDVRKMIAKSEQEIGKATAKYFFYSNIMNFFKTEITLANGEIRKRPLIETNGETGEIVWDKGRDFATVRKVLSMPQVNIVKKTEVQTGGFSKESILPKRNSDKLIARKKDWDPKKYGGFDSPTVAYSVLVVAKVEKGKSKKLKSVKELLGITIMERSSFEKNPIDFLEAKGYKEVKKDLIIKLPKYSLFELENGRKRMLASAGELQKGNELALPSKYVNFLYLASHYEKLKGSPEDNEQKQLFVEQHKHYLDEIIEQISEFSKRVILADANLDKVLSAYNKHRDKPIREQAENIIHLFTLTNLGAPAAFKYFDTTIDRKRYTSTKEVLDATLIHQSITGLYETRIDLSQLGGDGGPAPGGGEAAAKGGTLNIEDEYRLHETSKEPDVSLGSTWLSDFPQAWAETGGMGLAVRQAPLIIPLKATSTPVSIKQYPMSQEARLGIKPHIQRLLDQGILVPCQSPWNTPLLPVKKPGTNDYRPVQDLREVNKRVEDIHPTVPNPYNLLSGLPPSHQWYTVLDLKDAFFCLRLHPTSQPLFAFEWRDPEMGISGQLTWTRLPQGFKNSPTLFNEALHRDLADFRIQHPDLILLQYVDDLLLAATSELDCQQGTRALLQTLGNLGYRASAKKAQICQKQVKYLGYLLKEGQRWLTEARKETVMGQPTPKTPRQLREFLGKAGFCRLFIPGFAEMAAPLYPLTKPGTLFNWGPDQQKAYQEIKQALLTAPALGLPDLTKPFELFVDEKQGYAKGVLTQKLGPWRRPVAYLSKKLDPVAAGWPPCLRMVAAIAVLTKDAGKLTMGQPLVILAPHAVEALVKQPPDRWLSNARMTHYQALLLDTDRVQFGPVVALNPATLLPLPEEGLQHNCLDILAEAHGTRPDLTDQPLPDADHTWYTDGSSLLQEGQRKAGAAVTTETEVIWAKALPAGTSAQRAELIALTQALKMAEGKKLNVYTDSRYAFATAHIHGEIYRRRGWLTSEGKEIKNKDEILALLKALFLPKRLSIIHCPGHQKGHSAEARGNRMADQAARKAAITETPDTSTLLIENSSPSGGSKRTADGSEFEAGKRTADGSEFEKRTADGSEFESPKKKAKVE

SEQ ID NO: 2873 - protein, 2116 aa, synthetic construct; identical to SEQ ID NO: 2651

SEQ ID NO: 2874 - protein, 2116 aa, synthetic construct; identical to SEQ ID NO: 2638

SEQ ID NO: 2875 - protein, 2114 aa, synthetic construct; identical to SEQ ID NO: 2685

SEQ ID NO: 2876 - protein, 2114 aa, synthetic construct; identical to SEQ ID NO: 2698

SEQ ID NO: 2877 - protein, 2120 aa, synthetic construct; identical to SEQ ID NO: 2627

SEQ ID NO: 2878 - protein, 2114 aa, synthetic construct; identical to SEQ ID NO: 2649

SEQ ID NO: 2879 - protein, 2116 aa, synthetic construct
MPAAKRVKLDGGDKKYSIGLDIGTNSVGWAVITDEYKVPSKKFKVLGNTDRHSIKKNLIGALLFDSGETAEATRLKRTARRRYTRRKNRICYLQEIFSNEMAKVDDSFFHRLEESFLVEEDKKHERHPIFGNIVDEVAYHEKYPTIYHLRKKLVDSTDKADLRLIYLALAHMIKFRGHFLIEGDLNPDNSDVDKLFIQLVQTYNQLFEENPINASGVDAKAILSARLSKSRRLENLIAQLPGEKKNGLFGNLIALSLGLTPNFKSNFDLAEDAKLQLSKDTYDDDLDNLLAQIGDQYADLFLAAKNLSDAILLSDILRVNTEITKAPLSASMIKRYDEHHQDLTLLKALVRQQLPEKYKEIFFDQSKNGYAGYIDGGASQEEFYKFIKPILEKMDGTEELLVKLNREDLLRKQRTFDNGSIPHQIHLGELHAILRRQEDFYPFLKDNREKIEKILTFRIPYYVGPLARGNSRFAWMTRKSEETITPWNFEEVVDKGASAQSFIERMTNFDKNLPNEKVLPKHSLLYEYFTVYNELTKVKYVTEGMRKPAFLSGEQKKAIVDLLFKTNRKVTVKQLKEDYFKKIECFDSVEISGVEDRFNASLGTYHDLLKIIKDKDFLDNEENEDILEDIVLTLTLFEDREMIEERLKTYAHLFDDKVMKQLKRRRYTGWGRLSRKLINGIRDKQSGKTILDFLKSDGFANRNFMQLIHDDSLTFKEDIQKAQVSGQGDSLHEHIANLAGSPAIKKGILQTVKVVDELVKVMGRHKPENIVIEMARENQTTQKGQKNSRERMKRIEEGIKELGSQILKEHPVENTQLQNEKLYLYYLQNGRDMYVDQELDINRLSDYDVDHIVPQSFLKDDSIDNKVLTRSDKARGKSDNVPSEEVVKKMKNYWRQLLNAKLITQRKFDNLTKAERGGLSELDKAGFIKRQLVETRQITKHVAQILDSRMNTKYDENDKLIREVKVITLKSKLVSDFRKDFQFYKVREINNYHHAHDAYLNAVVGTALIKKYPKLESEFVYGDYKVYDVRKMIAKSEQEIGKATAKYFFYSNIMNFFKTEITLANGEIRKRPLIETNGETGEIVWDKGRDFATVRKVLSMPQVNIVKKTEVQTGGFSKESILPKRNSDKLIARKKDWDPKKYGGFDSPTVAYSVLVVAKVEKGKSKKLKSVKELLGITIMERSSFEKNPIDFLEAKGYKEVKKDLIIKLPKYSLFELENGRKRMLASAGELQKGNELALPSKYVNFLYLASHYEKLKGSPEDNEQKQLFVEQHKHYLDEIIEQISEFSKRVILADANLDKVLSAYNKHRDKPIREQAENIIHLFTLTNLGAPAAFKYFDTTIDRKRYTSTKEVLDATLIHQSITGLYETRIDLSQLGGDGGGGGEAAAKPAPGGTLNIEDEYRLHETSKEPDVSLGSTWLSDFPQAWAETGGMGLAVRQAPLIIPLKATSTPVSIKQYPMSQEARLGIKPHIQRLLDQGILVPCQSPWNTPLLPVKKPGTNDYRPVQDLREVNKRVEDIHPTVPNPYNLLSGLPPSHQWYTVLDLKDAFFCLRLHPTSQPLFAFEWRDPEMGISGQLTWTRLPQGFKNSPTLFNEALHRDLADFRIQHPDLILLQYVDDLLLAATSELDCQQGTRALLQTLGNLGYRASAKKAQICQKQVKYLGYLLKEGQRWLTEARKETVMGQPTPKTPRQLREFLGKAGFCRLFIPGFAEMAAPLYPLTKPGTLFNWGPDQQKAYQEIKQALLTAPALGLPDLTKPFELFVDEKQGYAKGVLTQKLGPWRRPVAYLSKKLDPVAAGWPPCLRMVAAIAVLTKDAGKLTMGQPLVILAPHAVEALVKQPPDRWLSNARMTHYQALLLDTDRVQFGPVVALNPATLLPLPEEGLQHNCLDILAEAHGTRPDLTDQPLPDADHTWYTDGSSLLQEGQRKAGAAVTTETEVIWAKALPAGTSAQRAELIALTQALKMAEGKKLNVYTDSRYAFATAHIHGEIYRRRGWLTSEGKEIKNKDEILALLKALFLPKRLSIIHCPGHQKGHSAEARGNRMADQAARKAAITETPDTSTLLIENSSPSGGSKRTADGSEFEAGKRTADGSEFEKRTADGSEFESPKKKAKVE

SEQ ID NO: 2880 - protein, 2130 aa, synthetic construct; identical to SEQ ID NO: 2678

SEQ ID NO: 2881 - protein, 2110 aa, synthetic construct; identical to SEQ ID NO: 2620

SEQ ID NO: 2882 - protein, 2117 aa, synthetic construct; identical to SEQ ID NO: 2687

SEQ ID NO: 2883 - protein, 2113 aa, synthetic construct
MPAAKRVKLDGGDKKYSIGLDIGTNSVGWAVITDEYKVPSKKFKVLGNTDRHSIKKNLIGALLFDSGETAEATRLKRTARRRYTRRKNRICYLQEIFSNEMAKVDDSFFHRLEESFLVEEDKKHERHPIFGNIVDEVAYHEKYPTIYHLRKKLVDSTDKADLRLIYLALAHMIKFRGHFLIEGDLNPDNSDVDKLFIQLVQTYNQLFEENPINASGVDAKAILSARLSKSRRLENLIAQLPGEKKNGLFGNLIALSLGLTPNFKSNFDLAEDAKLQLSKDTYDDDLDNLLAQIGDQYADLFLAAKNLSDAILLSDILRVNTEITKAPLSASMIKRYDEHHQDLTLLKALVRQQLPEKYKEIFFDQSKNGYAGYIDGGASQEEFYKFIKPILEKMDGTEELLVKLNREDLLRKQRTFDNGSIPHQIHLGELHAILRRQEDFYPFLKDNREKIEKILTFRIPYYVGPLARGNSRFAWMTRKSEETITPWNFEEVVDKGASAQSFIERMTNFDKNLPNEKVLPKHSLLYEYFTVYNELTKVKYVTEGMRKPAFLSGEQKKAIVDLLFKTNRKVTVKQLKEDYFKKIECFDSVEISGVEDRFNASLGTYHDLLKIIKDKDFLDNEENEDILEDIVLTLTLFEDREMIEERLKTYAHLFDDKVMKQLKRRRYTGWGRLSRKLINGIRDKQSGKTILDFLKSDGFANRNFMQLIHDDSLTFKEDIQKAQVSGQGDSLHEHIANLAGSPAIKKGILQTVKVVDELVKVMGRHKPENIVIEMARENQTTQKGQKNSRERMKRIEEGIKELGSQILKEHPVENTQLQNEKLYLYYLQNGRDMYVDQELDINRLSDYDVDHIVPQSFLKDDSIDNKVLTRSDKARGKSDNVPSEEVVKKMKNYWRQLLNAKLITQRKFDNLTKAERGGLSELDKAGFIKRQLVETRQITKHVAQILDSRMNTKYDENDKLIREVKVITLKSKLVSDFRKDFQFYKVREINNYHHAHDAYLNAVVGTALIKKYPKLESEFVYGDYKVYDVRKMIAKSEQEIGKATAKYFFYSNIMNFFKTEITLANGEIRKRPLIETNGETGEIVWDKGRDFATVRKVLSMPQVNIVKKTEVQTGGFSKESILPKRNSDKLIARKKDWDPKKYGGFDSPTVAYSVLVVAKVEKGKSKKLKSVKELLGITIMERSSFEKNPIDFLEAKGYKEVKKDLIIKLPKYSLFELENGRKRMLASAGELQKGNELALPSKYVNFLYLASHYEKLKGSPEDNEQKQLFVEQHKHYLDEIIEQISEFSKRVILADANLDKVLSAYNKHRDKPIREQAENIIHLFTLTNLGAPAAFKYFDTTIDRKRYTSTKEVLDATLIHQSITGLYETRIDLSQLGGDGGPAPEAAAKGGTLNIEDEYRLHETSKEPDVSLGSTWLSDFPQAWAETGGMGLAVRQAPLIIPLKATSTPVSIKQYPMSQEARLGIKPHIQRLLDQGILVPCQSPWNTPLLPVKKPGTNDYRPVQDLREVNKRVEDIHPTVPNPYNLLSGLPPSHQWYTVLDLKDAFFCLRLHPTSQPLFAFEWRDPEMGISGQLTWTRLPQGFKNSPTLFNEALHRDLADFRIQHPDLILLQYVDDLLLAATSELDCQQGTRALLQTLGNLGYRASAKKAQICQKQVKYLGYLLKEGQRWLTEARKETVMGQPTPKTPRQLREFLGKAGFCRLFIPGFAEMAAPLYPLTKPGTLFNWGPDQQKAYQEIKQALLTAPALGLPDLTKPFELFVDEKQGYAKGVLTQKLGPWRRPVAYLSKKLDPVAAGWPPCLRMVAAIAVLTKDAGKLTMGQPLVILAPHAVEALVKQPPDRWLSNARMTHYQALLLDTDRVQFGPVVALNPATLLPLPEEGLQHNCLDILAEAHGTRPDLTDQPLPDADHTWYTDGSSLLQEGQRKAGAAVTTETEVIWAKALPAGTSAQRAELIALTQALKMAEGKKLNVYTDSRYAFATAHIHGEIYRRRGWLTSEGKEIKNKDEILALLKALFLPKRLSIIHCPGHQKGHSAEARGNRMADQAARKAAITETPDTSTLLIENSSPSGGSKRTADGSEFEAGKRTADGSEFEKRTADGSEFESPKKKAKVE

SEQ ID NO: 2884 - protein, 2116 aa, synthetic construct; identical to SEQ ID NO: 2674

SEQ ID NO: 2885 - protein, 2116 aa, synthetic construct; identical to SEQ ID NO: 2688

SEQ ID NO: 2886 - protein, 2111 aa, synthetic construct; identical to SEQ ID NO: 2653

SEQ ID NO: 2887 - protein, 2115 aa, synthetic construct; identical to SEQ ID NO: 2647

SEQ ID NO: 2888 - protein, 2125 aa, synthetic construct; identical to SEQ ID NO: 2610

SEQ ID NO: 2889 - protein, 2116 aa, synthetic construct; identical to SEQ ID NO: 2683

SEQ ID NO: 2890 - protein, 2114 aa, synthetic construct; identical to SEQ ID NO: 2633

SEQ ID NO: 2891 - protein, 2116 aa, synthetic construct; identical to SEQ ID NO: 2641

SEQ ID NO: 2892 - protein, 2138 aa, synthetic construct
MPAAKRVKLDGGDKKYSIGLDIGTNSVGWAVITDEYKVPSKKFKVLGNTDRHSIKKNLIGALLFDSGETAEATRLKRTARRRYTRRKNRICYLQEIFSNEMAKVDDSFFHRLEESFLVEEDKKHERHPIFGNIVDEVAYHEKYPTIYHLRKKLVDSTDKADLRLIYLALAHMIKFRGHFLIEGDLNPDNSDVDKLFIQLVQTYNQLFEENPINASGVDAKAILSARLSKSRRLENLIAQLPGEKKNGLFGNLIALSLGLTPNFKSNFDLAEDAKLQLSKDTYDDDLDNLLAQIGDQYADLFLAAKNLSDAILLSDILRVNTEITKAPLSASMIKRYDEHHQDLTLLKALVRQQLPEKYKEIFFDQSKNGYAGYIDGGASQEEFYKFIKPILEKMDGTEELLVKLNREDLLRKQRTFDNGSIPHQIHLGELHAILRRQEDFYPFLKDNREKIEKILTFRIPYYVGPLARGNSRFAWMTRKSEETITPWNFEEVVDKGASAQSFIERMTNFDKNLPNEKVLPKHSLLYEYFTVYNELTKVKYVTEGMRKPAFLSGEQKKAIVDLLFKTNRKVTVKQLKEDYFKKIECFDSVEISGVEDRFNASLGTYHDLLKIIKDKDFLDNEENEDILEDIVLTLTLFEDREMIEERLKTYAHLFDDKVMKQLKRRRYTGWGRLSRKLINGIRDKQSGKTILDFLKSDGFANRNFMQLIHDDSLTFKEDIQKAQVSGQGDSLHEHIANLAGSPAIKKGILQTVKVVDELVKVMGRHKPENIVIEMARENQTTQKGQKNSRERMKRIEEGIKELGSQILKEHPVENTQLQNEKLYLYYLQNGRDMYVDQELDINRLSDYDVDHIVPQSFLKDDSIDNKVLTRSDKARGKSDNVPSEEVVKKMKNYWRQLLNAKLITQRKFDNLTKAERGGLSELDKAGFIKRQLVETRQITKHVAQILDSRMNTKYDENDKLIREVKVITLKSKLVSDFRKDFQFYKVREINNYHHAHDAYLNAVVGTALIKKYPKLESEFVYGDYKVYDVRKMIAKSEQEIGKATAKYFFYSNIMNFFKTEITLANGEIRKRPLIETNGETGEIVWDKGRDFATVRKVLSMPQVNIVKKTEVQTGGFSKESILPKRNSDKLIARKKDWDPKKYGGFDSPTVAYSVLVVAKVEKGKSKKLKSVKELLGITIMERSSFEKNPIDFLEAKGYKEVKKDLIIKLPKYSLFELENGRKRMLASAGELQKGNELALPSKYVNFLYLASHYEKLKGSPEDNEQKQLFVEQHKHYLDEIIEQISEFSKRVILADANLDKVLSAYNKHRDKPIREQAENIIHLFTLTNLGAPAAFKYFDTTIDRKRYTSTKEVLDATLIHQSITGLYETRIDLSQLGGDGGSGGSSGGSSGSETPGTSESATPESSGGSSGGSSGGTLNIEDEYRLHETSKEPDVSLGSTWLSDFPQAWAETGGMGLAVRQAPLIIPLKATSTPVSIKQYPMSQEARLGIKPHIQRLLDQGILVPCQSPWNTPLLPVKKPGTNDYRPVQDLREVNKRVEDIHPTVPNPYNLLSGLPPSHQWYTVLDLKDAFFCLRLHPTSQPLFAFEWRDPEMGISGQLTWTRLPQGFKNSPTLFNEALHRDLADFRIQHPDLILLQYVDDLLLAATSELDCQQGTRALLQTLGNLGYRASAKKAQICQKQVKYLGYLLKEGQRWLTEARKETVMGQPTPKTPRQLREFLGKAGFCRLFIPGFAEMAAPLYPLTKPGTLFNWGPDQQKAYQEIKQALLTAPALGLPDLTKPFELFVDEKQGYAKGVLTQKLGPWRRPVAYLSKKLDPVAAGWPPCLRMVAAIAVLTKDAGKLTMGQPLVILAPHAVEALVKQPPDRWLSNARMTHYQALLLDTDRVQFGPVVALNPATLLPLPEEGLQHNCLDILAEAHGTRPDLTDQPLPDADHTWYTDGSSLLQEGQRKAGAAVTTETEVIWAKALPAGTSAQRAELIALTQALKMAEGKKLNVYTDSRYAFATAHIHGEIYRRRGWLTSEGKEIKNKDEILALLKALFLPKRLSIIHCPGHQKGHSAEARGNRMADQAARKAAITETPDTSTLLIENSSPSGGSKRTADGSEFEAGKRTADGSEFEKRTADGSEFESPKKKAKVE

SEQ ID NO: 2893 - protein, 2116 aa, synthetic construct; identical to SEQ ID NO: 2701

SEQ ID NO: 2894 - protein, 2114 aa, synthetic construct; identical to SEQ ID NO: 2684

SEQ ID NO: 2895 - protein, 2114 aa, synthetic construct; identical to SEQ ID NO: 2622

SEQ ID NO: 2896 - protein, 2116 aa, synthetic construct; identical to SEQ ID NO: 2645

SEQ ID NO: 2897 - protein, 2116 aa, synthetic construct; identical to SEQ ID NO: 2658

SEQ ID NO: 2898 - protein, 2114 aa, synthetic construct; identical to SEQ ID NO: 2670

SEQ ID NO: 2899 - protein, 2110 aa, synthetic construct
MPAAKRVKLDGGDKKYSIGLDIGTNSVGWAVITDEYKVPSKKFKVLGNTDRHSIKKNLIGALLFDSGETAEATRLKRTARRRYTRRKNRICYLQEIFSNEMAKVDDSFFHRLEESFLVEEDKKHERHPIFGNIVDEVAYHEKYPTIYHLRKKLVDSTDKADLRLIYLALAHMIKFRGHFLIEGDLNPDNSDVDKLFIQLVQTYNQLFEENPINASGVDAKAILSARLSKSRRLENLIAQLPGEKKNGLFGNLIALSLGLTPNFKSNFDLAEDAKLQLSKDTYDDDLDNLLAQIGDQYADLFLAAKNLSDAILLSDILRVNTEITKAPLSASMIKRYDEHHQDLTLLKALVRQQLPEKYKEIFFDQSKNGYAGYIDGGASQEEFYKFIKPILEKMDGTEELLVKLNREDLLRKQRTFDNGSIPHQIHLGELHAILRRQEDFYPFLKDNREKIEKILTFRIPYYVGPLARGNSRFAWMTRKSEETITPWNFEEVVDKGASAQSFIERMTNFDKNLPNEKVLPKHSLLYEYFTVYNELTKVKYVTEGMRKPAFLSGEQKKAIVDLLFKTNRKVTVKQLKEDYFKKIECFDSVEISGVEDRFNASLGTYHDLLKIIKDKDFLDNEENEDILEDIVLTLTLFEDREMIEERLKTYAHLFDDKVMKQLKRRRYTGWGRLSRKLINGIRDKQSGKTILDFLKSDGFANRNFMQLIHDDSLTFKEDIQKAQVSGQGDSLHEHIANLAGSPAIKKGILQTVKVVDELVKVMGRHKPENIVIEMARENQTTQKGQKNSRERMKRIEEGIKELGSQILKEHPVENTQLQNEKLYLYYLQNGRDMYVDQELDINRLSDYDVDHIVPQSFLKDDSIDNKVLTRSDKARGKSDNVPSEEVVKKMKNYWRQLLNAKLITQRKFDNLTKAERGGLSELDKAGFIKRQLVETRQITKHVAQILDSRMNTKYDENDKLIREVKVITLKSKLVSDFRKDFQFYKVREINNYHHAHDAYLNAVVGTALIKKYPKLESEFVYGDYKVYDVRKMIAKSEQEIGKATAKYFFYSNIMNFFKTEITLANGEIRKRPLIETNGETGEIVWDKGRDFATVRKVLSMPQVNIVKKTEVQTGGFSKESILPKRNSDKLIARKKDWDPKKYGGFDSPTVAYSVLVVAKVEKGKSKKLKSVKELLGITIMERSSFEKNPIDFLEAKGYKEVKKDLIIKLPKYSLFELENGRKRMLASAGELQKGNELALPSKYVNFLYLASHYEKLKGSPEDNEQKQLFVEQHKHYLDEIIEQISEFSKRVILADANLDKVLSAYNKHRDKPIREQAENIIHLFTLTNLGAPAAFKYFDTTIDRKRYTSTKEVLDATLIHQSITGLYETRIDLSQLGGDGGGGGGGGGTLNIEDEYRLHETSKEPDVSLGSTWLSDFPQAWAETGGMGLAVRQAPLIIPLKATSTPVSIKQYPMSQEARLGIKPHIQRLLDQGILVPCQSPWNTPLLPVKKPGTNDYRPVQDLREVNKRVEDIHPTVPNPYNLLSGLPPSHQWYTVLDLKDAFFCLRLHPTSQPLFAFEWRDPEMGISGQLTWTRLPQGFKNSPTLFNEALHRDLADFRIQHPDLILLQYVDDLLLAATSELDCQQGTRALLQTLGNLGYRASAKKAQICQKQVKYLGYLLKEGQRWLTEARKETVMGQPTPKTPRQLREFLGKAGFCRLFIPGFAEMAAPLYPLTKPGTLFNWGPDQQKAYQEIKQALLTAPALGLPDLTKPFELFVDEKQGYAKGVLTQKLGPWRRPVAYLSKKLDPVAAGWPPCLRMVAAIAVLTKDAGKLTMGQPLVILAPHAVEALVKQPPDRWLSNARMTHYQALLLDTDRVQFGPVVALNPATLLPLPEEGLQHNCLDILAEAHGTRPDLTDQPLPDADHTWYTDGSSLLQEGQRKAGAAVTTETEVIWAKALPAGTSAQRAELIALTQALKMAEGKKLNVYTDSRYAFATAHIHGEIYRRRGWLTSEGKEIKNKDEILALLKALFLPKRLSIIHCPGHQKGHSAEARGNRMADQAARKAAITETPDTSTLLIENSSPSGGSKRTADGSEFEAGKRTADGSEFEKRTADGSEFESPKKKAKVE

SEQ ID NO: 2900 - protein, 2120 aa, synthetic construct; identical to SEQ ID NO: 2662

SEQ ID NO: 2901 - protein, 2116 aa, synthetic construct; identical to SEQ ID NO: 2629

SEQ ID NO: 2902 - protein, 2117 aa, synthetic construct; identical to SEQ ID NO: 2696

SEQ ID NO: 2903 - protein, 2114 aa, synthetic construct; identical to SEQ ID NO: 2634

SEQ ID NO: 2904 - protein, 2114 aa, synthetic construct; identical to SEQ ID NO: 2618

SEQ ID NO: 2905 - protein, 2111 aa, synthetic construct
MPAAKRVKLDGGDKKYSIGLDIGTNSVGWAVITDEYKVPSKKFKVLGNTDRHSIKKNLIGALLFDSGETAEATRLKRTARRRYTRRKNRICYLQEIFSNEMAKVDDSFFHRLEESFLVEEDKKHERHPIFGNIVDEVAYHEKYPTIYHLRKKLVDSTDKADLRLIYLALAHMIKFRGHFLIEGDLNPDNSDVDKLFIQLVQTYNQLFEENPINASGVDAKAILSARLSKSRRLENLIAQLPGEKKNGLFGNLIALSLGLTPNFKSNFDLAEDAKLQLSKDTYDDDLDNLLAQIGDQYADLFLAAKNLSDAILLSDILRVNTEITKAPLSASMIKRYDEHHQDLTLLKALVRQQLPEKYKEIFFDQSKNGYAGYIDGGASQEEFYKFIKPILEKMDGTEELLVKLNREDLLRKQRTFDNGSIPHQIHLGELHAILRRQEDFYPFLKDNREKIEKILTFRIPYYVGPLARGNSRFAWMTRKSEETITPWNFEEVVDKGASAQSFIERMTNFDKNLPNEKVLPKHSLLYEYFTVYNELTKVKYVTEGMRKPAFLSGEQKKAIVDLLFKTNRKVTVKQLKEDYFKKIECFDSVEISGVEDRFNASLGTYHDLLKIIKDKDFLDNEENEDILEDIVLTLTLFEDREMIEERLKTYAHLFDDKVMKQLKRRRYTGWGRLSRKLINGIRDKQSGKTILDFLKSDGFANRNFMQLIHDDSLTFKEDIQKAQVSGQGDSLHEHIANLAGSPAIKKGILQTVKVVDELVKVMGRHKPENIVIEMARENQTTQKGQKNSRERMKRIEEGIKELGSQILKEHPVENTQLQNEKLYLYYLQNGRDMYVDQELDINRLSDYDVDHIVPQSFLKDDSIDNKVLTRSDKARGKSDNVPSEEVVKKMKNYWRQLLNAKLITQRKFDNLTKAERGGLSELDKAGFIKRQLVETRQITKHVAQILDSRMNTKYDENDKLIREVKVITLKSKLVSDFRKDFQFYKVREINNYHHAHDAYLNAVVGTALIKKYPKLESEFVYGDYKVYDVRKMIAKSEQEIGKATAKYFFYSNIMNFFKTEITLANGEIRKRPLIETNGETGEIVWDKGRDFATVRKVLSMPQVNIVKKTEVQTGGFSKESILPKRNSDKLIARKKDWDPKKYGGFDSPTVAYSVLVVAKVEKGKSKKLKSVKELLGITIMERSSFEKNPIDFLEAKGYKEVKKDLIIKLPKYSLFELENGRKRMLASAGELQKGNELALPSKYVNFLYLASHYEKLKGSPEDNEQKQLFVEQHKHYLDEIIEQISEFSKRVILADANLDKVLSAYNKHRDKPIREQAENIIHLFTLTNLGAPAAFKYFDTTIDRKRYTSTKEVLDATLIHQSITGLYETRIDLSQLGGDGGGSSGSSGGTLNIEDEYRLHETSKEPDVSLGSTWLSDFPQAWAETGGMGLAVRQAPLIIPLKATSTPVSIKQYPMSQEARLGIKPHIQRLLDQGILVPCQSPWNTPLLPVKKPGTNDYRPVQDLREVNKRVEDIHPTVPNPYNLLSGLPPSHQWYTVLDLKDAFFCLRLHPTSQPLFAFEWRDPEMGISGQLTWTRLPQGFKNSPTLFNEALHRDLADFRIQHPDLILLQYVDDLLLAATSELDCQQGTRALLQTLGNLGYRASAKKAQICQKQVKYLGYLLKEGQRWLTEARKETVMGQPTPKTPRQLREFLGKAGFCRLFIPGFAEMAAPLYPLTKPGTLFNWGPDQQKAYQEIKQALLTAPALGLPDLTKPFELFVDEKQGYAKGVLTQKLGPWRRPVAYLSKKLDPVAAGWPPCLRMVAAIAVLTKDAGKLTMGQPLVILAPHAVEALVKQPPDRWLSNARMTHYQALLLDTDRVQFGPVVALNPATLLPLPEEGLQHNCLDILAEAHGTRPDLTDQPLPDADHTWYTDGSSLLQEGQRKAGAAVTTETEVIWAKALPAGTSAQRAELIALTQALKMAEGKKLNVYTDSRYAFATAHIHGEIYRRRGWLTSEGKEIKNKDEILALLKALFLPKRLSIIHCPGHQKGHSAEARGNRMADQAARKAAITETPDTSTLLIENSSPSGGSKRTADGSEFEAGKRTADGSEFEKRTADGSEFESPKKKAKVE

SEQ ID NO: 2906 - protein, 2111 aa, synthetic construct; identical to SEQ ID NO: 2643

SEQ ID NO: 2907 - protein, 2121 aa, synthetic construct; identical to SEQ ID NO: 2663

SEQ ID NO: 2908 - protein, 2113 aa, synthetic construct; identical to SEQ ID NO: 2626

SEQ ID NO: 2909 - protein, 2115 aa, synthetic construct; identical to SEQ ID NO: 2639

SEQ ID NO: 2910 - protein, 2111 aa, synthetic construct; identical to SEQ ID NO: 2671

SEQ ID NO: 2911 - protein, 2111 aa, synthetic construct; identical to SEQ ID NO: 2672

SEQ ID NO: 2912 - protein, 2116 aa, synthetic construct; identical to SEQ ID NO: 2703

SEQ ID NO: 2913 - protein, 2116 aa, synthetic construct; identical to SEQ ID NO: 2660

SEQ ID NO: 2914 - protein, 2111 aa, synthetic construct
MPAAKRVKLDGGDKKYSIGLDIGTNSVGWAVITDEYKVPSKKFKVLGNTDRHSIKKNLIGALLFDSGETAEATRLKRTARRRYTRRKNRICYLQEIFSNEMAKVDDSFFHRLEESFLVEEDKKHERHPIFGNIVDEVAYHEKYPTIYHLRKKLVDSTDKADLRLIYLALAHMIKFRGHFLIEGDLNPDNSDVDKLFIQLVQTYNQLFEENPINASGVDAKAILSARLSKSRRLENLIAQLPGEKKNGLFGNLIALSLGLTPNFKSNFDLAEDAKLQLSKDTYDDDLDNLLAQIGDQYADLFLAAKNLSDAILLSDILRVNTEITKAPLSASMIKRYDEHHQDLTLLKALVRQQLPEKYKEIFFDQSKNGYAGYIDGGASQEEFYKFIKPILEKMDGTEELLVKLNREDLLRKQRTFDNGSIPHQIHLGELHAILRRQEDFYPFLKDNREKIEKILTFRIPYYVGPLARGNSRFAWMTRKSEETITPWNFEEVVDKGASAQSFIERMTNFDKNLPNEKVLPKHSLLYEYFTVYNELTKVKYVTEGMRKPAFLSGEQKKAIVDLLFKTNRKVTVKQLKEDYFKKIECFDSVEISGVEDRFNASLGTYHDLLKIIKDKDFLDNEENEDILEDIVLTLTLFEDREMIEERLKTYAHLFDDKVMKQLKRRRYTGWGRLSRKLINGIRDKQSGKTILDFLKSDGFANRNFMQLIHDDSLTFKEDIQKAQVSGQGDSLHEHIANLAGSPAIKKGILQTVKVVDELVKVMGRHKPENIVIEMARENQTTQKGQKNSRERMKRIEEGIKELGSQILKEHPVENTQLQNEKLYLYYLQNGRDMYVDQELDINRLSDYDVDHIVPQSFLKDDSIDNKVLTRSDKARGKSDNVPSEEVVKKMKNYWRQLLNAKLITQRKFDNLTKAERGGLSELDKAGFIKRQLVETRQITKHVAQILDSRMNTKYDENDKLIREVKVITLKSKLVSDFRKDFQFYKVREINNYHHAHDAYLNAVVGTALIKKYPKLESEFVYGDYKVYDVRKMIAKSEQEIGKATAKYFFYSNIMNFFKTEITLANGEIRKRPLIETNGETGEIVWDKGRDFATVRKVLSMPQVNIVKKTEVQTGGFSKESILPKRNSDKLIARKKDWDPKKYGGFDSPTVAYSVLVVAKVEKGKSKKLKSVKELLGITIMERSSFEKNPIDFLEAKGYKEVKKDLIIKLPKYSLFELENGRKRMLASAGELQKGNELALPSKYVNFLYLASHYEKLKGSPEDNEQKQLFVEQHKHYLDEIIEQISEFSKRVILADANLDKVLSAYNKHRDKPIREQAENIIHLFTLTNLGAPAAFKYFDTTIDRKRYTSTKEVLDATLIHQSITGLYETRIDLSQLGGDGGGGSGSSGGTLNIEDEYRLHETSKEPDVSLGSTWLSDFPQAWAETGGMGLAVRQAPLIIPLKATSTPVSIKQYPMSQEARLGIKPHIQRLLDQGILVPCQSPWNTPLLPVKKPGTNDYRPVQDLREVNKRVEDIHPTVPNPYNLLSGLPPSHQWYTVLDLKDAFFCLRLHPTSQPLFAFEWRDPEMGISGQLTWTRLPQGFKNSPTLFNEALHRDLADFRIQHPDLILLQYVDDLLLAATSELDCQQGTRALLQTLGNLGYRASAKKAQICQKQVKYLGYLLKEGQRWLTEARKETVMGQPTPKTPRQLREFLGKAGFCRLFIPGFAEMAAPLYPLTKPGTLFNWGPDQQKAYQEIKQALLTAPALGLPDLTKPFELFVDEKQGYAKGVLTQKLGPWRRPVAYLSKKLDPVAAGWPPCLRMVAAIAVLTKDAGKLTMGQPLVILAPHAVEALVKQPPDRWLSNARMTHYQALLLDTDRVQFGPVVALNPATLLPLPEEGLQHNCLDILAEAHGTRPDLTDQPLPDADHTWYTDGSSLLQEGQRKAGAAVTTETEVIWAKALPAGTSAQRAELIALTQALKMAEGKKLNVYTDSRYAFATAHIHGEIYRRRGWLTSEGKEIKNKDEILALLKALFLPKRLSIIHCPGHQKGHSAEARGNRMADQAARKAAITETPDTSTLLIENSSPSGGSKRTADGSEFEAGKRTADGSEFEKRTADGSEFESPKKKAKVE

SEQ ID NO: 2915 - protein, 2116 aa, synthetic construct; identical to SEQ ID NO: 2668

SEQ ID NO: 2916 - protein, 2113 aa, synthetic construct
MPAAKRVKLDGGDKKYSIGLDIGTNSVGWAVITDEYKVPSKKFKVLGNTDRHSIKKNLIGALLFDSGETAEATRLKRTARRRYTRRKNRICYLQEIFSNEMAKVDDSFFHRLEESFLVEEDKKHERHPIFGNIVDEVAYHEKYPTIYHLRKKLVDSTDKADLRLIYLALAHMIKFRGHFLIEGDLNPDNSDVDKLFIQLVQTYNQLFEENPINASGVDAKAILSARLSKSRRLENLIAQLPGEKKNGLFGNLIALSLGLTPNFKSNFDLAEDAKLQLSKDTYDDDLDNLLAQIGDQYADLFLAAKNLSDAILLSDILRVNTEITKAPLSASMIKRYDEHHQDLTLLKALVRQQLPEKYKEIFFDQSKNGYAGYIDGGASQEEFYKFIKPILEKMDGTEELLVKLNREDLLRKQRTFDNGSIPHQIHLGELHAILRRQEDFYPFLKDNREKIEKILTFRIPYYVGPLARGNSRFAWMTRKSEETITPWNFEEVVDKGASAQSFIERMTNFDKNLPNEKVLPKHSLLYEYFTVYNELTKVKYVTEGMRKPAFLSGEQKKAIVDLLFKTNRKVTVKQLKEDYFKKIECFDSVEISGVEDRFNASLGTYHDLLKIIKDKDFLDNEENEDILEDIVLTLTLFEDREMIEERLKTYAHLFDDKVMKQLKRRRYTGWGRLSRKLINGIRDKQSGKTILDFLKSDGFANRNFMQLIHDDSLTFKEDIQKAQVSGQGDSLHEHIANLAGSPAIKKGILQTVKVVDELVKVMGRHKPENIVIEMARENQTTQKGQKNSRERMKRIEEGIKELGSQILKEHPVENTQLQNEKLYLYYLQNGRDMYVDQELDINRLSDYDVDHIVPQSFLKDDSIDNKVLTRSDKARGKSDNVPSEEVVKKMKNYWRQLLNAKLITQRKFDNLTKAERGGLSELDKAGFIKRQLVETRQITKHVAQILDSRMNTKYDENDKLIREVKVITLKSKLVSDFRKDFQFYKVREINNYHHAHDAYLNAVVGTALIKKYPKLESEFVYGDYKVYDVRKMIAKSEQEIGKATAKYFFYSNIMNFFKTEITLANGEIRKRPLIETNGETGEIVWDKGRDFATVRKVLSMPQVNIVKKTEVQTGGFSKESILPKRNSDKLIARKKDWDPKKYGGFDSPTVAYSVLVVAKVEKGKSKKLKSVKELLGITIMERSSFEKNPIDFLEAKGYKEVKKDLIIKLPKYSLFELENGRKRMLASAGELQKGNELALPSKYVNFLYLASHYEKLKGSPEDNEQKQLFVEQHKHYLDEIIEQISEFSKRVILADANLDKVLSAYNKHRDKPIREQAENIIHLFTLTNLGAPAAFKYFDTTIDRKRYTSTKEVLDATLIHQSITGLYETRIDLSQLGGDGGGSSEAAAKGGTLNIEDEYRLHETSKEPDVSLGSTWLSDFPQAWAETGGMGLAVRQAPLIIPLKATSTPVSIKQYPMSQEARLGIKPHIQRLLDQGILVPCQSPWNTPLLPVKKPGTNDYRPVQDLREVNKRVEDIHPTVPNPYNLLSGLPPSHQWYTVLDLKDAFFCLRLHPTSQPLFAFEWRDPEMGISGQLTWTRLPQGFKNSPTLFNEALHRDLADFRIQHPDLILLQYVDDLLLAATSELDCQQGTRALLQTLGNLGYRASAKKAQICQKQVKYLGYLLKEGQRWLTEARKETVMGQPTPKTPRQLREFLGKAGFCRLFIPGFAEMAAPLYPLTKPGTLFNWGPDQQKAYQEIKQALLTAPALGLPDLTKPFELFVDEKQGYAKGVLTQKLGPWRRPVAYLSKKLDPVAAGWPPCLRMVAAIAVLTKDAGKLTMGQPLVILAPHAVEALVKQPPDRWLSNARMTHYQALLLDTDRVQFGPVVALNPATLLPLPEEGLQHNCLDILAEAHGTRPDLTDQPLPDADHTWYTDGSSLLQEGQRKAGAAVTTETEVIWAKALPAGTSAQRAELIALTQALKMAEGKKLNVYTDSRYAFATAHIHGEIYRRRGWLTSEGKEIKNKDEILALLKALFLPKRLSIIHCPGHQKGHSAEARGNRMADQAARKAAITETPDTSTLLIENSSPSGGSKRTADGSEFEAGKRTADGSEFEKRTADGSEFESPKKKAKVE

SEQ ID NO: 2917 - protein, 2123 aa, synthetic construct
MPAAKRVKLDGGDKKYSIGLDIGTNSVGWAVITDEYKVPSKKFKVLGNTDRHSIKKNLIGALLFDSGETAEATRLKRTARRRYTRRKNRICYLQEIFSNEMAKVDDSFFHRLEESFLVEEDKKHERHPIFGNIVDEVAYHEKYPTIYHLRKKLVDSTDKADLRLIYLALAHMIKFRGHFLIEGDLNPDNSDVDKLFIQLVQTYNQLFEENPINASGVDAKAILSARLSKSRRLENLIAQLPGEKKNGLFGNLIALSLGLTPNFKSNFDLAEDAKLQLSKDTYDDDLDNLLAQIGDQYADLFLAAKNLSDAILLSDILRVNTEITKAPLSASMIKRYDEHHQDLTLLKALVRQQLPEKYKEIFFDQSKNGYAGYIDGGASQEEFYKFIKPILEKMDGTEELLVKLNREDLLRKQRTFDNGSIPHQIHLGELHAILRRQEDFYPFLKDNREKIEKILTFRIPYYVGPLARGNSRFAWMTRKSEETITPWNFEEVVDKGASAQSFIERMTNFDKNLPNEKVLPKHSLLYEYFTVYNELTKVKYVTEGMRKPAFLSGEQKKAIVDLLFKTNRKVTVKQLKEDYFKKIECFDSVEISGVEDRFNASLGTYHDLLKIIKDKDFLDNEENEDILEDIVLTLTLFEDREMIEERLKTYAHLFDDKVMKQLKRRRYTGWGRLSRKLINGIRDKQSGKTILDFLKSDGFANRNFMQLIHDDSLTFKEDIQKAQVSGQGDSLHEHIANLAGSPAIKKGILQTVKVVDELVKVMGRHKPENIVIEMARENQTTQKGQKNSRERMKRIEEGIKELGSQILKEHPVENTQLQNEKLYLYYLQNGRDMYVDQELDINRLSDYDVDHIVPQSFLKDDSIDNKVLTRSDKARGKSDNVPSEEVVKKMKNYWRQLLNAKLITQRKFDNLTKAERGGLSELDKAGFIKRQLVETRQITKHVAQILDSRMNTKYDENDKLIREVKVITLKSKLVSDFRKDFQFYKVREINNYHHAHDAYLNAVVGTALIKKYPKLESEFVYGDYKVYDVRKMIAKSEQEIGKATAKYFFYSNIMNFFKTEITLANGEIRKRPLIETNGETGEIVWDKGRDFATVRKVLSMPQVNIVKKTEVQTGGFSKESILPKRNSDKLIARKKDWDPKKYGGFDSPTVAYSVLVVAKVEKGKSKKLKSVKELLGITIMERSSFEKNPIDFLEAKGYKEVKKDLIIKLPKYSLFELENGRKRMLASAGELQKGNELALPSKYVNFLYLASHYEKLKGSPEDNEQKQLFVEQHKHYLDEIIEQISEFSKRVILADANLDKVLSAYNKHRDKPIREQAENIIHLFTLTNLGAPAAFKYFDTTIDRKRYTSTKEVLDATLIHQSITGLYETRIDLSQLGGDGGGGSGGSGGSGGSGGSGGSGGTLNIEDEYRLHETSKEPDVSLGSTWLSDFPQAWAETGGMGLAVRQAPLIIPLKATSTPVSIKQYPMSQEARLGIKPHIQRLLDQGILVPCQSPWNTPLLPVKKPGTNDYRPVQDLREVNKRVEDIHPTVPNPYNLLSGLPPSHQWYTVLDLKDAFFCLRLHPTSQPLFAFEWRDPEMGISGQLTWTRLPQGFKNSPTLFNEALHRDLADFRIQHPDLILLQYVDDLLLAATSELDCQQGTRALLQTLGNLGYRASAKKAQICQKQVKYLGYLLKEGQRWLTEARKETVMGQPTPKTPRQLREFLGKAGFCRLFIPGFAEMAAPLYPLTKPGTLFNWGPDQQKAYQEIKQALLTAPALGLPDLTKPFELFVDEKQGYAKGVLTQKLGPWRRPVAYLSKKLDPVAAGWPPCLRMVAAIAVLTKDAGKLTMGQPLVILAPHAVEALVKQPPDRWLSNARMTHYQALLLDTDRVQFGPVVALNPATLLPLPEEGLQHNCLDILAEAHGTRPDLTDQPLPDADHTWYTDGSSLLQEGQRKAGAAVTTETEVIWAKALPAGTSAQRAELIALTQALKMAEGKKLNVYTDSRYAFATAHIHGEIYRRRGWLTSEGKEIKNKDEILALLKALFLPKRLSIIHCPGHQKGHSAEARGNRMADQAARKAAITETPDTSTLLIENSSPSGGSKRTADGSEFEAGKRTADGSEFEKRTADGSEFESPKKKAKVE

SEQ ID NO: 2918 - protein, 2114 aa, synthetic construct
MPAAKRVKLDGGDKKYSIGLDIGTNSVGWAVITDEYKVPSKKFKVLGNTDRHSIKKNLIGALLFDSGETAEATRLKRTARRRYTRRKNRICYLQEIFSNEMAKVDDSFFHRLEESFLVEEDKKHERHPIFGNIVDEVAYHEKYPTIYHLRKKLVDSTDKADLRLIYLALAHMIKFRGHFLIEGDLNPDNSDVDKLFIQLVQTYNQLFEENPINASGVDAKAILSARLSKSRRLENLIAQLPGEKKNGLFGNLIALSLGLTPNFKSNFDLAEDAKLQLSKDTYDDDLDNLLAQIGDQYADLFLAAKNLSDAILLSDILRVNTEITKAPLSASMIKRYDEHHQDLTLLKALVRQQLPEKYKEIFFDQSKNGYAGYIDGGASQEEFYKFIKPILEKMDGTEELLVKLNREDLLRKQRTFDNGSIPHQIHLGELHAILRRQEDFYPFLKDNREKIEKILTFRIPYYVGPLARGNSRFAWMTRKSEETITPWNFEEVVDKGASAQSFIERMTNFDKNLPNEKVLPKHSLLYEYFTVYNELTKVKYVTEGMRKPAFLSGEQKKAIVDLLFKTNRKVTVKQLKEDYFKKIECFDSVEISGVEDRFNASLGTYHDLLKIIKDKDFLDNEENEDILEDIVLTLTLFEDREMIEERLKTYAHLFDDKVMKQLKRRRYTGWGRLSRKLINGIRDKQSGKTILDFLKSDGFANRNFMQLIHDDSLTFKEDIQKAQVSGQGDSLHEHIANLAGSPAIKKGILQTVKVVDELVKVMGRHKPENIVIEMARENQTTQKGQKNSRERMKRIEEGIKELGSQILKEHPVENTQLQNEKLYLYYLQNGRDMYVDQELDINRLSDYDVDHIVPQSFLKDDSIDNKVLTRSDKARGKSDNVPSEEVVKKMKNYWRQLLNAKLITQRKFDNLTKAERGGLSELDKAGFIKRQLVETRQITKHVAQILDSRMNTKYDENDKLIREVKVITLKSKLVSDFRKDFQFYKVREINNYHHAHDAYLNAVVGTALIKKYPKLESEFVYGDYKVYDVRKMIAKSEQEIGKATAKYFFYSNIMNFFKTEITLANGEIRKRPLIETNGETGEIVWDKGRDFATVRKVLSMPQVNIVKKTEVQTGGFSKESILPKRNSDKLIARKKDWDPKKYGGFDSPTVAYSVLVVAKVEKGKSKKLKSVKELLGITIMERSSFEKNPIDFLEAKGYKEVKKDLIIKLPKYSLFELENGRKRMLASAGELQKGNELALPSKYVNFLYLASHYEKLKGSPEDNEQKQLFVEQHKHYLDEIIEQISEFSKRVILADANLDKVLSAYNKHRDKPIREQAENIIHLFTLTNLGAPAAFKYFDTTIDRKRYTSTKEVLDATLIHQSITGLYETRIDLSQLGGDGGGGGGGSPAPGGTLNIEDEYRLHETSKEPDVSLGSTWLSDFPQAWAETGGMGLAVRQAPLIIPLKATSTPVSIKQYPMSQEARLGIKPHIQRLLDQGILVPCQSPWNTPLLPVKKPGTNDYRPVQDLREVNKRVEDIHPTVPNPYNLLSGLPPSHQWYTVLDLKDAFFCLRLHPTSQPLFAFEWRDPEMGISGQLTWTRLPQGFKNSPTLFNEALHRDLADFRIQHPDLILLQYVDDLLLAATSELDCQQGTRALLQTLGNLGYRASAKKAQICQKQVKYLGYLLKEGQRWLTEARKETVMGQPTPKTPRQLREFLGKAGFCRLFIPGFAEMAAPLYPLTKPGTLFNWGPDQQKAYQEIKQALLTAPALGLPDLTKPFELFVDEKQGYAKGVLTQKLGPWRRPVAYLSKKLDPVAAGWPPCLRMVAAIAVLTKDAGKLTMGQPLVILAPHAVEALVKQPPDRWLSNARMTHYQALLLDTDRVQFGPVVALNPATLLPLPEEGLQHNCLDILAEAHGTRPDLTDQPLPDADHTWYTDGSSLLQEGQRKAGAAVTTETEVIWAKALPAGTSAQRAELIALTQALKMAEGKKLNVYTDSRYAFATAHIHGEIYRRRGWLTSEGKEIKNKDEILALLKALFLPKRLSIIHCPGHQKGHSAEARGNRMADQAARKAAITETPDTSTLLIENSSPSGGSKRTADGSEFEAGKRTADGSEFEKRTADGSEFESPKKKAKVE

SEQ ID NO: 2919 - protein, 2116 aa, synthetic construct; identical to SEQ ID NO: 2690

SEQ ID NO: 2920 - protein, 2116 aa, synthetic construct; identical to SEQ ID NO: 2648

SEQ ID NO: 2921 - protein, 2114 aa, synthetic construct; identical to SEQ ID NO: 2616

SEQ ID NO: 2922 - protein, 2116 aa, synthetic construct; identical to SEQ ID NO: 2666

SEQ ID NO: 2923 - protein, 2111 aa, synthetic construct
MPAAKRVKLDGGDKKYSIGLDIGTNSVGWAVITDEYKVPSKKFKVLGNTDRHSIKKNLIGALLFDSGETAEATRLKRTARRRYTRRKNRICYLQEIFSNEMAKVDDSFFHRLEESFLVEEDKKHERHPIFGNIVDEVAYHEKYPTIYHLRKKLVDSTDKADLRLIYLALAHMIKFRGHFLIEGDLNPDNSDVDKLFIQLVQTYNQLFEENPINASGVDAKAILSARLSKSRRLENLIAQLPGEKKNGLFGNLIALSLGLTPNFKSNFDLAEDAKLQLSKDTYDDDLDNLLAQIGDQYADLFLAAKNLSDAILLSDILRVNTEITKAPLSASMIKRYDEHHQDLTLLKALVRQQLPEKYKEIFFDQSKNGYAGYIDGGASQEEFYKFIKPILEKMDGTEELLVKLNREDLLRKQRTFDNGSIPHQIHLGELHAILRRQEDFYPFLKDNREKIEKILTFRIPYYVGPLARGNSRFAWMTRKSEETITPWNFEEVVDKGASAQSFIERMTNFDKNLPNEKVLPKHSLLYEYFTVYNELTKVKYVTEGMRKPAFLSGEQKKAIVDLLFKTNRKVTVKQLKEDYFKKIECFDSVEISGVEDRFNASLGTYHDLLKIIKDKDFLDNEENEDILEDIVLTLTLFEDREMIEERLKTYAHLFDDKVMKQLKRRRYTGWGRLSRKLINGIRDKQSGKTILDFLKSDGFANRNFMQLIHDDSLTFKEDIQKAQVSGQGDSLHEHIANLAGSPAIKKGILQTVKVVDELVKVMGRHKPENIVIEMARENQTTQKGQKNSRERMKRIEEGIKELGSQILKEHPVENTQLQNEKLYLYYLQNGRDMYVDQELDINRLSDYDVDHIVPQSFLKDDSIDNKVLTRSDKARGKSDNVPSEEVVKKMKNYWRQLLNAKLITQRKFDNLTKAERGGLSELDKAGFIKRQLVETRQITKHVAQILDSRMNTKYDENDKLIREVKVITLKSKLVSDFRKDFQFYKVREINNYHHAHDAYLNAVVGTALIKKYPKLESEFVYGDYKVYDVRKMIAKSEQEIGKATAKYFFYSNIMNFFKTEITLANGEIRKRPLIETNGETGEIVWDKGRDFATVRKVLSMPQVNIVKKTEVQTGGFSKESILPKRNSDKLIARKKDWDPKKYGGFDSPTVAYSVLVVAKVEKGKSKKLKSVKELLGITIMERSSFEKNPIDFLEAKGYKEVKKDLIIKLPKYSLFELENGRKRMLASAGELQKGNELALPSKYVNFLYLASHYEKLKGSPEDNEQKQLFVEQHKHYLDEIIEQISEFSKRVILADANLDKVLSAYNKHRDKPIREQAENIIHLFTLTNLGAPAAFKYFDTTIDRKRYTSTKEVLDATLIHQSITGLYETRIDLSQLGGDGGPAPGGGGGTLNIEDEYRLHETSKEPDVSLGSTWLSDFPQAWAETGGMGLAVRQAPLIIPLKATSTPVSIKQYPMSQEARLGIKPHIQRLLDQGILVPCQSPWNTPLLPVKKPGTNDYRPVQDLREVNKRVEDIHPTVPNPYNLLSGLPPSHQWYTVLDLKDAFFCLRLHPTSQPLFAFEWRDPEMGISGQLTWTRLPQGFKNSPTLFNEALHRDLADFRIQHPDLILLQYVDDLLLAATSELDCQQGTRALLQTLGNLGYRASAKKAQICQKQVKYLGYLLKEGQRWLTEARKETVMGQPTPKTPRQLREFLGKAGFCRLFIPGFAEMAAPLYPLTKPGTLFNWGPDQQKAYQEIKQALLTAPALGLPDLTKPFELFVDEKQGYAKGVLTQKLGPWRRPVAYLSKKLDPVAAGWPPCLRMVAAIAVLTKDAGKLTMGQPLVILAPHAVEALVKQPPDRWLSNARMTHYQALLLDTDRVQFGPVVALNPATLLPLPEEGLQHNCLDILAEAHGTRPDLTDQPLPDADHTWYTDGSSLLQEGQRKAGAAVTTETEVIWAKALPAGTSAQRAELIALTQALKMAEGKKLNVYTDSRYAFATAHIHGEIYRRRGWLTSEGKEIKNKDEILALLKALFLPKRLSIIHCPGHQKGHSAEARGNRMADQAARKAAITETPDTSTLLIENSSPSGGSKRTADGSEFEAGKRTADGSEFEKRTADGSEFESPKKKAKVE

SEQ ID NO: 2924 - protein, 2116 aa, synthetic construct
MPAAKRVKLDGGDKKYSIGLDIGTNSVGWAVITDEYKVPSKKFKVLGNTDRHSIKKNLIGALLFDSGETAEATRLKRTARRRYTRRKNRICYLQEIFSNEMAKVDDSFFHRLEESFLVEEDKKHERHPIFGNIVDEVAYHEKYPTIYHLRKKLVDSTDKADLRLIYLALAHMIKFRGHFLIEGDLNPDNSDVDKLFIQLVQTYNQLFEENPINASGVDAKAILSARLSKSRRLENLIAQLPGEKKNGLFGNLIALSLGLTPNFKSNFDLAEDAKLQLSKDTYDDDLDNLLAQIGDQYADLFLAAKNLSDAILLSDILRVNTEITKAPLSASMIKRYDEHHQDLTLLKALVRQQLPEKYKEIFFDQSKNGYAGYIDGGASQEEFYKFIKPILEKMDGTEELLVKLNREDLLRKQRTFDNGSIPHQIHLGELHAILRRQEDFYPFLKDNREKIEKILTFRIPYYVGPLARGNSRFAWMTRKSEETITPWNFEEVVDKGASAQSFIERMTNFDKNLPNEKVLPKHSLLYEYFTVYNELTKVKYVTEGMRKPAFLSGEQKKAIVDLLFKTNRKVTVKQLKEDYFKKIECFDSVEISGVEDRFNASLGTYHDLLKIIKDKDFLDNEENEDILEDIVLTLTLFEDREMIEERLKTYAHLFDDKVMKQLKRRRYTGWGRLSRKLINGIRDKQSGKTILDFLKSDGFANRNFMQLIHDDSLTFKEDIQKAQVSGQGDSLHEHIANLAGSPAIKKGILQTVKVVDELVKVMGRHKPENIVIEMARENQTTQKGQKNSRERMKRIEEGIKELGSQILKEHPVENTQLQNEKLYLYYLQNGRDMYVDQELDINRLSDYDVDHIVPQSFLKDDSIDNKVLTRSDKARGKSDNVPSEEVVKKMKNYWRQLLNAKLITQRKFDNLTKAERGGLSELDKAGFIKRQLVETRQITKHVAQILDSRMNTKYDENDKLIREVKVITLKSKLVSDFRKDFQFYKVREINNYHHAHDAYLNAVVGTALIKKYPKLESEFVYGDYKVYDVRKMIAKSEQEIGKATAKYFFYSNIMNFFKTEITLANGEIRKRPLIETNGETGEIVWDKGRDFATVRKVLSMPQVNIVKKTEVQTGGFSKESILPKRNSDKLIARKKDWDPKKYGGFDSPTVAYSVLVVAKVEKGKSKKLKSVKELLGITIMERSSFEKNPIDFLEAKGYKEVKKDLIIKLPKYSLFELENGRKRMLASAGELQKGNELALPSKYVNFLYLASHYEKLKGSPEDNEQKQLFVEQHKHYLDEIIEQISEFSKRVILADANLDKVLSAYNKHRDKPIREQAENIIHLFTLTNLGAPAAFKYFDTTIDRKRYTSTKEVLDATLIHQSITGLYETRIDLSQLGGDGGPAPEAAAKGGSGGTLNIEDEYRLHETSKEPDVSLGSTWLSDFPQAWAETGGMGLAVRQAPLIIPLKATSTPVSIKQYPMSQEARLGIKPHIQRLLDQGILVPCQSPWNTPLLPVKKPGTNDYRPVQDLREVNKRVEDIHPTVPNPYNLLSGLPPSHQWYTVLDLKDAFFCLRLHPTSQPLFAFEWRDPEMGISGQLTWTRLPQGFKNSPTLFNEALHRDLADFRIQHPDLILLQYVDDLLLAATSELDCQQGTRALLQTLGNLGYRASAKKAQICQKQVKYLGYLLKEGQRWLTEARKETVMGQPTPKTPRQLREFLGKAGFCRLFIPGFAEMAAPLYPLTKPGTLFNWGPDQQKAYQEIKQALLTAPALGLPDLTKPFELFVDEKQGYAKGVLTQKLGPWRRPVAYLSKKLDPVAAGWPPCLRMVAAIAVLTKDAGKLTMGQPLVILAPHAVEALVKQPPDRWLSNARMTHYQALLLDTDRVQFGPVVALNPATLLPLPEEGLQHNCLDILAEAHGTRPDLTDQPLPDADHTWYTDGSSLLQEGQRKAGAAVTTETEVIWAKALPAGTSAQRAELIALTQALKMAEGKKLNVYTDSRYAFATAHIHGEIYRRRGWLTSEGKEIKNKDEILALLKALFLPKRLSIIHCPGHQKGHSAEARGNRMADQAARKAAITETPDTSTLLIENSSPSGGSKRTADGSEFEAGKRTADGSEFEKRTADGSEFESPKKKAKVE

SEQ ID NO: 2925 - protein, 2116 aa, synthetic construct; identical to SEQ ID NO: 2628

SEQ ID NO: 2926 - protein, 2116 aa, synthetic construct; identical to SEQ ID NO: 2640

SEQ ID NO: 2927 - protein, 2109 aa, synthetic construct
MPAAKRVKLDGGDKKYSIGLDIGTNSVGWAVITDEYKVPSKKFKVLGNTDRHSIKKNLIGALLFDSGETAEATRLKRTARRRYTRRKNRICYLQEIFSNEMAKVDDSFFHRLEESFLVEEDKKHERHPIFGNIVDEVAYHEKYPTIYHLRKKLVDSTDKADLRLIYLALAHMIKFRGHFLIEGDLNPDNSDVDKLFIQLVQTYNQLFEENPINASGVDAKAILSARLSKSRRLENLIAQLPGEKKNGLFGNLIALSLGLTPNFKSNFDLAEDAKLQLSKDTYDDDLDNLLAQIGDQYADLFLAAKNLSDAILLSDILRVNTEITKAPLSASMIKRYDEHHQDLTLLKALVRQQLPEKYKEIFFDQSKNGYAGYIDGGASQEEFYKFIKPILEKMDGTEELLVKLNREDLLRKQRTFDNGSIPHQIHLGELHAILRRQEDFYPFLKDNREKIEKILTFRIPYYVGPLARGNSRFAWMTRKSEETITPWNFEEVVDKGASAQSFIERMTNFDKNLPNEKVLPKHSLLYEYFTVYNELTKVKYVTEGMRKPAFLSGEQKKAIVDLLFKTNRKVTVKQLKEDYFKKIECFDSVEISGVEDRFNASLGTYHDLLKIIKDKDFLDNEENEDILEDIVLTLTLFEDREMIEERLKTYAHLFDDKVMKQLKRRRYTGWGRLSRKLINGIRDKQSGKTILDFLKSDGFANRNFMQLIHDDSLTFKEDIQKAQVSGQGDSLHEHIANLAGSPAIKKGILQTVKVVDELVKVMGRHKPENIVIEMARENQTTQKGQKNSRERMKRIEEGIKELGSQILKEHPVENTQLQNEKLYLYYLQNGRDMYVDQELDINRLSDYDVDHIVPQSFLKDDSIDNKVLTRSDKARGKSDNVPSEEVVKKMKNYWRQLLNAKLITQRKFDNLTKAERGGLSELDKAGFIKRQLVETRQITKHVAQILDSRMNTKYDENDKLIREVKVITLKSKLVSDFRKDFQFYKVREINNYHHAHDAYLNAVVGTALIKKYPKLESEFVYGDYKVYDVRKMIAKSEQEIGKATAKYFFYSNIMNFFKTEITLANGEIRKRPLIETNGETGEIVWDKGRDFATVRKVLSMPQVNIVKKTEVQTGGFSKESILPKRNSDKLIARKKDWDPKKYGGFDSPTVAYSVLVVAKVEKGKSKKLKSVKELLGITIMERSSFEKNPIDFLEAKGYKEVKKDLIIKLPKYSLFELENGRKRMLASAGELQKGNELALPSKYVNFLYLASHYEKLKGSPEDNEQKQLFVEQHKHYLDEIIEQISEFSKRVILADANLDKVLSAYNKHRDKPIREQAENIIHLFTLTNLGAPAAFKYFDTTIDRKRYTSTKEVLDATLIHQSITGLYETRIDLSQLGGDGGGGGGGGTLNIEDEYRLHETSKEPDVSLGSTWLSDFPQAWAETGGMGLAVRQAPLIIPLKATSTPVSIKQYPMSQEARLGIKPHIQRLLDQGILVPCQSPWNTPLLPVKKPGTNDYRPVQDLREVNKRVEDIHPTVPNPYNLLSGLPPSHQWYTVLDLKDAFFCLRLHPTSQPLFAFEWRDPEMGISGQLTWTRLPQGFKNSPTLFNEALHRDLADFRIQHPDLILLQYVDDLLLAATSELDCQQGTRALLQTLGNLGYRASAKKAQICQKQVKYLGYLLKEGQRWLTEARKETVMGQPTPKTPRQLREFLGKAGFCRLFIPGFAEMAAPLYPLTKPGTLFNWGPDQQKAYQEIKQALLTAPALGLPDLTKPFELFVDEKQGYAKGVLTQKLGPWRRPVAYLSKKLDPVAAGWPPCLRMVAAIAVLTKDAGKLTMGQPLVILAPHAVEALVKQPPDRWLSNARMTHYQALLLDTDRVQFGPVVALNPATLLPLPEEGLQHNCLDILAEAHGTRPDLTDQPLPDADHTWYTDGSSLLQEGQRKAGAAVTTETEVIWAKALPAGTSAQRAELIALTQALKMAEGKKLNVYTDSRYAFATAHIHGEIYRRRGWLTSEGKEIKNKDEILALLKALFLPKRLSIIHCPGHQKGHSAEARGNRMADQAARKAAITETPDTSTLLIENSSPSGGSKRTADGSEFEAGKRTADGSEFEKRTADGSEFESPKKKAKVE

SEQ ID NO: 2928 - protein, 2116 aa, synthetic construct
MPAAKRVKLDGGDKKYSIGLDIGTNSVGWAVITDEYKVPSKKFKVLGNTDRHSIKKNLIGALLFDSGETAEATRLKRTARRRYTRRKNRICYLQEIFSNEMAKVDDSFFHRLEESFLVEEDKKHERHPIFGNIVDEVAYHEKYPTIYHLRKKLVDSTDKADLRLIYLALAHMIKFRGHFLIEGDLNPDNSDVDKLFIQLVQTYNQLFEENPINASGVDAKAILSARLSKSRRLENLIAQLPGEKKNGLFGNLIALSLGLTPNFKSNFDLAEDAKLQLSKDTYDDDLDNLLAQIGDQYADLFLAAKNLSDAILLSDILRVNTEITKAPLSASMIKRYDEHHQDLTLLKALVRQQLPEKYKEIFFDQSKNGYAGYIDGGASQEEFYKFIKPILEKMDGTEELLVKLNREDLLRKQRTFDNGSIPHQIHLGELHAILRRQEDFYPFLKDNREKIEKILTFRIPYYVGPLARGNSRFAWMTRKSEETITPWNFEEVVDKGASAQSFIERMTNFDKNLPNEKVLPKHSLLYEYFTVYNELTKVKYVTEGMRKPAFLSGEQKKAIVDLLFKTNRKVTVKQLKEDYFKKIECFDSVEISGVEDRFNASLGTYHDLLKIIKDKDFLDNEENEDILEDIVLTLTLFEDREMIEERLKTYAHLFDDKVMKQLKRRRYTGWGRLSRKLINGIRDKQSGKTILDFLKSDGFANRNFMQLIHDDSLTFKEDIQKAQVSGQGDSLHEHIANLAGSPAIKKGILQTVKVVDELVKVMGRHKPENIVIEMARENQTTQKGQKNSRERMKRIEEGIKELGSQILKEHPVENTQLQNEKLYLYYLQNGRDMYVDQELDINRLSDYDVDHIVPQSFLKDDSIDNKVLTRSDKARGKSDNVPSEEVVKKMKNYWRQLLNAKLITQRKFDNLTKAERGGLSELDKAGFIKRQLVETRQITKHVAQILDSRMNTKYDENDKLIREVKVITLKSKLVSDFRKDFQFYKVREINNYHHAHDAYLNAVVGTALIKKYPKLESEFVYGDYKVYDVRKMIAKSEQEIGKATAKYFFYSNIMNFFKTEITLANGEIRKRPLIETNGETGEIVWDKGRDFATVRKVLSMPQVNIVKKTEVQTGGFSKESILPKRNSDKLIARKKDWDPKKYGGFDSPTVAYSVLVVAKVEKGKSKKLKSVKELLGITIMERSSFEKNPIDFLEAKGYKEVKKDLIIKLPKYSLFELENGRKRMLASAGELQKGNELALPSKYVNFLYLASHYEKLKGSPEDNEQKQLFVEQHKHYLDEIIEQISEFSKRVILADANLDKVLSAYNKHRDKPIREQAENIIHLFTLTNLGAPAAFKYFDTTIDRKRYTSTKEVLDATLIHQSITGLYETRIDLSQLGGDGGGGGGGSEAAAKGGTLNIEDEYRLHETSKEPDVSLGSTWLSDFPQAWAETGGMGLAVRQAPLIIPLKATSTPVSIKQYPMSQEARLGIKPHIQRLLDQGILVPCQSPWNTPLLPVKKPGTNDYRPVQDLREVNKRVEDIHPTVPNPYNLLSGLPPSHQWYTVLDLKDAFFCLRLHPTSQPLFAFEWRDPEMGISGQLTWTRLPQGFKNSPTLFNEALHRDLADFRIQHPDLILLQYVDDLLLAATSELDCQQGTRALLQTLGNLGYRASAKKAQICQKQVKYLGYLLKEGQRWLTEARKETVMGQPTPKTPRQLREFLGKAGFCRLFIPGFAEMAAPLYPLTKPGTLFNWGPDQQKAYQEIKQALLTAPALGLPDLTKPFELFVDEKQGYAKGVLTQKLGPWRRPVAYLSKKLDPVAAGWPPCLRMVAAIAVLTKDAGKLTMGQPLVILAPHAVEALVKQPPDRWLSNARMTHYQALLLDTDRVQFGPVVALNPATLLPLPEEGLQHNCLDILAEAHGTRPDLTDQPLPDADHTWYTDGSSLLQEGQRKAGAAVTTETEVIWAKALPAGTSAQRAELIALTQALKMAEGKKLNVYTDSRYAFATAHIHGEIYRRRGWLTSEGKEIKNKDEILALLKALFLPKRLSIIHCPGHQKGHSAEARGNRMADQAARKAAITETPDTSTLLIENSSPSGGSKRTADGSEFEAGKRTADGSEFEKRTADGSEFESPKKKAKVE

SEQ ID NO: 2929 - protein, 2113 aa, synthetic construct; identical to SEQ ID NO: 2700

SEQ ID NO: 2930 - protein, 2114 aa, synthetic construct; identical to SEQ ID NO: 2656

SEQ ID NO: 2931 - protein, 2116 aa, synthetic construct; identical to SEQ ID NO: 2652

SEQ ID NO: 2932 - protein, 2120 aa, synthetic construct; identical to SEQ ID NO: 2623

SEQ ID NO: 2933 - protein, 2113 aa, synthetic construct; identical to SEQ ID NO: 2657

SEQ ID NO: 2934 - protein, 2111 aa, synthetic construct; identical to SEQ ID NO: 2693

SEQ ID NO: 2935 - protein, 2108 aa, synthetic construct; identical to SEQ ID NO: 2646

SEQ ID NO: 2936 - protein, 2111 aa, synthetic construct
MPAAKRVKLDGGDKKYSIGLDIGTNSVGWAVITDEYKVPSKKFKVLGNTDRHSIKKNLIGALLFDSGETAEATRLKRTARRRYTRRKNRICYLQEIFSNEMAKVDDSFFHRLEESFLVEEDKKHERHPIFGNIVDEVAYHEKYPTIYHLRKKLVDSTDKADLRLIYLALAHMIKFRGHFLIEGDLNPDNSDVDKLFIQLVQTYNQLFEENPINASGVDAKAILSARLSKSRRLENLIAQLPGEKKNGLFGNLIALSLGLTPNFKSNFDLAEDAKLQLSKDTYDDDLDNLLAQIGDQYADLFLAAKNLSDAILLSDILRVNTEITKAPLSASMIKRYDEHHQDLTLLKALVRQQLPEKYKEIFFDQSKNGYAGYIDGGASQEEFYKFIKPILEKMDGTEELLVKLNREDLLRKQRTFDNGSIPHQIHLGELHAILRRQEDFYPFLKDNREKIEKILTFRIPYYVGPLARGNSRFAWMTRKSEETITPWNFEEVVDKGASAQSFIERMTNFDKNLPNEKVLPKHSLLYEYFTVYNELTKVKYVTEGMRKPAFLSGEQKKAIVDLLFKTNRKVTVKQLKEDYFKKIECFDSVEISGVEDRFNASLGTYHDLLKIIKDKDFLDNEENEDILEDIVLTLTLFEDREMIEERLKTYAHLFDDKVMKQLKRRRYTGWGRLSRKLINGIRDKQSGKTILDFLKSDGFANRNFMQLIHDDSLTFKEDIQKAQVSGQGDSLHEHIANLAGSPAIKKGILQTVKVVDELVKVMGRHKPENIVIEMARENQTTQKGQKNSRERMKRIEEGIKELGSQILKEHPVENTQLQNEKLYLYYLQNGRDMYVDQELDINRLSDYDVDHIVPQSFLKDDSIDNKVLTRSDKARGKSDNVPSEEVVKKMKNYWRQLLNAKLITQRKFDNLTKAERGGLSELDKAGFIKRQLVETRQITKHVAQILDSRMNTKYDENDKLIREVKVITLKSKLVSDFRKDFQFYKVREINNYHHAHDAYLNAVVGTALIKKYPKLESEFVYGDYKVYDVRKMIAKSEQEIGKATAKYFFYSNIMNFFKTEITLANGEIRKRPLIETNGETGEIVWDKGRDFATVRKVLSMPQVNIVKKTEVQTGGFSKESILPKRNSDKLIARKKDWDPKKYGGFDSPTVAYSVLVVAKVEKGKSKKLKSVKELLGITIMERSSFEKNPIDFLEAKGYKEVKKDLIIKLPKYSLFELENGRKRMLASAGELQKGNELALPSKYVNFLYLASHYEKLKGSPEDNEQKQLFVEQHKHYLDEIIEQISEFSKRVILADANLDKVLSAYNKHRDKPIREQAENIIHLFTLTNLGAPAAFKYFDTTIDRKRYTSTKEVLDATLIHQSITGLYETRIDLSQLGGDGGPAPGSSGGTLNIEDEYRLHETSKEPDVSLGSTWLSDFPQAWAETGGMGLAVRQAPLIIPLKATSTPVSIKQYPMSQEARLGIKPHIQRLLDQGILVPCQSPWNTPLLPVKKPGTNDYRPVQDLREVNKRVEDIHPTVPNPYNLLSGLPPSHQWYTVLDLKDAFFCLRLHPTSQPLFAFEWRDPEMGISGQLTWTRLPQGFKNSPTLFNEALHRDLADFRIQHPDLILLQYVDDLLLAATSELDCQQGTRALLQTLGNLGYRASAKKAQICQKQVKYLGYLLKEGQRWLTEARKETVMGQPTPKTPRQLREFLGKAGFCRLFIPGFAEMAAPLYPLTKPGTLFNWGPDQQKAYQEIKQALLTAPALGLPDLTKPFELFVDEKQGYAKGVLTQKLGPWRRPVAYLSKKLDPVAAGWPPCLRMVAAIAVLTKDAGKLTMGQPLVILAPHAVEALVKQPPDRWLSNARMTHYQALLLDTDRVQFGPVVALNPATLLPLPEEGLQHNCLDILAEAHGTRPDLTDQPLPDADHTWYTDGSSLLQEGQRKAGAAVTTETEVIWAKALPAGTSAQRAELIALTQALKMAEGKKLNVYTDSRYAFATAHIHGEIYRRRGWLTSEGKEIKNKDEILALLKALFLPKRLSIIHCPGHQKGHSAEARGNRMADQAARKAAITETPDTSTLLIENSSPSGGSKRTADGSEFEAGKRTADGSEFEKRTADGSEFESPKKKAKVE

SEQ ID NO: 2937 - protein, 2120 aa, synthetic construct; identical to SEQ ID NO: 2636

SEQ ID NO: 2938 - protein, 2116 aa, synthetic construct; identical to SEQ ID NO: 2661

SEQ ID NO: 2939 - protein, 2120 aa, synthetic construct; identical to SEQ ID NO: 2680

SEQ ID NO: 2940 - protein, 2116 aa, synthetic construct
MPAAKRVKLDGGDKKYSIGLDIGTNSVGWAVITDEYKVPSKKFKVLGNTDRHSIKKNLIGALLFDSGETAEATRLKRTARRRYTRRKNRICYLQEIFSNEMAKVDDSFFHRLEESFLVEEDKKHERHPIFGNIVDEVAYHEKYPTIYHLRKKLVDSTDKADLRLIYLALAHMIKFRGHFLIEGDLNPDNSDVDKLFIQLVQTYNQLFEENPINASGVDAKAILSARLSKSRRLENLIAQLPGEKKNGLFGNLIALSLGLTPNFKSNFDLAEDAKLQLSKDTYDDDLDNLLAQIGDQYADLFLAAKNLSDAILLSDILRVNTEITKAPLSASMIKRYDEHHQDLTLLKALVRQQLPEKYKEIFFDQSKNGYAGYIDGGASQEEFYKFIKPILEKMDGTEELLVKLNREDLLRKQRTFDNGSIPHQIHLGELHAILRRQEDFYPFLKDNREKIEKILTFRIPYYVGPLARGNSRFAWMTRKSEETITPWNFEEVVDKGASAQSFIERMTNFDKNLPNEKVLPKHSLLYEYFTVYNELTKVKYVTEGMRKPAFLSGEQKKAIVDLLFKTNRKVTVKQLKEDYFKKIECFDSVEISGVEDRFNASLGTYHDLLKIIKDKDFLDNEENEDILEDIVLTLTLFEDREMIEERLKTYAHLFDDKVMKQLKRRRYTGWGRLSRKLINGIRDKQSGKTILDFLKSDGFANRNFMQLIHDDSLTFKEDIQKAQVSGQGDSLHEHIANLAGSPAIKKGILQTVKVVDELVKVMGRHKPENIVIEMARENQTTQKGQKNSRERMKRIEEGIKELGSQILKEHPVENTQLQNEKLYLYYLQNGRDMYVDQELDINRLSDYDVDHIVPQSFLKDDSIDNKVLTRSDKARGKSDNVPSEEVVKKMKNYWRQLLNAKLITQRKFDNLTKAERGGLSELDKAGFIKRQLVETRQITKHVAQILDSRMNTKYDENDKLIREVKVITLKSKLVSDFRKDFQFYKVREINNYHHAHDAYLNAVVGTALIKKYPKLESEFVYGDYKVYDVRKMIAKSEQEIGKATAKYFFYSNIMNFFKTEITLANGEIRKRPLIETNGETGEIVWDKGRDFATVRKVLSMPQVNIVKKTEVQTGGFSKESILPKRNSDKLIARKKDWDPKKYGGFDSPTVAYSVLVVAKVEKGKSKKLKSVKELLGITIMERSSFEKNPIDFLEAKGYKEVKKDLIIKLPKYSLFELENGRKRMLASAGELQKGNELALPSKYVNFLYLASHYEKLKGSPEDNEQKQLFVEQHKHYLDEIIEQISEFSKRVILADANLDKVLSAYNKHRDKPIREQAENIIHLFTLTNLGAPAAFKYFDTTIDRKRYTSTKEVLDATLIHQSITGLYETRIDLSQLGGDGGGGGPAPEAAAKGGTLNIEDEYRLHETSKEPDVSLGSTWLSDFPQAWAETGGMGLAVRQAPLIIPLKATSTPVSIKQYPMSQEARLGIKPHIQRLLDQGILVPCQSPWNTPLLPVKKPGTNDYRPVQDLREVNKRVEDIHPTVPNPYNLLSGLPPSHQWYTVLDLKDAFFCLRLHPTSQPLFAFEWRDPEMGISGQLTWTRLPQGFKNSPTLFNEALHRDLADFRIQHPDLILLQYVDDLLLAATSELDCQQGTRALLQTLGNLGYRASAKKAQICQKQVKYLGYLLKEGQRWLTEARKETVMGQPTPKTPRQLREFLGKAGFCRLFIPGFAEMAAPLYPLTKPGTLFNWGPDQQKAYQEIKQALLTAPALGLPDLTKPFELFVDEKQGYAKGVLTQKLGPWRRPVAYLSKKLDPVAAGWPPCLRMVAAIAVLTKDAGKLTMGQPLVILAPHAVEALVKQPPDRWLSNARMTHYQALLLDTDRVQFGPVVALNPATLLPLPEEGLQHNCLDILAEAHGTRPDLTDQPLPDADHTWYTDGSSLLQEGQRKAGAAVTTETEVIWAKALPAGTSAQRAELIALTQALKMAEGKKLNVYTDSRYAFATAHIHGEIYRRRGWLTSEGKEIKNKDEILALLKALFLPKRLSIIHCPGHQKGHSAEARGNRMADQAARKAAITETPDTSTLLIENSSPSGGSKRTADGSEFEAGKRTADGSEFEKRTADGSEFESPKKKAKVE

SEQ ID NO: 2941 - protein, 2120 aa, synthetic construct; identical to SEQ ID NO: 2669

SEQ ID NO: 2942 - protein, 2116 aa, synthetic construct; identical to SEQ ID NO: 2695

SEQ ID NO: 2943 - protein, 2123 aa, synthetic construct; identical to SEQ ID NO: 2612

SEQ ID NO: 2944 - protein, 2110 aa, synthetic construct; identical to SEQ ID NO: 2691

SEQ ID NO: 2945 - protein, 2113 aa, synthetic construct; identical to SEQ ID NO: 2659

SEQ ID NO: 2946 - protein, 2114 aa, synthetic construct; identical to SEQ ID NO: 2694

SEQ ID NO: 2947 - protein, 2111 aa, synthetic construct; identical to SEQ ID NO: 2682

SEQ ID NO: 2948 - protein, 2114 aa, synthetic construct; identical to SEQ ID NO: 2675

SEQ ID NO: 2949 - protein, 2116 aa, synthetic construct; identical to SEQ ID NO: 2686

SEQ ID NO: 2950 - protein, 2114 aa, synthetic construct; identical to SEQ ID NO: 2632

SEQ ID NO: 2951 - protein, 2113 aa, synthetic construct; identical to SEQ ID NO: 2625

SEQ ID NO: 2952 - protein, 2114 aa, synthetic construct; identical to SEQ ID NO: 2699

SEQ ID NO: 2953 - protein, 2113 aa, synthetic construct
MPAAKRVKLDGGDKKYSIGLDIGTNSVGWAVITDEYKVPSKKFKVLGNTDRHSIKKNLIGALLFDSGETAEATRLKRTARRRYTRRKNRICYLQEIFSNEMAKVDDSFFHRLEESFLVEEDKKHERHPIFGNIVDEVAYHEKYPTIYHLRKKLVDSTDKADLRLIYLALAHMIKFRGHFLIEGDLNPDNSDVDKLFIQLVQTYNQLFEENPINASGVDAKAILSARLSKSRRLENLIAQLPGEKKNGLFGNLIALSLGLTPNFKSNFDLAEDAKLQLSKDTYDDDLDNLLAQIGDQYADLFLAAKNLSDAILLSDILRVNTEITKAPLSASMIKRYDEHHQDLTLLKALVRQQLPEKYKEIFFDQSKNGYAGYIDGGASQEEFYKFIKPILEKMDGTEELLVKLNREDLLRKQRTFDNGSIPHQIHLGELHAILRRQEDFYPFLKDNREKIEKILTFRIPYYVGPLARGNSRFAWMTRKSEETITPWNFEEVVDKGASAQSFIERMTNFDKNLPNEKVLPKHSLLYEYFTVYNELTKVKYVTEGMRKPAFLSGEQKKAIVDLLFKTNRKVTVKQLKEDYFKKIECFDSVEISGVEDRFNASLGTYHDLLKIIKDKDFLDNEENEDILEDIVLTLTLFEDREMIEERLKTYAHLFDDKVMKQLKRRRYTGWGRLSRKLINGIRDKQSGKTILDFLKSDGFANRNFMQLIHDDSLTFKEDIQKAQVSGQGDSLHEHIANLAGSPAIKKGILQTVKVVDELVKVMGRHKPENIVIEMARENQTTQKGQKNSRERMKRIEEGIKELGSQILKEHPVENTQLQNEKLYLYYLQNGRDMYVDQELDINRLSDYDVDHIVPQSFLKDDSIDNKVLTRSDKARGKSDNVPSEEVVKKMKNYWRQLLNAKLITQRKFDNLTKAERGGLSELDKAGFIKRQLVETRQITKHVAQILDSRMNTKYDENDKLIREVKVITLKSKLVSDFRKDFQFYKVREINNYHHAHDAYLNAVVGTALIKKYPKLESEFVYGDYKVYDVRKMIAKSEQEIGKATAKYFFYSNIMNFFKTEITLANGEIRKRPLIETNGETGEIVWDKGRDFATVRKVLSMPQVNIVKKTEVQTGGFSKESILPKRNSDKLIARKKDWDPKKYGGFDSPTVAYSVLVVAKVEKGKSKKLKSVKELLGITIMERSSFEKNPIDFLEAKGYKEVKKDLIIKLPKYSLFELENGRKRMLASAGELQKGNELALPSKYVNFLYLASHYEKLKGSPEDNEQKQLFVEQHKHYLDEIIEQISEFSKRVILADANLDKVLSAYNKHRDKPIREQAENIIHLFTLTNLGAPAAFKYFDTTIDRKRYTSTKEVLDATLIHQSITGLYETRIDLSQLGGDGGGGGEAAAKGGTLNIEDEYRLHETSKEPDVSLGSTWLSDFPQAWAETGGMGLAVRQAPLIIPLKATSTPVSIKQYPMSQEARLGIKPHIQRLLDQGILVPCQSPWNTPLLPVKKPGTNDYRPVQDLREVNKRVEDIHPTVPNPYNLLSGLPPSHQWYTVLDLKDAFFCLRLHPTSQPLFAFEWRDPEMGISGQLTWTRLPQGFKNSPTLFNEALHRDLADFRIQHPDLILLQYVDDLLLAATSELDCQQGTRALLQTLGNLGYRASAKKAQICQKQVKYLGYLLKEGQRWLTEARKETVMGQPTPKTPRQLREFLGKAGFCRLFIPGFAEMAAPLYPLTKPGTLFNWGPDQQKAYQEIKQALLTAPALGLPDLTKPFELFVDEKQGYAKGVLTQKLGPWRRPVAYLSKKLDPVAAGWPPCLRMVAAIAVLTKDAGKLTMGQPLVILAPHAVEALVKQPPDRWLSNARMTHYQALLLDTDRVQFGPVVALNPATLLPLPEEGLQHNCLDILAEAHGTRPDLTDQPLPDADHTWYTDGSSLLQEGQRKAGAAVTTETEVIWAKALPAGTSAQRAELIALTQALKMAEGKKLNVYTDSRYAFATAHIHGEIYRRRGWLTSEGKEIKNKDEILALLKALFLPKRLSIIHCPGHQKGHSAEARGNRMADQAARKAAITETPDTSTLLIENSSPSGGSKRTADGSEFEAGKRTADGSEFEKRTADGSEFESPKKKAKVE

SEQ ID NO: 2954 - protein, 2114 aa, synthetic construct
MPAAKRVKLDGGDKKYSIGLDIGTNSVGWAVITDEYKVPSKKFKVLGNTDRHSIKKNLIGALLFDSGETAEATRLKRTARRRYTRRKNRICYLQEIFSNEMAKVDDSFFHRLEESFLVEEDKKHERHPIFGNIVDEVAYHEKYPTIYHLRKKLVDSTDKADLRLIYLALAHMIKFRGHFLIEGDLNPDNSDVDKLFIQLVQTYNQLFEENPINASGVDAKAILSARLSKSRRLENLIAQLPGEKKNGLFGNLIALSLGLTPNFKSNFDLAEDAKLQLSKDTYDDDLDNLLAQIGDQYADLFLAAKNLSDAILLSDILRVNTEITKAPLSASMIKRYDEHHQDLTLLKALVRQQLPEKYKEIFFDQSKNGYAGYIDGGASQEEFYKFIKPILEKMDGTEELLVKLNREDLLRKQRTFDNGSIPHQIHLGELHAILRRQEDFYPFLKDNREKIEKILTFRIPYYVGPLARGNSRFAWMTRKSEETITPWNFEEVVDKGASAQSFIERMTNFDKNLPNEKVLPKHSLLYEYFTVYNELTKVKYVTEGMRKPAFLSGEQKKAIVDLLFKTNRKVTVKQLKEDYFKKIECFDSVEISGVEDRFNASLGTYHDLLKIIKDKDFLDNEENEDILEDIVLTLTLFEDREMIEERLKTYAHLFDDKVMKQLKRRRYTGWGRLSRKLINGIRDKQSGKTILDFLKSDGFANRNFMQLIHDDSLTFKEDIQKAQVSGQGDSLHEHIANLAGSPAIKKGILQTVKVVDELVKVMGRHKPENIVIEMARENQTTQKGQKNSRERMKRIEEGIKELGSQILKEHPVENTQLQNEKLYLYYLQNGRDMYVDQELDINRLSDYDVDHIVPQSFLKDDSIDNKVLTRSDKARGKSDNVPSEEVVKKMKNYWRQLLNAKLITQRKFDNLTKAERGGLSELDKAGFIKRQLVETRQITKHVAQILDSRMNTKYDENDKLIREVKVITLKSKLVSDFRKDFQFYKVREINNYHHAHDAYLNAVVGTALIKKYPKLESEFVYGDYKVYDVRKMIAKSEQEIGKATAKYFFYSNIMNFFKTEITLANGEIRKRPLIETNGETGEIVWDKGRDFATVRKVLSMPQVNIVKKTEVQTGGFSKESILPKRNSDKLIARKKDWDPKKYGGFDSPTVAYSVLVVAKVEKGKSKKLKSVKELLGITIMERSSFEKNPIDFLEAKGYKEVKKDLIIKLPKYSLFELENGRKRMLASAGELQKGNELALPSKYVNFLYLASHYEKLKGSPEDNEQKQLFVEQHKHYLDEIIEQISEFSKRVILADANLDKVLSAYNKHRDKPIREQAENIIHLFTLTNLGAPAAFKYFDTTIDRKRYTSTKEVLDATLIHQSITGLYETRIDLSQLGGDGGGSSGGGPAPGGTLNIEDEYRLHETSKEPDVSLGSTWLSDFPQAWAETGGMGLAVRQAPLIIPLKATSTPVSIKQYPMSQEARLGIKPHIQRLLDQGILVPCQSPWNTPLLPVKKPGTNDYRPVQDLREVNKRVEDIHPTVPNPYNLLSGLPPSHQWYTVLDLKDAFFCLRLHPTSQPLFAFEWRDPEMGISGQLTWTRLPQGFKNSPTLFNEALHRDLADFRIQHPDLILLQYVDDLLLAATSELDCQQGTRALLQTLGNLGYRASAKKAQICQKQVKYLGYLLKEGQRWLTEARKETVMGQPTPKTPRQLREFLGKAGFCRLFIPGFAEMAAPLYPLTKPGTLFNWGPDQQKAYQEIKQALLTAPALGLPDLTKPFELFVDEKQGYAKGVLTQKLGPWRRPVAYLSKKLDPVAAGWPPCLRMVAAIAVLTKDAGKLTMGQPLVILAPHAVEALVKQPPDRWLSNARMTHYQALLLDTDRVQFGPVVALNPATLLPLPEEGLQHNCLDILAEAHGTRPDLTDQPLPDADHTWYTDGSSLLQEGQRKAGAAVTTETEVIWAKALPAGTSAQRAELIALTQALKMAEGKKLNVYTDSRYAFATAHIHGEIYRRRGWLTSEGKEIKNKDEILALLKALFLPKRLSIIHCPGHQKGHSAEARGNRMADQAARKAAITETPDTSTLLIENSSPSGGSKRTADGSEFEAGKRTADGSEFEKRTADGSEFESPKKKAKVE

SEQ ID NO: 2955 - protein, 2114 aa, synthetic construct; identical to SEQ ID NO: 2689

SEQ ID NO: 2956 - protein, 1999 aa, synthetic construct
MPAAKRVKLDGGDKKYSIGLDIGTNSVGWAVITDEYKVPSKKFKVLGNTDRHSIKKNLIGALLFDSGETAEATRLKRTARRRYTRRKNRICYLQEIFSNEMAKVDDSFFHRLEESFLVEEDKKHERHPIFGNIVDEVAYHEKYPTIYHLRKKLVDSTDKADLRLIYLALAHMIKFRGHFLIEGDLNPDNSDVDKLFIQLVQTYNQLFEENPINASGVDAKAILSARLSKSRRLENLIAQLPGEKKNGLFGNLIALSLGLTPNFKSNFDLAEDAKLQLSKDTYDDDLDNLLAQIGDQYADLFLAAKNLSDAILLSDILRVNTEITKAPLSASMIKRYDEHHQDLTLLKALVRQQLPEKYKEIFFDQSKNGYAGYIDGGASQEEFYKFIKPILEKMDGTEELLVKLNREDLLRKQRTFDNGSIPHQIHLGELHAILRRQEDFYPFLKDNREKIEKILTFRIPYYVGPLARGNSRFAWMTRKSEETITPWNFEEVVDKGASAQSFIERMTNFDKNLPNEKVLPKHSLLYEYFTVYNELTKVKYVTEGMRKPAFLSGEQKKAIVDLLFKTNRKVTVKQLKEDYFKKIECFDSVEISGVEDRFNASLGTYHDLLKIIKDKDFLDNEENEDILEDIVLTLTLFEDREMIEERLKTYAHLFDDKVMKQLKRRRYTGWGRLSRKLINGIRDKQSGKTILDFLKSDGFANRNFMQLIHDDSLTFKEDIQKAQVSGQGDSLHEHIANLAGSPAIKKGILQTVKVVDELVKVMGRHKPENIVIEMARENQTTQKGQKNSRERMKRIEEGIKELGSQILKEHPVENTQLQNEKLYLYYLQNGRDMYVDQELDINRLSDYDVDHIVPQSFLKDDSIDNKVLTRSDKARGKSDNVPSEEVVKKMKNYWRQLLNAKLITQRKFDNLTKAERGGLSELDKAGFIKRQLVETRQITKHVAQILDSRMNTKYDENDKLIREVKVITLKSKLVSDFRKDFQFYKVREINNYHHAHDAYLNAVVGTALIKKYPKLESEFVYGDYKVYDVRKMIAKSEQEIGKATAKYFFYSNIMNFFKTEITLANGEIRKRPLIETNGETGEIVWDKGRDFATVRKVLSMPQVNIVKKTEVQTGGFSKESILPKRNSDKLIARKKDWDPKKYGGFDSPTVAYSVLVVAKVEKGKSKKLKSVKELLGITIMERSSFEKNPIDFLEAKGYKEVKKDLIIKLPKYSLFELENGRKRMLASAGELQKGNELALPSKYVNFLYLASHYEKLKGSPEDNEQKQLFVEQHKHYLDEIIEQISEFSKRVILADANLDKVLSAYNKHRDKPIREQAENIIHLFTLTNLGAPAAFKYFDTTIDRKRYTSTKEVLDATLIHQSITGLYETRIDLSQLGGDGGGGGGSSGGSGGGVLDAPPSHIGLEHLPPPPEVPQFPLNLERLQALQDLVHRSLEAGYISPWDGPGNNPVFPVRKPNGAWRFVHDLRVTNALTKPIPALSPGPPDLTAIPTHLPHIICLDLKDAFFQIPVEDRFRSYFAFTLPTPGGLQPHRRFAWRVLPQGFINSPALFQRALQEPLRQVSAAFSQSLLVSYMDDILYVSPTEEQRLQCYQTMAAHLRDLGFQVASEKTRQTPSPVPFLGQMVHERMVTYQSLPTLQISSPISLHQLQTVLGDLQWVSRGTPTTRRPLQLLYSSLKPIDDPRAIIHLSPEQQQGIAELRQALSHNARSRYNEQEPLLAYVHLTRAGSTLVLFQKGAQFPLAYFQTPLTDNQASPWGLLLLLGCQYLQAQALSSYAKTILKYYHNLPKTSLDNWIQSSEDPRVQELLQLWPQISSQGIQPPGPWKTLVTRAEVFLTPQFSPEPIPAALCLFSDGAARRGAYCLWKDHLLDFQAVPAPESAQKGELAGLLAGLAAAPPEPLNIWVDSKYLYSLLRTLVLGAWLQPDPVPSYALLYKSLLRHPAIFVGHVRSHSSASHPIASLNNYVDQLAGKRTADGSEFEKRTADGSEFESPKKKAKVE

SEQ ID NO: 2957 - protein, 2131 aa, synthetic construct
MPAAKRVKLDGGDKKYSIGLDIGTNSVGWAVITDEYKVPSKKFKVLGNTDRHSIKKNLIGALLFDSGETAEATRLKRTARRRYTRRKNRICYLQEIFSNEMAKVDDSFFHRLEESFLVEEDKKHERHPIFGNIVDEVAYHEKYPTIYHLRKKLVDSTDKADLRLIYLALAHMIKFRGHFLIEGDLNPDNSDVDKLFIQLVQTYNQLFEENPINASGVDAKAILSARLSKSRRLENLIAQLPGEKKNGLFGNLIALSLGLTPNFKSNFDLAEDAKLQLSKDTYDDDLDNLLAQIGDQYADLFLAAKNLSDAILLSDILRVNTEITKAPLSASMIKRYDEHHQDLTLLKALVRQQLPEKYKEIFFDQSKNGYAGYIDGGASQEEFYKFIKPILEKMDGTEELLVKLNREDLLRKQRTFDNGSIPHQIHLGELHAILRRQEDFYPFLKDNREKIEKILTFRIPYYVGPLARGNSRFAWMTRKSEETITPWNFEEVVDKGASAQSFIERMTNFDKNLPNEKVLPKHSLLYEYFTVYNELTKVKYVTEGMRKPAFLSGEQKKAIVDLLFKTNRKVTVKQLKEDYFKKIECFDSVEISGVEDRFNASLGTYHDLLKIIKDKDFLDNEENEDILEDIVLTLTLFEDREMIEERLKTYAHLFDDKVMKQLKRRRYTGWGRLSRKLINGIRDKQSGKTILDFLKSDGFANRNFMQLIHDDSLTFKEDIQKAQVSGQGDSLHEHIANLAGSPAIKKGILQTVKVVDELVKVMGRHKPENIVIEMARENQTTQKGQKNSRERMKRIEEGIKELGSQILKEHPVENTQLQNEKLYLYYLQNGRDMYVDQELDINRLSDYDVDHIVPQSFLKDDSIDNKVLTRSDKARGKSDNVPSEEVVKKMKNYWRQLLNAKLITQRKFDNLTKAERGGLSELDKAGFIKRQLVETRQITKHVAQILDSRMNTKYDENDKLIREVKVITLKSKLVSDFRKDFQFYKVREINNYHHAHDAYLNAVVGTALIKKYPKLESEFVYGDYKVYDVRKMIAKSEQEIGKATAKYFFYSNIMNFFKTEITLANGEIRKRPLIETNGETGEIVWDKGRDFATVRKVLSMPQVNIVKKTEVQTGGFSKESILPKRNSDKLIARKKDWDPKKYGGFDSPTVAYSVLVVAKVEKGKSKKLKSVKELLGITIMERSSFEKNPIDFLEAKGYKEVKKDLIIKLPKYSLFELENGRKRMLASAGELQKGNELALPSKYVNFLYLASHYEKLKGSPEDNEQKQLFVEQHKHYLDEIIEQISEFSKRVILADANLDKVLSAYNKHRDKPIREQAENIIHLFTLTNLGAPAAFKYFDTTIDRKRYTSTKEVLDATLIHQSITGLYETRIDLSQLGGDGGAEAAAKEAAAKEAAAKEAAAKALEAEAAAKEAAAKEAAAKEAAAKAGGTLNIEDEHRLHETSKEPDVSLGSTWLSDFPQAWAETGGMGLAVRQAPLIIPLKATSTPVSIKQYPMSQEARLGIKPHIQRLLDQGILVPCQSPWNTPLLPVKKPGTNDYRPVQDLREVNKRVEDIHPTVPNPYNLLSGLPPSHQWYTVLDLKDAFFCLRLHPTSQPLFAFEWRDPEMGISGQLTWTRLPQGFKNSPTLFDEALHRDLADFRIQHPDLILLQYVDDLLLAATSELDCQQGTRALLQTLGNLGYRASAKKAQICQKQVKYLGYLLKEGQRWLTEARKETVMGQPTPKTPRQLREFLGTAGFCRLWIPGFAEMAAPLYPLTKTGTLFNWGPDQQKAYQEIKQALLTAPALGLPDLTKPFELFVDEKQGYAKGVLTQKLGPWRRPVAYLSKKLDPVAAGWPPCLRMVAAIAVLTKDAGKLTMGQPLVILAPHAVEALVKQPPDRWLSNARMTHYQALLLDTDRVQFGPVVALNPATLLPLPEEGLQHNCLDILAEAHGTRPDLTDQPLPDADHTWYTDGSSLLQEGQRKAGAAVTTETEVIWAKALPAGTSAQRAELIALTQALKMAEGKKLNVYTDSRYAFATAHIHGEIYRRRGLLTSEGKEIKNKDEILALLKALFLPKRLSIIHCPGHQKGHSAEARGNRMADQAARKAAITETPDTSTLLAGKRTADGSEFEKRTADGSEFESPKKKAKVE

SEQ ID NO: 2958 - protein, 2101 aa, synthetic construct
MPAAKRVKLDGGDKKYSIGLDIGTNSVGWAVITDEYKVPSKKFKVLGNTDRHSIKKNLIGALLFDSGETAEATRLKRTARRRYTRRKNRICYLQEIFSNEMAKVDDSFFHRLEESFLVEEDKKHERHPIFGNIVDEVAYHEKYPTIYHLRKKLVDSTDKADLRLIYLALAHMIKFRGHFLIEGDLNPDNSDVDKLFIQLVQTYNQLFEENPINASGVDAKAILSARLSKSRRLENLIAQLPGEKKNGLFGNLIALSLGLTPNFKSNFDLAEDAKLQLSKDTYDDDLDNLLAQIGDQYADLFLAAKNLSDAILLSDILRVNTEITKAPLSASMIKRYDEHHQDLTLLKALVRQQLPEKYKEIFFDQSKNGYAGYIDGGASQEEFYKFIKPILEKMDGTEELLVKLNREDLLRKQRTFDNGSIPHQIHLGELHAILRRQEDFYPFLKDNREKIEKILTFRIPYYVGPLARGNSRFAWMTRKSEETITPWNFEEVVDKGASAQSFIERMTNFDKNLPNEKVLPKHSLLYEYFTVYNELTKVKYVTEGMRKPAFLSGEQKKAIVDLLFKTNRKVTVKQLKEDYFKKIECFDSVEISGVEDRFNASLGTYHDLLKIIKDKDFLDNEENEDILEDIVLTLTLFEDREMIEERLKTYAHLFDDKVMKQLKRRRYTGWGRLSRKLINGIRDKQSGKTILDFLKSDGFANRNFMQLIHDDSLTFKEDIQKAQVSGQGDSLHEHIANLAGSPAIKKGILQTVKVVDELVKVMGRHKPENIVIEMARENQTTQKGQKNSRERMKRIEEGIKELGSQILKEHPVENTQLQNEKLYLYYLQNGRDMYVDQELDINRLSDYDVDHIVPQSFLKDDSIDNKVLTRSDKARGKSDNVPSEEVVKKMKNYWRQLLNAKLITQRKFDNLTKAERGGLSELDKAGFIKRQLVETRQITKHVAQILDSRMNTKYDENDKLIREVKVITLKSKLVSDFRKDFQFYKVREINNYHHAHDAYLNAVVGTALIKKYPKLESEFVYGDYKVYDVRKMIAKSEQEIGKATAKYFFYSNIMNFFKTEITLANGEIRKRPLIETNGETGEIVWDKGRDFATVRKVLSMPQVNIVKKTEVQTGGFSKESILPKRNSDKLIARKKDWDPKKYGGFDSPTVAYSVLVVAKVEKGKSKKLKSVKELLGITIMERSSFEKNPIDFLEAKGYKEVKKDLIIKLPKYSLFELENGRKRMLASAGELQKGNELALPSKYVNFLYLASHYEKLKGSPEDNEQKQLFVEQHKHYLDEIIEQISEFSKRVILADANLDKVLSAYNKHRDKPIREQAENIIHLFTLTNLGAPAAFKYFDTTIDRKRYTSTKEVLDATLIHQSITGLYETRIDLSQLGGDGGSGSETPGTSESATPESGGTLNIEDEHRLHETSKEPDVSLGSTWLSDFPQAWAETGGMGLAVRQAPLIIPLKATSTPVSIKQYPMSQEARLGIKPHIQRLLDQGILVPCQSPWNTPLLPVKKPGTNDYRPVQDLREVNKRVEDIHPTVPNPYNLLSGLPPSHQWYTVLDLKDAFFCLRLHPTSQPLFAFEWRDPEMGISGQLTWTRLPQGFKNSPTLFDEALHRDLADFRIQHPDLILLQYVDDLLLAATSELDCQQGTRALLQTLGNLGYRASAKKAQICQKQVKYLGYLLKEGQRWLTEARKETVMGQPTPKTPRQLREFLGTAGFCRLWIPGFAEMAAPLYPLTKTGTLFNWGPDQQKAYQEIKQALLTAPALGLPDLTKPFELFVDEKQGYAKGVLTQKLGPWRRPVAYLSKKLDPVAAGWPPCLRMVAAIAVLTKDAGKLTMGQPLVILAPHAVEALVKQPPDRWLSNARMTHYQALLLDTDRVQFGPVVALNPATLLPLPEEGLQHNCLDILAEAHGTRPDLTDQPLPDADHTWYTDGSSLLQEGQRKAGAAVTTETEVIWAKALPAGTSAQRAELIALTQALKMAEGKKLNVYTDSRYAFATAHIHGEIYRRRGLLTSEGKEIKNKDEILALLKALFLPKRLSIIHCPGHQKGHSAEARGNRMADQAARKAAITETPDTSTLLAGKRTADGSEFEKRTADGSEFESPKKKAKVE

SEQ ID NO: 2959 - protein, 2096 aa, synthetic construct
MPAAKRVKLDGGDKKYSIGLDIGTNSVGWAVITDEYKVPSKKFKVLGNTDRHSIKKNLIGALLFDSGETAEATRLKRTARRRYTRRKNRICYLQEIFSNEMAKVDDSFFHRLEESFLVEEDKKHERHPIFGNIVDEVAYHEKYPTIYHLRKKLVDSTDKADLRLIYLALAHMIKFRGHFLIEGDLNPDNSDVDKLFIQLVQTYNQLFEENPINASGVDAKAILSARLSKSRRLENLIAQLPGEKKNGLFGNLIALSLGLTPNFKSNFDLAEDAKLQLSKDTYDDDLDNLLAQIGDQYADLFLAAKNLSDAILLSDILRVNTEITKAPLSASMIKRYDEHHQDLTLLKALVRQQLPEKYKEIFFDQSKNGYAGYIDGGASQEEFYKFIKPILEKMDGTEELLVKLNREDLLRKQRTFDNGSIPHQIHLGELHAILRRQEDFYPFLKDNREKIEKILTFRIPYYVGPLARGNSRFAWMTRKSEETITPWNFEEVVDKGASAQSFIERMTNFDKNLPNEKVLPKHSLLYEYFTVYNELTKVKYVTEGMRKPAFLSGEQKKAIVDLLFKTNRKVTVKQLKEDYFKKIECFDSVEISGVEDRFNASLGTYHDLLKIIKDKDFLDNEENEDILEDIVLTLTLFEDREMIEERLKTYAHLFDDKVMKQLKRRRYTGWGRLSRKLINGIRDKQSGKTILDFLKSDGFANRNFMQLIHDDSLTFKEDIQKAQVSGQGDSLHEHIANLAGSPAIKKGILQTVKVVDELVKVMGRHKPENIVIEMARENQTTQKGQKNSRERMKRIEEGIKELGSQILKEHPVENTQLQNEKLYLYYLQNGRDMYVDQELDINRLSDYDVDHIVPQSFLKDDSIDNKVLTRSDKARGKSDNVPSEEVVKKMKNYWRQLLNAKLITQRKFDNLTKAERGGLSELDKAGFIKRQLVETRQITKHVAQILDSRMNTKYDENDKLIREVKVITLKSKLVSDFRKDFQFYKVREINNYHHAHDAYLNAVVGTALIKKYPKLESEFVYGDYKVYDVRKMIAKSEQEIGKATAKYFFYSNIMNFFKTEITLANGEIRKRPLIETNGETGEIVWDKGRDFATVRKVLSMPQVNIVKKTEVQTGGFSKESILPKRNSDKLIARKKDWDPKKYGGFDSPTVAYSVLVVAKVEKGKSKKLKSVKELLGITIMERSSFEKNPIDFLEAKGYKEVKKDLIIKLPKYSLFELENGRKRMLASAGELQKGNELALPSKYVNFLYLASHYEKLKGSPEDNEQKQLFVEQHKHYLDEIIEQISEFSKRVILADANLDKVLSAYNKHRDKPIREQAENIIHLFTLTNLGAPAAFKYFDTTIDRKRYTSTKEVLDATLIHQSITGLYETRIDLSQLGGDGGEAAAKGGSGGGGGTLNIEDEHRLHETSKEPDVSLGSTWLSDFPQAWAETGGMGLAVRQAPLIIPLKATSTPVSIKQYPMSQEARLGIKPHIQRLLDQGILVPCQSPWNTPLLPVKKPGTNDYRPVQDLREVNKRVEDIHPTVPNPYNLLSGLPPSHQWYTVLDLKDAFFCLRLHPTSQPLFAFEWRDPEMGISGQLTWTRLPQGFKNSPTLFDEALHRDLADFRIQHPDLILLQYVDDLLLAATSELDCQQGTRALLQTLGNLGYRASAKKAQICQKQVKYLGYLLKEGQRWLTEARKETVMGQPTPKTPRQLREFLGTAGFCRLWIPGFAEMAAPLYPLTKTGTLFNWGPDQQKAYQEIKQALLTAPALGLPDLTKPFELFVDEKQGYAKGVLTQKLGPWRRPVAYLSKKLDPVAAGWPPCLRMVAAIAVLTKDAGKLTMGQPLVILAPHAVEALVKQPPDRWLSNARMTHYQALLLDTDRVQFGPVVALNPATLLPLPEEGLQHNCLDILAEAHGTRPDLTDQPLPDADHTWYTDGSSLLQEGQRKAGAAVTTETEVIWAKALPAGTSAQRAELIALTQALKMAEGKKLNVYTDSRYAFATAHIHGEIYRRRGLLTSEGKEIKNKDEILALLKALFLPKRLSIIHCPGHQKGHSAEARGNRMADQAARKAAITETPDTSTLLAGKRTADGSEFEKRTADGSEFESPKKKAKVE

SEQ ID NO: 2960 - protein, 2096 aa, synthetic construct
MPAAKRVKLDGGDKKYSIGLDIGTNSVGWAVITDEYKVPSKKFKVLGNTDRHSIKKNLIGALLFDSGETAEATRLKRTARRRYTRRKNRICYLQEIFSNEMAKVDDSFFHRLEESFLVEEDKKHERHPIFGNIVDEVAYHEKYPTIYHLRKKLVDSTDKADLRLIYLALAHMIKFRGHFLIEGDLNPDNSDVDKLFIQLVQTYNQLFEENPINASGVDAKAILSARLSKSRRLENLIAQLPGEKKNGLFGNLIALSLGLTPNFKSNFDLAEDAKLQLSKDTYDDDLDNLLAQIGDQYADLFLAAKNLSDAILLSDILRVNTEITKAPLSASMIKRYDEHHQDLTLLKALVRQQLPEKYKEIFFDQSKNGYAGYIDGGASQEEFYKFIKPILEKMDGTEELLVKLNREDLLRKQRTFDNGSIPHQIHLGELHAILRRQEDFYPFLKDNREKIEKILTFRIPYYVGPLARGNSRFAWMTRKSEETITPWNFEEVVDKGASAQSFIERMTNFDKNLPNEKVLPKHSLLYEYFTVYNELTKVKYVTEGMRKPAFLSGEQKKAIVDLLFKTNRKVTVKQLKEDYFKKIECFDSVEISGVEDRFNASLGTYHDLLKIIKDKDFLDNEENEDILEDIVLTLTLFEDREMIEERLKTYAHLFDDKVMKQLKRRRYTGWGRLSRKLINGIRDKQSGKTILDFLKSDGFANRNFMQLIHDDSLTFKEDIQKAQVSGQGDSLHEHIANLAGSPAIKKGILQTVKVVDELVKVMGRHKPENIVIEMARENQTTQKGQKNSRERMKRIEEGIKELGSQILKEHPVENTQLQNEKLYLYYLQNGRDMYVDQELDINRLSDYDVDHIVPQSFLKDDSIDNKVLTRSDKARGKSDNVPSEEVVKKMKNYWRQLLNAKLITQRKFDNLTKAERGGLSELDKAGFIKRQLVETRQITKHVAQILDSRMNTKYDENDKLIREVKVITLKSKLVSDFRKDFQFYKVREINNYHHAHDAYLNAVVGTALIKKYPKLESEFVYGDYKVYDVRKMIAKSEQEIGKATAKYFFYSNIMNFFKTEITLANGEIRKRPLIETNGETGEIVWDKGRDFATVRKVLSMPQVNIVKKTEVQTGGFSKESILPKRNSDKLIARKKDWDPKKYGGFDSPTVAYSVLVVAKVEKGKSKKLKSVKELLGITIMERSSFEKNPIDFLEAKGYKEVKKDLIIKLPKYSLFELENGRKRMLASAGELQKGNELALPSKYVNFLYLASHYEKLKGSPEDNEQKQLFVEQHKHYLDEIIEQISEFSKRVILADANLDKVLSAYNKHRDKPIREQAENIIHLFTLTNLGAPAAFKYFDTTIDRKRYTSTKEVLDATLIHQSITGLYETRIDLSQLGGDGGGGSEAAAKGSSGGTLNIEDEHRLHETSKEPDVSLGSTWLSDFPQAWAETGGMGLAVRQAPLIIPLKATSTPVSIKQYPMSQEARLGIKPHIQRLLDQGILVPCQSPWNTPLLPVKKPGTNDYRPVQDLREVNKRVEDIHPTVPNPYNLLSGLPPSHQWYTVLDLKDAFFCLRLHPTSQPLFAFEWRDPEMGISGQLTWTRLPQGFKNSPTLFDEALHRDLADFRIQHPDLILLQYVDDLLLAATSELDCQQGTRALLQTLGNLGYRASAKKAQICQKQVKYLGYLLKEGQRWLTEARKETVMGQPTPKTPRQLREFLGTAGFCRLWIPGFAEMAAPLYPLTKTGTLFNWGPDQQKAYQEIKQALLTAPALGLPDLTKPFELFVDEKQGYAKGVLTQKLGPWRRPVAYLSKKLDPVAAGWPPCLRMVAAIAVLTKDAGKLTMGQPLVILAPHAVEALVKQPPDRWLSNARMTHYQALLLDTDRVQFGPVVALNPATLLPLPEEGLQHNCLDILAEAHGTRPDLTDQPLPDADHTWYTDGSSLLQEGQRKAGAAVTTETEVIWAKALPAGTSAQRAELIALTQALKMAEGKKLNVYTDSRYAFATAHIHGEIYRRRGLLTSEGKEIKNKDEILALLKALFLPKRLSIIHCPGHQKGHSAEARGNRMADQAARKAAITETPDTSTLLAGKRTADGSEFEKRTADGSEFESPKKKAKVE

SEQ ID NO: 2961 - protein, 2096 aa, synthetic construct
MPAAKRVKLDGGDKKYSIGLDIGTNSVGWAVITDEYKVPSKKFKVLGNTDRHSIKKNLIGALLFDSGETAEATRLKRTARRRYTRRKNRICYLQEIFSNEMAKVDDSFFHRLEESFLVEEDKKHERHPIFGNIVDEVAYHEKYPTIYHLRKKLVDSTDKADLRLIYLALAHMIKFRGHFLIEGDLNPDNSDVDKLFIQLVQTYNQLFEENPINASGVDAKAILSARLSKSRRLENLIAQLPGEKKNGLFGNLIALSLGLTPNFKSNFDLAEDAKLQLSKDTYDDDLDNLLAQIGDQYADLFLAAKNLSDAILLSDILRVNTEITKAPLSASMIKRYDEHHQDLTLLKALVRQQLPEKYKEIFFDQSKNGYAGYIDGGASQEEFYKFIKPILEKMDGTEELLVKLNREDLLRKQRTFDNGSIPHQIHLGELHAILRRQEDFYPFLKDNREKIEKILTFRIPYYVGPLARGNSRFAWMTRKSEETITPWNFEEVVDKGASAQSFIERMTNFDKNLPNEKVLPKHSLLYEYFTVYNELTKVKYVTEGMRKPAFLSGEQKKAIVDLLFKTNRKVTVKQLKEDYFKKIECFDSVEISGVEDRFNASLGTYHDLLKIIKDKDFLDNEENEDILEDIVLTLTLFEDREMIEERLKTYAHLFDDKVMKQLKRRRYTGWGRLSRKLINGIRDKQSGKTILDFLKSDGFANRNFMQLIHDDSLTFKEDIQKAQVSGQGDSLHEHIANLAGSPAIKKGILQTVKVVDELVKVMGRHKPENIVIEMARENQTTQKGQKNSRERMKRIEEGIKELGSQILKEHPVENTQLQNEKLYLYYLQNGRDMYVDQELDINRLSDYDVDHIVPQSFLKDDSIDNKVLTRSDKARGKSDNVPSEEVVKKMKNYWRQLLNAKLITQRKFDNLTKAERGGLSELDKAGFIKRQLVETRQITKHVAQILDSRMNTKYDENDKLIREVKVITLKSKLVSDFRKDFQFYKVREINNYHHAHDAYLNAVVGTALIKKYPKLESEFVYGDYKVYDVRKMIAKSEQEIGKATAKYFFYSNIMNFFKTEITLANGEIRKRPLIETNGETGEIVWDKGRDFATVRKVLSMPQVNIVKKTEVQTGGFSKESILPKRNSDKLIARKKDWDPKKYGGFDSPTVAYSVLVVAKVEKGKSKKLKSVKELLGITIMERSSFEKNPIDFLEAKGYKEVKKDLIIKLPKYSLFELENGRKRMLASAGELQKGNELALPSKYVNFLYLASHYEKLKGSPEDNEQKQLFVEQHKHYLDEIIEQISEFSKRVILADANLDKVLSAYNKHRDKPIREQAENIIHLFTLTNLGAPAAFKYFDTTIDRKRYTSTKEVLDATLIHQSITGLYETRIDLSQLGGDGGPAPGGSEAAAKGGTLNIEDEHRLHETSKEPDVSLGSTWLSDFPQAWAETGGMGLAVRQAPLIIPLKATSTPVSIKQYPMSQEARLGIKPHIQRLLDQGILVPCQSPWNTPLLPVKKPGTNDYRPVQDLREVNKRVEDIHPTVPNPYNLLSGLPPSHQWYTVLDLKDAFFCLRLHPTSQPLFAFEWRDPEMGISGQLTWTRLPQGFKNSPTLFDEALHRDLADFRIQHPDLILLQYVDDLLLAATSELDCQQGTRALLQTLGNLGYRASAKKAQICQKQVKYLGYLLKEGQRWLTEARKETVMGQPTPKTPRQLREFLGTAGFCRLWIPGFAEMAAPLYPLTKTGTLFNWGPDQQKAYQEIKQALLTAPALGLPDLTKPFELFVDEKQGYAKGVLTQKLGPWRRPVAYLSKKLDPVAAGWPPCLRMVAAIAVLTKDAGKLTMGQPLVILAPHAVEALVKQPPDRWLSNARMTHYQALLLDTDRVQFGPVVALNPATLLPLPEEGLQHNCLDILAEAHGTRPDLTDQPLPDADHTWYTDGSSLLQEGQRKAGAAVTTETEVIWAKALPAGTSAQRAELIALTQALKMAEGKKLNVYTDSRYAFATAHIHGEIYRRRGLLTSEGKEIKNKDEILALLKALFLPKRLSIIHCPGHQKGHSAEARGNRMADQAARKAAITETPDTSTLLAGKRTADGSEFEKRTADGSEFESPKKKAKVE

SEQ ID NO: 2962 - protein, 2093 aa, synthetic construct
MPAAKRVKLDGGDKKYSIGLDIGTNSVGWAVITDEYKVPSKKFKVLGNTDRHSIKKNLIGALLFDSGETAEATRLKRTARRRYTRRKNRICYLQEIFSNEMAKVDDSFFHRLEESFLVEEDKKHERHPIFGNIVDEVAYHEKYPTIYHLRKKLVDSTDKADLRLIYLALAHMIKFRGHFLIEGDLNPDNSDVDKLFIQLVQTYNQLFEENPINASGVDAKAILSARLSKSRRLENLIAQLPGEKKNGLFGNLIALSLGLTPNFKSNFDLAEDAKLQLSKDTYDDDLDNLLAQIGDQYADLFLAAKNLSDAILLSDILRVNTEITKAPLSASMIKRYDEHHQDLTLLKALVRQQLPEKYKEIFFDQSKNGYAGYIDGGASQEEFYKFIKPILEKMDGTEELLVKLNREDLLRKQRTFDNGSIPHQIHLGELHAILRRQEDFYPFLKDNREKIEKILTFRIPYYVGPLARGNSRFAWMTRKSEETITPWNFEEVVDKGASAQSFIERMTNFDKNLPNEKVLPKHSLLYEYFTVYNELTKVKYVTEGMRKPAFLSGEQKKAIVDLLFKTNRKVTVKQLKEDYFKKIECFDSVEISGVEDRFNASLGTYHDLLKIIKDKDFLDNEENEDILEDIVLTLTLFEDREMIEERLKTYAHLFDDKVMKQLKRRRYTGWGRLSRKLINGIRDKQSGKTILDFLKSDGFANRNFMQLIHDDSLTFKEDIQKAQVSGQGDSLHEHIANLAGSPAIKKGILQTVKVVDELVKVMGRHKPENIVIEMARENQTTQKGQKNSRERMKRIEEGIKELGSQILKEHPVENTQLQNEKLYLYYLQNGRDMYVDQELDINRLSDYDVDHIVPQSFLKDDSIDNKVLTRSDKARGKSDNVPSEEVVKKMKNYWRQLLNAKLITQRKFDNLTKAERGGLSELDKAGFIKRQLVETRQITKHVAQILDSRMNTKYDENDKLIREVKVITLKSKLVSDFRKDFQFYKVREINNYHHAHDAYLNAVVGTALIKKYPKLESEFVYGDYKVYDVRKMIAKSEQEIGKATAKYFFYSNIMNFFKTEITLANGEIRKRPLIETNGETGEIVWDKGRDFATVRKVLSMPQVNIVKKTEVQTGGFSKESILPKRNSDKLIARKKDWDPKKYGGFDSPTVAYSVLVVAKVEKGKSKKLKSVKELLGITIMERSSFEKNPIDFLEAKGYKEVKKDLIIKLPKYSLFELENGRKRMLASAGELQKGNELALPSKYVNFLYLASHYEKLKGSPEDNEQKQLFVEQHKHYLDEIIEQISEFSKRVILADANLDKVLSAYNKHRDKPIREQAENIIHLFTLTNLGAPAAFKYFDTTIDRKRYTSTKEVLDATLIHQSITGLYETRIDLSQLGGDGGGGSEAAAKGGTLNIEDEHRLHETSKEPDVSLGSTWLSDFPQAWAETGGMGLAVRQAPLIIPLKATSTPVSIKQYPMSQEARLGIKPHIQRLLDQGILVPCQSPWNTPLLPVKKPGTNDYRPVQDLREVNKRVEDIHPTVPNPYNLLSGLPPSHQWYTVLDLKDAFFCLRLHPTSQPLFAFEWRDPEMGISGQLTWTRLPQGFKNSPTLFDEALHRDLADFRIQHPDLILLQYVDDLLLAATSELDCQQGTRALLQTLGNLGYRASAKKAQICQKQVKYLGYLLKEGQRWLTEARKETVMGQPTPKTPRQLREFLGTAGFCRLWIPGFAEMAAPLYPLTKTGTLFNWGPDQQKAYQEIKQALLTAPALGLPDLTKPFELFVDEKQGYAKGVLTQKLGPWRRPVAYLSKKLDPVAAGWPPCLRMVAAIAVLTKDAGKLTMGQPLVILAPHAVEALVKQPPDRWLSNARMTHYQALLLDTDRVQFGPVVALNPATLLPLPEEGLQHNCLDILAEAHGTRPDLTDQPLPDADHTWYTDGSSLLQEGQRKAGAAVTTETEVIWAKALPAGTSAQRAELIALTQALKMAEGKKLNVYTDSRYAFATAHIHGEIYRRRGLLTSEGKEIKNKDEILALLKALFLPKRLSIIHCPGHQKGHSAEARGNRMADQAARKAAITETPDTSTLLAGKRTADGSEFEKRTADGSEFESPKKKAKVE

SEQ ID NO: 2963 - protein, 2088 aa, synthetic construct
MPAAKRVKLDGGDKKYSIGLDIGTNSVGWAVITDEYKVPSKKFKVLGNTDRHSIKKNLIGALLFDSGETAEATRLKRTARRRYTRRKNRICYLQEIFSNEMAKVDDSFFHRLEESFLVEEDKKHERHPIFGNIVDEVAYHEKYPTIYHLRKKLVDSTDKADLRLIYLALAHMIKFRGHFLIEGDLNPDNSDVDKLFIQLVQTYNQLFEENPINASGVDAKAILSARLSKSRRLENLIAQLPGEKKNGLFGNLIALSLGLTPNFKSNFDLAEDAKLQLSKDTYDDDLDNLLAQIGDQYADLFLAAKNLSDAILLSDILRVNTEITKAPLSASMIKRYDEHHQDLTLLKALVRQQLPEKYKEIFFDQSKNGYAGYIDGGASQEEFYKFIKPILEKMDGTEELLVKLNREDLLRKQRTFDNGSIPHQIHLGELHAILRRQEDFYPFLKDNREKIEKILTFRIPYYVGPLARGNSRFAWMTRKSEETITPWNFEEVVDKGASAQSFIERMTNFDKNLPNEKVLPKHSLLYEYFTVYNELTKVKYVTEGMRKPAFLSGEQKKAIVDLLFKTNRKVTVKQLKEDYFKKIECFDSVEISGVEDRFNASLGTYHDLLKIIKDKDFLDNEENEDILEDIVLTLTLFEDREMIEERLKTYAHLFDDKVMKQLKRRRYTGWGRLSRKLINGIRDKQSGKTILDFLKSDGFANRNFMQLIHDDSLTFKEDIQKAQVSGQGDSLHEHIANLAGSPAIKKGILQTVKVVDELVKVMGRHKPENIVIEMARENQTTQKGQKNSRERMKRIEEGIKELGSQILKEHPVENTQLQNEKLYLYYLQNGRDMYVDQELDINRLSDYDVDHIVPQSFLKDDSIDNKVLTRSDKARGKSDNVPSEEVVKKMKNYWRQLLNAKLITQRKFDNLTKAERGGLSELDKAGFIKRQLVETRQITKHVAQILDSRMNTKYDENDKLIREVKVITLKSKLVSDFRKDFQFYKVREINNYHHAHDAYLNAVVGTALIKKYPKLESEFVYGDYKVYDVRKMIAKSEQEIGKATAKYFFYSNIMNFFKTEITLANGEIRKRPLIETNGETGEIVWDKGRDFATVRKVLSMPQVNIVKKTEVQTGGFSKESILPKRNSDKLIARKKDWDPKKYGGFDSPTVAYSVLVVAKVEKGKSKKLKSVKELLGITIMERSSFEKNPIDFLEAKGYKEVKKDLIIKLPKYSLFELENGRKRMLASAGELQKGNELALPSKYVNFLYLASHYEKLKGSPEDNEQKQLFVEQHKHYLDEIIEQISEFSKRVILADANLDKVLSAYNKHRDKPIREQAENIIHLFTLTNLGAPAAFKYFDTTIDRKRYTSTKEVLDATLIHQSITGLYETRIDLSQLGGDGGGSSGGTLNIEDEHRLHETSKEPDVSLGSTWLSDFPQAWAETGGMGLAVRQAPLIIPLKATSTPVSIKQYPMSQEARLGIKPHIQRLLDQGILVPCQSPWNTPLLPVKKPGTNDYRPVQDLREVNKRVEDIHPTVPNPYNLLSGLPPSHQWYTVLDLKDAFFCLRLHPTSQPLFAFEWRDPEMGISGQLTWTRLPQGFKNSPTLFDEALHRDLADFRIQHPDLILLQYVDDLLLAATSELDCQQGTRALLQTLGNLGYRASAKKAQICQKQVKYLGYLLKEGQRWLTEARKETVMGQPTPKTPRQLREFLGTAGFCRLWIPGFAEMAAPLYPLTKTGTLFNWGPDQQKAYQEIKQALLTAPALGLPDLTKPFELFVDEKQGYAKGVLTQKLGPWRRPVAYLSKKLDPVAAGWPPCLRMVAAIAVLTKDAGKLTMGQPLVILAPHAVEALVKQPPDRWLSNARMTHYQALLLDTDRVQFGPVVALNPATLLPLPEEGLQHNCLDILAEAHGTRPDLTDQPLPDADHTWYTDGSSLLQEGQRKAGAAVTTETEVIWAKALPAGTSAQRAELIALTQALKMAEGKKLNVYTDSRYAFATAHIHGEIYRRRGLLTSEGKEIKNKDEILALLKALFLPKRLSIIHCPGHQKGHSAEARGNRMADQAARKAAITETPDTSTLLAGKRTADGSEFEKRTADGSEFESPKKKAKVE

SEQ ID NO: 2964 - protein, 2094 aa, synthetic construct
MPAAKRVKLDGGDKKYSIGLDIGTNSVGWAVITDEYKVPSKKFKVLGNTDRHSIKKNLIGALLFDSGETAEATRLKRTARRRYTRRKNRICYLQEIFSNEMAKVDDSFFHRLEESFLVEEDKKHERHPIFGNIVDEVAYHEKYPTIYHLRKKLVDSTDKADLRLIYLALAHMIKFRGHFLIEGDLNPDNSDVDKLFIQLVQTYNQLFEENPINASGVDAKAILSARLSKSRRLENLIAQLPGEKKNGLFGNLIALSLGLTPNFKSNFDLAEDAKLQLSKDTYDDDLDNLLAQIGDQYADLFLAAKNLSDAILLSDILRVNTEITKAPLSASMIKRYDEHHQDLTLLKALVRQQLPEKYKEIFFDQSKNGYAGYIDGGASQEEFYKFIKPILEKMDGTEELLVKLNREDLLRKQRTFDNGSIPHQIHLGELHAILRRQEDFYPFLKDNREKIEKILTFRIPYYVGPLARGNSRFAWMTRKSEETITPWNFEEVVDKGASAQSFIERMTNFDKNLPNEKVLPKHSLLYEYFTVYNELTKVKYVTEGMRKPAFLSGEQKKAIVDLLFKTNRKVTVKQLKEDYFKKIECFDSVEISGVEDRFNASLGTYHDLLKIIKDKDFLDNEENEDILEDIVLTLTLFEDREMIEERLKTYAHLFDDKVMKQLKRRRYTGWGRLSRKLINGIRDKQSGKTILDFLKSDGFANRNFMQLIHDDSLTFKEDIQKAQVSGQGDSLHEHIANLAGSPAIKKGILQTVKVVDELVKVMGRHKPENIVIEMARENQTTQKGQKNSRERMKRIEEGIKELGSQILKEHPVENTQLQNEKLYLYYLQNGRDMYVDQELDINRLSDYDVDHIVPQSFLKDDSIDNKVLTRSDKARGKSDNVPSEEVVKKMKNYWRQLLNAKLITQRKFDNLTKAERGGLSELDKAGFIKRQLVETRQITKHVAQILDSRMNTKYDENDKLIREVKVITLKSKLVSDFRKDFQFYKVREINNYHHAHDAYLNAVVGTALIKKYPKLESEFVYGDYKVYDVRKMIAKSEQEIGKATAKYFFYSNIMNFFKTEITLANGEIRKRPLIETNGETGEIVWDKGRDFATVRKVLSMPQVNIVKKTEVQTGGFSKESILPKRNSDKLIARKKDWDPKKYGGFDSPTVAYSVLVVAKVEKGKSKKLKSVKELLGITIMERSSFEKNPIDFLEAKGYKEVKKDLIIKLPKYSLFELENGRKRMLASAGELQKGNELALPSKYVNFLYLASHYEKLKGSPEDNEQKQLFVEQHKHYLDEIIEQISEFSKRVILADANLDKVLSAYNKHRDKPIREQAENIIHLFTLTNLGAPAAFKYFDTTIDRKRYTSTKEVLDATLIHQSITGLYETRIDLSQLGGDGGGGSGSSPAPGGTLNIEDEHRLHETSKEPDVSLGSTWLSDFPQAWAETGGMGLAVRQAPLIIPLKATSTPVSIKQYPMSQEARLGIKPHIQRLLDQGILVPCQSPWNTPLLPVKKPGTNDYRPVQDLREVNKRVEDIHPTVPNPYNLLSGLPPSHQWYTVLDLKDAFFCLRLHPTSQPLFAFEWRDPEMGISGQLTWTRLPQGFKNSPTLFDEALHRDLADFRIQHPDLILLQYVDDLLLAATSELDCQQGTRALLQTLGNLGYRASAKKAQICQKQVKYLGYLLKEGQRWLTEARKETVMGQPTPKTPRQLREFLGTAGFCRLWIPGFAEMAAPLYPLTKTGTLFNWGPDQQKAYQEIKQALLTAPALGLPDLTKPFELFVDEKQGYAKGVLTQKLGPWRRPVAYLSKKLDPVAAGWPPCLRMVAAIAVLTKDAGKLTMGQPLVILAPHAVEALVKQPPDRWLSNARMTHYQALLLDTDRVQFGPVVALNPATLLPLPEEGLQHNCLDILAEAHGTRPDLTDQPLPDADHTWYTDGSSLLQEGQRKAGAAVTTETEVIWAKALPAGTSAQRAELIALTQALKMAEGKKLNVYTDSRYAFATAHIHGEIYRRRGLLTSEGKEIKNKDEILALLKALFLPKRLSIIHCPGHQKGHSAEARGNRMADQAARKAAITETPDTSTLLAGKRTADGSEFEKRTADGSEFESPKKKAKVE

SEQ ID NO: 2965 - protein, 2103 aa, synthetic construct
MPAAKRVKLDGGDKKYSIGLDIGTNSVGWAVITDEYKVPSKKFKVLGNTDRHSIKKNLIGALLFDSGETAEATRLKRTARRRYTRRKNRICYLQEIFSNEMAKVDDSFFHRLEESFLVEEDKKHERHPIFGNIVDEVAYHEKYPTIYHLRKKLVDSTDKADLRLIYLALAHMIKFRGHFLIEGDLNPDNSDVDKLFIQLVQTYNQLFEENPINASGVDAKAILSARLSKSRRLENLIAQLPGEKKNGLFGNLIALSLGLTPNFKSNFDLAEDAKLQLSKDTYDDDLDNLLAQIGDQYADLFLAAKNLSDAILLSDILRVNTEITKAPLSASMIKRYDEHHQDLTLLKALVRQQLPEKYKEIFFDQSKNGYAGYIDGGASQEEFYKFIKPILEKMDGTEELLVKLNREDLLRKQRTFDNGSIPHQIHLGELHAILRRQEDFYPFLKDNREKIEKILTFRIPYYVGPLARGNSRFAWMTRKSEETITPWNFEEVVDKGASAQSFIERMTNFDKNLPNEKVLPKHSLLYEYFTVYNELTKVKYVTEGMRKPAFLSGEQKKAIVDLLFKTNRKVTVKQLKEDYFKKIECFDSVEISGVEDRFNASLGTYHDLLKIIKDKDFLDNEENEDILEDIVLTLTLFEDREMIEERLKTYAHLFDDKVMKQLKRRRYTGWGRLSRKLINGIRDKQSGKTILDFLKSDGFANRNFMQLIHDDSLTFKEDIQKAQVSGQGDSLHEHIANLAGSPAIKKGILQTVKVVDELVKVMGRHKPENIVIEMARENQTTQKGQKNSRERMKRIEEGIKELGSQILKEHPVENTQLQNEKLYLYYLQNGRDMYVDQELDINRLSDYDVDHIVPQSFLKDDSIDNKVLTRSDKARGKSDNVPSEEVVKKMKNYWRQLLNAKLITQRKFDNLTKAERGGLSELDKAGFIKRQLVETRQITKHVAQILDSRMNTKYDENDKLIREVKVITLKSKLVSDFRKDFQFYKVREINNYHHAHDAYLNAVVGTALIKKYPKLESEFVYGDYKVYDVRKMIAKSEQEIGKATAKYFFYSNIMNFFKTEITLANGEIRKRPLIETNGETGEIVWDKGRDFATVRKVLSMPQVNIVKKTEVQTGGFSKESILPKRNSDKLIARKKDWDPKKYGGFDSPTVAYSVLVVAKVEKGKSKKLKSVKELLGITIMERSSFEKNPIDFLEAKGYKEVKKDLIIKLPKYSLFELENGRKRMLASAGELQKGNELALPSKYVNFLYLASHYEKLKGSPEDNEQKQLFVEQHKHYLDEIIEQISEFSKRVILADANLDKVLSAYNKHRDKPIREQAENIIHLFTLTNLGAPAAFKYFDTTIDRKRYTSTKEVLDATLIHQSITGLYETRIDLSQLGGDGGGSSGSSGSSGSSGSSGSSGGTLNIEDEHRLHETSKEPDVSLGSTWLSDFPQAWAETGGMGLAVRQAPLIIPLKATSTPVSIKQYPMSQEARLGIKPHIQRLLDQGILVPCQSPWNTPLLPVKKPGTNDYRPVQDLREVNKRVEDIHPTVPNPYNLLSGLPPSHQWYTVLDLKDAFFCLRLHPTSQPLFAFEWRDPEMGISGQLTWTRLPQGFKNSPTLFNEALHRDLADFRIQHPDLILLQYVDDLLLAATSELDCQQGTRALLQTLGNLGYRASAKKAQICQKQVKYLGYLLKEGQRWLTEARKETVMGQPTPKTPRQLREFLGTAGFCRLWIPGFAEMAAPLYPLTKPGTLFNWGPDQQKAYQEIKQALLTAPALGLPDLTKPFELFVDEKQGYAKGVLTQKLGPWRRPVAYLSKKLDPVAAGWPPCLRMVAAIAVLTKDAGKLTMGQPLVILAPHAVEALVKQPPDRWLSNARMTHYQALLLDTDRVQFGPVVALNPATLLPLPEEGLQHNCLDILAEAHGTRPDLTDQPLPDADHTWYTDGSSLLQEGQRKAGAAVTTETEVIWAKALPAGTSAQRAELIALTQALKMAEGKKLNVYTDSRYAFATAHIHGEIYRRRGWLTSEGKEIKNKDEILALLKALFLPKRLSIIHCPGHQKGHSAEARGNRMADQAARKAAITETPDTSTLLAGKRTADGSEFEKRTADGSEFESPKKKAKVE

SEQ ID NO: 2966 - protein, 2096 aa, synthetic construct; identical to SEQ ID NO: 2713

SEQ ID NO: 2967 - protein, 2091 aa, synthetic construct
MPAAKRVKLDGGDKKYSIGLDIGTNSVGWAVITDEYKVPSKKFKVLGNTDRHSIKKNLIGALLFDSGETAEATRLKRTARRRYTRRKNRICYLQEIFSNEMAKVDDSFFHRLEESFLVEEDKKHERHPIFGNIVDEVAYHEKYPTIYHLRKKLVDSTDKADLRLIYLALAHMIKFRGHFLIEGDLNPDNSDVDKLFIQLVQTYNQLFEENPINASGVDAKAILSARLSKSRRLENLIAQLPGEKKNGLFGNLIALSLGLTPNFKSNFDLAEDAKLQLSKDTYDDDLDNLLAQIGDQYADLFLAAKNLSDAILLSDILRVNTEITKAPLSASMIKRYDEHHQDLTLLKALVRQQLPEKYKEIFFDQSKNGYAGYIDGGASQEEFYKFIKPILEKMDGTEELLVKLNREDLLRKQRTFDNGSIPHQIHLGELHAILRRQEDFYPFLKDNREKIEKILTFRIPYYVGPLARGNSRFAWMTRKSEETITPWNFEEVVDKGASAQSFIERMTNFDKNLPNEKVLPKHSLLYEYFTVYNELTKVKYVTEGMRKPAFLSGEQKKAIVDLLFKTNRKVTVKQLKEDYFKKIECFDSVEISGVEDRFNASLGTYHDLLKIIKDKDFLDNEENEDILEDIVLTLTLFEDREMIEERLKTYAHLFDDKVMKQLKRRRYTGWGRLSRKLINGIRDKQSGKTILDFLKSDGFANRNFMQLIHDDSLTFKEDIQKAQVSGQGDSLHEHIANLAGSPAIKKGILQTVKVVDELVKVMGRHKPENIVIEMARENQTTQKGQKNSRERMKRIEEGIKELGSQILKEHPVENTQLQNEKLYLYYLQNGRDMYVDQELDINRLSDYDVDHIVPQSFLKDDSIDNKVLTRSDKARGKSDNVPSEEVVKKMKNYWRQLLNAKLITQRKFDNLTKAERGGLSELDKAGFIKRQLVETRQITKHVAQILDSRMNTKYDENDKLIREVKVITLKSKLVSDFRKDFQFYKVREINNYHHAHDAYLNAVVGTALIKKYPKLESEFVYGDYKVYDVRKMIAKSEQEIGKATAKYFFYSNIMNFFKTEITLANGEIRKRPLIETNGETGEIVWDKGRDFATVRKVLSMPQVNIVKKTEVQTGGFSKESILPKRNSDKLIARKKDWDPKKYGGFDSPTVAYSVLVVAKVEKGKSKKLKSVKELLGITIMERSSFEKNPIDFLEAKGYKEVKKDLIIKLPKYSLFELENGRKRMLASAGELQKGNELALPSKYVNFLYLASHYEKLKGSPEDNEQKQLFVEQHKHYLDEIIEQISEFSKRVILADANLDKVLSAYNKHRDKPIREQAENIIHLFTLTNLGAPAAFKYFDTTIDRKRYTSTKEVLDATLIHQSITGLYETRIDLSQLGGDGGGSSGGGGGTLNIEDEHRLHETSKEPDVSLGSTWLSDFPQAWAETGGMGLAVRQAPLIIPLKATSTPVSIKQYPMSQEARLGIKPHIQRLLDQGILVPCQSPWNTPLLPVKKPGTNDYRPVQDLREVNKRVEDIHPTVPNPYNLLSGLPPSHQWYTVLDLKDAFFCLRLHPTSQPLFAFEWRDPEMGISGQLTWTRLPQGFKNSPTLFNEALHRDLADFRIQHPDLILLQYVDDLLLAATSELDCQQGTRALLQTLGNLGYRASAKKAQICQKQVKYLGYLLKEGQRWLTEARKETVMGQPTPKTPRQLREFLGTAGFCRLWIPGFAEMAAPLYPLTKPGTLFNWGPDQQKAYQEIKQALLTAPALGLPDLTKPFELFVDEKQGYAKGVLTQKLGPWRRPVAYLSKKLDPVAAGWPPCLRMVAAIAVLTKDAGKLTMGQPLVILAPHAVEALVKQPPDRWLSNARMTHYQALLLDTDRVQFGPVVALNPATLLPLPEEGLQHNCLDILAEAHGTRPDLTDQPLPDADHTWYTDGSSLLQEGQRKAGAAVTTETEVIWAKALPAGTSAQRAELIALTQALKMAEGKKLNVYTDSRYAFATAHIHGEIYRRRGWLTSEGKEIKNKDEILALLKALFLPKRLSIIHCPGHQKGHSAEARGNRMADQAARKAAITETPDTSTLLAGKRTADGSEFEKRTADGSEFESPKKKAKVE

SEQ ID NO: 2968 - protein, 2105 aa, synthetic construct; identical to SEQ ID NO: 2771

SEQ ID NO: 2969 - protein, 2096 aa, synthetic construct; identical to SEQ ID NO: 2753

SEQ ID NO: 2970 - protein, 2096 aa, synthetic construct
MPAAKRVKLDGGDKKYSIGLDIGTNSVGWAVITDEYKVPSKKFKVLGNTDRHSIKKNLIGALLFDSGETAEATRLKRTARRRYTRRKNRICYLQEIFSNEMAKVDDSFFHRLEESFLVEEDKKHERHPIFGNIVDEVAYHEKYPTIYHLRKKLVDSTDKADLRLIYLALAHMIKFRGHFLIEGDLNPDNSDVDKLFIQLVQTYNQLFEENPINASGVDAKAILSARLSKSRRLENLIAQLPGEKKNGLFGNLIALSLGLTPNFKSNFDLAEDAKLQLSKDTYDDDLDNLLAQIGDQYADLFLAAKNLSDAILLSDILRVNTEITKAPLSASMIKRYDEHHQDLTLLKALVRQQLPEKYKEIFFDQSKNGYAGYIDGGASQEEFYKFIKPILEKMDGTEELLVKLNREDLLRKQRTFDNGSIPHQIHLGELHAILRRQEDFYPFLKDNREKIEKILTFRIPYYVGPLARGNSRFAWMTRKSEETITPWNFEEVVDKGASAQSFIERMTNFDKNLPNEKVLPKHSLLYEYFTVYNELTKVKYVTEGMRKPAFLSGEQKKAIVDLLFKTNRKVTVKQLKEDYFKKIECFDSVEISGVEDRFNASLGTYHDLLKIIKDKDFLDNEENEDILEDIVLTLTLFEDREMIEERLKTYAHLFDDKVMKQLKRRRYTGWGRLSRKLINGIRDKQSGKTILDFLKSDGFANRNFMQLIHDDSLTFKEDIQKAQVSGQGDSLHEHIANLAGSPAIKKGILQTVKVVDELVKVMGRHKPENIVIEMARENQTTQKGQKNSRERMKRIEEGIKELGSQILKEHPVENTQLQNEKLYLYYLQNGRDMYVDQELDINRLSDYDVDHIVPQSFLKDDSIDNKVLTRSDKARGKSDNVPSEEVVKKMKNYWRQLLNAKLITQRKFDNLTKAERGGLSELDKAGFIKRQLVETRQITKHVAQILDSRMNTKYDENDKLIREVKVITLKSKLVSDFRKDFQFYKVREINNYHHAHDAYLNAVVGTALIKKYPKLESEFVYGDYKVYDVRKMIAKSEQEIGKATAKYFFYSNIMNFFKTEITLANGEIRKRPLIETNGETGEIVWDKGRDFATVRKVLSMPQVNIVKKTEVQTGGFSKESILPKRNSDKLIARKKDWDPKKYGGFDSPTVAYSVLVVAKVEKGKSKKLKSVKELLGITIMERSSFEKNPIDFLEAKGYKEVKKDLIIKLPKYSLFELENGRKRMLASAGELQKGNELALPSKYVNFLYLASHYEKLKGSPEDNEQKQLFVEQHKHYLDEIIEQISEFSKRVILADANLDKVLSAYNKHRDKPIREQAENIIHLFTLTNLGAPAAFKYFDTTIDRKRYTSTKEVLDATLIHQSITGLYETRIDLSQLGGDGGPAPAPAPAPAPGGTLNIEDEHRLHETSKEPDVSLGSTWLSDFPQAWAETGGMGLAVRQAPLIIPLKATSTPVSIKQYPMSQEARLGIKPHIQRLLDQGILVPCQSPWNTPLLPVKKPGTNDYRPVQDLREVNKRVEDIHPTVPNPYNLLSGLPPSHQWYTVLDLKDAFFCLRLHPTSQPLFAFEWRDPEMGISGQLTWTRLPQGFKNSPTLFNEALHRDLADFRIQHPDLILLQYVDDLLLAATSELDCQQGTRALLQTLGNLGYRASAKKAQICQKQVKYLGYLLKEGQRWLTEARKETVMGQPTPKTPRQLREFLGTAGFCRLWIPGFAEMAAPLYPLTKPGTLFNWGPDQQKAYQEIKQALLTAPALGLPDLTKPFELFVDEKQGYAKGVLTQKLGPWRRPVAYLSKKLDPVAAGWPPCLRMVAAIAVLTKDAGKLTMGQPLVILAPHAVEALVKQPPDRWLSNARMTHYQALLLDTDRVQFGPVVALNPATLLPLPEEGLQHNCLDILAEAHGTRPDLTDQPLPDADHTWYTDGSSLLQEGQRKAGAAVTTETEVIWAKALPAGTSAQRAELIALTQALKMAEGKKLNVYTDSRYAFATAHIHGEIYRRRGWLTSEGKEIKNKDEILALLKALFLPKRLSIIHCPGHQKGHSAEARGNRMADQAARKAAITETPDTSTLLAGKRTADGSEFEKRTADGSEFESPKKKAKVE

SEQ ID NO: 2971 - protein, 2093 aa, synthetic construct; identical to SEQ ID NO: 2724

SEQ ID NO: 2972 - protein, 2131 aa, synthetic construct; identical to SEQ ID NO: 2711

SEQ ID NO: 2973 - protein, 2088 aa, synthetic construct
MPAAKRVKLDGGDKKYSIGLDIGTNSVGWAVITDEYKVPSKKFKVLGNTDRHSIKKNLIGALLFDSGETAEATRLKRTARRRYTRRKNRICYLQEIFSNEMAKVDDSFFHRLEESFLVEEDKKHERHPIFGNIVDEVAYHEKYPTIYHLRKKLVDSTDKADLRLIYLALAHMIKFRGHFLIEGDLNPDNSDVDKLFIQLVQTYNQLFEENPINASGVDAKAILSARLSKSRRLENLIAQLPGEKKNGLFGNLIALSLGLTPNFKSNFDLAEDAKLQLSKDTYDDDLDNLLAQIGDQYADLFLAAKNLSDAILLSDILRVNTEITKAPLSASMIKRYDEHHQDLTLLKALVRQQLPEKYKEIFFDQSKNGYAGYIDGGASQEEFYKFIKPILEKMDGTEELLVKLNREDLLRKQRTFDNGSIPHQIHLGELHAILRRQEDFYPFLKDNREKIEKILTFRIPYYVGPLARGNSRFAWMTRKSEETITPWNFEEVVDKGASAQSFIERMTNFDKNLPNEKVLPKHSLLYEYFTVYNELTKVKYVTEGMRKPAFLSGEQKKAIVDLLFKTNRKVTVKQLKEDYFKKIECFDSVEISGVEDRFNASLGTYHDLLKIIKDKDFLDNEENEDILEDIVLTLTLFEDREMIEERLKTYAHLFDDKVMKQLKRRRYTGWGRLSRKLINGIRDKQSGKTILDFLKSDGFANRNFMQLIHDDSLTFKEDIQKAQVSGQGDSLHEHIANLAGSPAIKKGILQTVKVVDELVKVMGRHKPENIVIEMARENQTTQKGQKNSRERMKRIEEGIKELGSQILKEHPVENTQLQNEKLYLYYLQNGRDMYVDQELDINRLSDYDVDHIVPQSFLKDDSIDNKVLTRSDKARGKSDNVPSEEVVKKMKNYWRQLLNAKLITQRKFDNLTKAERGGLSELDKAGFIKRQLVETRQITKHVAQILDSRMNTKYDENDKLIREVKVITLKSKLVSDFRKDFQFYKVREINNYHHAHDAYLNAVVGTALIKKYPKLESEFVYGDYKVYDVRKMIAKSEQEIGKATAKYFFYSNIMNFFKTEITLANGEIRKRPLIETNGETGEIVWDKGRDFATVRKVLSMPQVNIVKKTEVQTGGFSKESILPKRNSDKLIARKKDWDPKKYGGFDSPTVAYSVLVVAKVEKGKSKKLKSVKELLGITIMERSSFEKNPIDFLEAKGYKEVKKDLIIKLPKYSLFELENGRKRMLASAGELQKGNELALPSKYVNFLYLASHYEKLKGSPEDNEQKQLFVEQHKHYLDEIIEQISEFSKRVILADANLDKVLSAYNKHRDKPIREQAENIIHLFTLTNLGAPAAFKYFDTTIDRKRYTSTKEVLDATLIHQSITGLYETRIDLSQLGGDGGPAPGGTLNIEDEHRLHETSKEPDVSLGSTWLSDFPQAWAETGGMGLAVRQAPLIIPLKATSTPVSIKQYPMSQEARLGIKPHIQRLLDQGILVPCQSPWNTPLLPVKKPGTNDYRPVQDLREVNKRVEDIHPTVPNPYNLLSGLPPSHQWYTVLDLKDAFFCLRLHPTSQPLFAFEWRDPEMGISGQLTWTRLPQGFKNSPTLFNEALHRDLADFRIQHPDLILLQYVDDLLLAATSELDCQQGTRALLQTLGNLGYRASAKKAQICQKQVKYLGYLLKEGQRWLTEARKETVMGQPTPKTPRQLREFLGTAGFCRLWIPGFAEMAAPLYPLTKPGTLFNWGPDQQKAYQEIKQALLTAPALGLPDLTKPFELFVDEKQGYAKGVLTQKLGPWRRPVAYLSKKLDPVAAGWPPCLRMVAAIAVLTKDAGKLTMGQPLVILAPHAVEALVKQPPDRWLSNARMTHYQALLLDTDRVQFGPVVALNPATLLPLPEEGLQHNCLDILAEAHGTRPDLTDQPLPDADHTWYTDGSSLLQEGQRKAGAAVTTETEVIWAKALPAGTSAQRAELIALTQALKMAEGKKLNVYTDSRYAFATAHIHGEIYRRRGWLTSEGKEIKNKDEILALLKALFLPKRLSIIHCPGHQKGHSAEARGNRMADQAARKAAITETPDTSTLLAGKRTADGSEFEKRTADGSEFESPKKKAKVE

SEQ ID NO: 2974 - protein, 2098 aa, synthetic construct
MPAAKRVKLDGGDKKYSIGLDIGTNSVGWAVITDEYKVPSKKFKVLGNTDRHSIKKNLIGALLFDSGETAEATRLKRTARRRYTRRKNRICYLQEIFSNEMAKVDDSFFHRLEESFLVEEDKKHERHPIFGNIVDEVAYHEKYPTIYHLRKKLVDSTDKADLRLIYLALAHMIKFRGHFLIEGDLNPDNSDVDKLFIQLVQTYNQLFEENPINASGVDAKAILSARLSKSRRLENLIAQLPGEKKNGLFGNLIALSLGLTPNFKSNFDLAEDAKLQLSKDTYDDDLDNLLAQIGDQYADLFLAAKNLSDAILLSDILRVNTEITKAPLSASMIKRYDEHHQDLTLLKALVRQQLPEKYKEIFFDQSKNGYAGYIDGGASQEEFYKFIKPILEKMDGTEELLVKLNREDLLRKQRTFDNGSIPHQIHLGELHAILRRQEDFYPFLKDNREKIEKILTFRIPYYVGPLARGNSRFAWMTRKSEETITPWNFEEVVDKGASAQSFIERMTNFDKNLPNEKVLPKHSLLYEYFTVYNELTKVKYVTEGMRKPAFLSGEQKKAIVDLLFKTNRKVTVKQLKEDYFKKIECFDSVEISGVEDRFNASLGTYHDLLKIIKDKDFLDNEENEDILEDIVLTLTLFEDREMIEERLKTYAHLFDDKVMKQLKRRRYTGWGRLSRKLINGIRDKQSGKTILDFLKSDGFANRNFMQLIHDDSLTFKEDIQKAQVSGQGDSLHEHIANLAGSPAIKKGILQTVKVVDELVKVMGRHKPENIVIEMARENQTTQKGQKNSRERMKRIEEGIKELGSQILKEHPVENTQLQNEKLYLYYLQNGRDMYVDQELDINRLSDYDVDHIVPQSFLKDDSIDNKVLTRSDKARGKSDNVPSEEVVKKMKNYWRQLLNAKLITQRKFDNLTKAERGGLSELDKAGFIKRQLVETRQITKHVAQILDSRMNTKYDENDKLIREVKVITLKSKLVSDFRKDFQFYKVREINNYHHAHDAYLNAVVGTALIKKYPKLESEFVYGDYKVYDVRKMIAKSEQEIGKATAKYFFYSNIMNFFKTEITLANGEIRKRPLIETNGETGEIVWDKGRDFATVRKVLSMPQVNIVKKTEVQTGGFSKESILPKRNSDKLIARKKDWDPKKYGGFDSPTVAYSVLVVAKVEKGKSKKLKSVKELLGITIMERSSFEKNPIDFLEAKGYKEVKKDLIIKLPKYSLFELENGRKRMLASAGELQKGNELALPSKYVNFLYLASHYEKLKGSPEDNEQKQLFVEQHKHYLDEIIEQISEFSKRVILADANLDKVLSAYNKHRDKPIREQAENIIHLFTLTNLGAPAAFKYFDTTIDRKRYTSTKEVLDATLIHQSITGLYETRIDLSQLGGDGGPAPAPAPAPAPAPGGTLNIEDEHRLHETSKEPDVSLGSTWLSDFPQAWAETGGMGLAVRQAPLIIPLKATSTPVSIKQYPMSQEARLGIKPHIQRLLDQGILVPCQSPWNTPLLPVKKPGTNDYRPVQDLREVNKRVEDIHPTVPNPYNLLSGLPPSHQWYTVLDLKDAFFCLRLHPTSQPLFAFEWRDPEMGISGQLTWTRLPQGFKNSPTLFNEALHRDLADFRIQHPDLILLQYVDDLLLAATSELDCQQGTRALLQTLGNLGYRASAKKAQICQKQVKYLGYLLKEGQRWLTEARKETVMGQPTPKTPRQLREFLGTAGFCRLWIPGFAEMAAPLYPLTKPGTLFNWGPDQQKAYQEIKQALLTAPALGLPDLTKPFELFVDEKQGYAKGVLTQKLGPWRRPVAYLSKKLDPVAAGWPPCLRMVAAIAVLTKDAGKLTMGQPLVILAPHAVEALVKQPPDRWLSNARMTHYQALLLDTDRVQFGPVVALNPATLLPLPEEGLQHNCLDILAEAHGTRPDLTDQPLPDADHTWYTDGSSLLQEGQRKAGAAVTTETEVIWAKALPAGTSAQRAELIALTQALKMAEGKKLNVYTDSRYAFATAHIHGEIYRRRGWLTSEGKEIKNKDEILALLKALFLPKRLSIIHCPGHQKGHSAEARGNRMADQAARKAAITETPDTSTLLAGKRTADGSEFEKRTADGSEFESPKKKAKVE

SEQ ID NO: 2975 - protein, 2091 aa, synthetic construct
MPAAKRVKLDGGDKKYSIGLDIGTNSVGWAVITDEYKVPSKKFKVLGNTDRHSIKKNLIGALLFDSGETAEATRLKRTARRRYTRRKNRICYLQEIFSNEMAKVDDSFFHRLEESFLVEEDKKHERHPIFGNIVDEVAYHEKYPTIYHLRKKLVDSTDKADLRLIYLALAHMIKFRGHFLIEGDLNPDNSDVDKLFIQLVQTYNQLFEENPINASGVDAKAILSARLSKSRRLENLIAQLPGEKKNGLFGNLIALSLGLTPNFKSNFDLAEDAKLQLSKDTYDDDLDNLLAQIGDQYADLFLAAKNLSDAILLSDILRVNTEITKAPLSASMIKRYDEHHQDLTLLKALVRQQLPEKYKEIFFDQSKNGYAGYIDGGASQEEFYKFIKPILEKMDGTEELLVKLNREDLLRKQRTFDNGSIPHQIHLGELHAILRRQEDFYPFLKDNREKIEKILTFRIPYYVGPLARGNSRFAWMTRKSEETITPWNFEEVVDKGASAQSFIERMTNFDKNLPNEKVLPKHSLLYEYFTVYNELTKVKYVTEGMRKPAFLSGEQKKAIVDLLFKTNRKVTVKQLKEDYFKKIECFDSVEISGVEDRFNASLGTYHDLLKIIKDKDFLDNEENEDILEDIVLTLTLFEDREMIEERLKTYAHLFDDKVMKQLKRRRYTGWGRLSRKLINGIRDKQSGKTILDFLKSDGFANRNFMQLIHDDSLTFKEDIQKAQVSGQGDSLHEHIANLAGSPAIKKGILQTVKVVDELVKVMGRHKPENIVIEMARENQTTQKGQKNSRERMKRIEEGIKELGSQILKEHPVENTQLQNEKLYLYYLQNGRDMYVDQELDINRLSDYDVDHIVPQSFLKDDSIDNKVLTRSDKARGKSDNVPSEEVVKKMKNYWRQLLNAKLITQRKFDNLTKAERGGLSELDKAGFIKRQLVETRQITKHVAQILDSRMNTKYDENDKLIREVKVITLKSKLVSDFRKDFQFYKVREINNYHHAHDAYLNAVVGTALIKKYPKLESEFVYGDYKVYDVRKMIAKSEQEIGKATAKYFFYSNIMNFFKTEITLANGEIRKRPLIETNGETGEIVWDKGRDFATVRKVLSMPQVNIVKKTEVQTGGFSKESILPKRNSDKLIARKKDWDPKKYGGFDSPTVAYSVLVVAKVEKGKSKKLKSVKELLGITIMERSSFEKNPIDFLEAKGYKEVKKDLIIKLPKYSLFELENGRKRMLASAGELQKGNELALPSKYVNFLYLASHYEKLKGSPEDNEQKQLFVEQHKHYLDEIIEQISEFSKRVILADANLDKVLSAYNKHRDKPIREQAENIIHLFTLTNLGAPAAFKYFDTTIDRKRYTSTKEVLDATLIHQSITGLYETRIDLSQLGGDGGGGGGGGGGTLNIEDEHRLHETSKEPDVSLGSTWLSDFPQAWAETGGMGLAVRQAPLIIPLKATSTPVSIKQYPMSQEARLGIKPHIQRLLDQGILVPCQSPWNTPLLPVKKPGTNDYRPVQDLREVNKRVEDIHPTVPNPYNLLSGLPPSHQWYTVLDLKDAFFCLRLHPTSQPLFAFEWRDPEMGISGQLTWTRLPQGFKNSPTLFNEALHRDLADFRIQHPDLILLQYVDDLLLAATSELDCQQGTRALLQTLGNLGYRASAKKAQICQKQVKYLGYLLKEGQRWLTEARKETVMGQPTPKTPRQLREFLGTAGFCRLWIPGFAEMAAPLYPLTKPGTLFNWGPDQQKAYQEIKQALLTAPALGLPDLTKPFELFVDEKQGYAKGVLTQKLGPWRRPVAYLSKKLDPVAAGWPPCLRMVAAIAVLTKDAGKLTMGQPLVILAPHAVEALVKQPPDRWLSNARMTHYQALLLDTDRVQFGPVVALNPATLLPLPEEGLQHNCLDILAEAHGTRPDLTDQPLPDADHTWYTDGSSLLQEGQRKAGAAVTTETEVIWAKALPAGTSAQRAELIALTQALKMAEGKKLNVYTDSRYAFATAHIHGEIYRRRGWLTSEGKEIKNKDEILALLKALFLPKRLSIIHCPGHQKGHSAEARGNRMADQAARKAAITETPDTSTLLAGKRTADGSEFEKRTADGSEFESPKKKAKVE

SEQ ID NO: 2976 - protein, 2096 aa, synthetic construct; identical to SEQ ID NO: 2723

SEQ ID NO: 2977 - protein, 2096 aa, synthetic construct; identical to SEQ ID NO: 2777

SEQ ID NO: 2978 - protein, 2093 aa, synthetic construct
MPAAKRVKLDGGDKKYSIGLDIGTNSVGWAVITDEYKVPSKKFKVLGNTDRHSIKKNLIGALLFDSGETAEATRLKRTARRRYTRRKNRICYLQEIFSNEMAKVDDSFFHRLEESFLVEEDKKHERHPIFGNIVDEVAYHEKYPTIYHLRKKLVDSTDKADLRLIYLALAHMIKFRGHFLIEGDLNPDNSDVDKLFIQLVQTYNQLFEENPINASGVDAKAILSARLSKSRRLENLIAQLPGEKKNGLFGNLIALSLGLTPNFKSNFDLAEDAKLQLSKDTYDDDLDNLLAQIGDQYADLFLAAKNLSDAILLSDILRVNTEITKAPLSASMIKRYDEHHQDLTLLKALVRQQLPEKYKEIFFDQSKNGYAGYIDGGASQEEFYKFIKPILEKMDGTEELLVKLNREDLLRKQRTFDNGSIPHQIHLGELHAILRRQEDFYPFLKDNREKIEKILTFRIPYYVGPLARGNSRFAWMTRKSEETITPWNFEEVVDKGASAQSFIERMTNFDKNLPNEKVLPKHSLLYEYFTVYNELTKVKYVTEGMRKPAFLSGEQKKAIVDLLFKTNRKVTVKQLKEDYFKKIECFDSVEISGVEDRFNASLGTYHDLLKIIKDKDFLDNEENEDILEDIVLTLTLFEDREMIEERLKTYAHLFDDKVMKQLKRRRYTGWGRLSRKLINGIRDKQSGKTILDFLKSDGFANRNFMQLIHDDSLTFKEDIQKAQVSGQGDSLHEHIANLAGSPAIKKGILQTVKVVDELVKVMGRHKPENIVIEMARENQTTQKGQKNSRERMKRIEEGIKELGSQILKEHPVENTQLQNEKLYLYYLQNGRDMYVDQELDINRLSDYDVDHIVPQSFLKDDSIDNKVLTRSDKARGKSDNVPSEEVVKKMKNYWRQLLNAKLITQRKFDNLTKAERGGLSELDKAGFIKRQLVETRQITKHVAQILDSRMNTKYDENDKLIREVKVITLKSKLVSDFRKDFQFYKVREINNYHHAHDAYLNAVVGTALIKKYPKLESEFVYGDYKVYDVRKMIAKSEQEIGKATAKYFFYSNIMNFFKTEITLANGEIRKRPLIETNGETGEIVWDKGRDFATVRKVLSMPQVNIVKKTEVQTGGFSKESILPKRNSDKLIARKKDWDPKKYGGFDSPTVAYSVLVVAKVEKGKSKKLKSVKELLGITIMERSSFEKNPIDFLEAKGYKEVKKDLIIKLPKYSLFELENGRKRMLASAGELQKGNELALPSKYVNFLYLASHYEKLKGSPEDNEQKQLFVEQHKHYLDEIIEQISEFSKRVILADANLDKVLSAYNKHRDKPIREQAENIIHLFTLTNLGAPAAFKYFDTTIDRKRYTSTKEVLDATLIHQSITGLYETRIDLSQLGGDGGEAAAKGGGGGTLNIEDEHRLHETSKEPDVSLGSTWLSDFPQAWAETGGMGLAVRQAPLIIPLKATSTPVSIKQYPMSQEARLGIKPHIQRLLDQGILVPCQSPWNTPLLPVKKPGTNDYRPVQDLREVNKRVEDIHPTVPNPYNLLSGLPPSHQWYTVLDLKDAFFCLRLHPTSQPLFAFEWRDPEMGISGQLTWTRLPQGFKNSPTLFNEALHRDLADFRIQHPDLILLQYVDDLLLAATSELDCQQGTRALLQTLGNLGYRASAKKAQICQKQVKYLGYLLKEGQRWLTEARKETVMGQPTPKTPRQLREFLGTAGFCRLWIPGFAEMAAPLYPLTKPGTLFNWGPDQQKAYQEIKQALLTAPALGLPDLTKPFELFVDEKQGYAKGVLTQKLGPWRRPVAYLSKKLDPVAAGWPPCLRMVAAIAVLTKDAGKLTMGQPLVILAPHAVEALVKQPPDRWLSNARMTHYQALLLDTDRVQFGPVVALNPATLLPLPEEGLQHNCLDILAEAHGTRPDLTDQPLPDADHTWYTDGSSLLQEGQRKAGAAVTTETEVIWAKALPAGTSAQRAELIALTQALKMAEGKKLNVYTDSRYAFATAHIHGEIYRRRGWLTSEGKEIKNKDEILALLKALFLPKRLSIIHCPGHQKGHSAEARGNRMADQAARKAAITETPDTSTLLAGKRTADGSEFEKRTADGSEFESPKKKAKVE

SEQ ID NO: 2979 - protein, 2094 aa, synthetic construct
MPAAKRVKLDGGDKKYSIGLDIGTNSVGWAVITDEYKVPSKKFKVLGNTDRHSIKKNLIGALLFDSGETAEATRLKRTARRRYTRRKNRICYLQEIFSNEMAKVDDSFFHRLEESFLVEEDKKHERHPIFGNIVDEVAYHEKYPTIYHLRKKLVDSTDKADLRLIYLALAHMIKFRGHFLIEGDLNPDNSDVDKLFIQLVQTYNQLFEENPINASGVDAKAILSARLSKSRRLENLIAQLPGEKKNGLFGNLIALSLGLTPNFKSNFDLAEDAKLQLSKDTYDDDLDNLLAQIGDQYADLFLAAKNLSDAILLSDILRVNTEITKAPLSASMIKRYDEHHQDLTLLKALVRQQLPEKYKEIFFDQSKNGYAGYIDGGASQEEFYKFIKPILEKMDGTEELLVKLNREDLLRKQRTFDNGSIPHQIHLGELHAILRRQEDFYPFLKDNREKIEKILTFRIPYYVGPLARGNSRFAWMTRKSEETITPWNFEEVVDKGASAQSFIERMTNFDKNLPNEKVLPKHSLLYEYFTVYNELTKVKYVTEGMRKPAFLSGEQKKAIVDLLFKTNRKVTVKQLKEDYFKKIECFDSVEISGVEDRFNASLGTYHDLLKIIKDKDFLDNEENEDILEDIVLTLTLFEDREMIEERLKTYAHLFDDKVMKQLKRRRYTGWGRLSRKLINGIRDKQSGKTILDFLKSDGFANRNFMQLIHDDSLTFKEDIQKAQVSGQGDSLHEHIANLAGSPAIKKGILQTVKVVDELVKVMGRHKPENIVIEMARENQTTQKGQKNSRERMKRIEEGIKELGSQILKEHPVENTQLQNEKLYLYYLQNGRDMYVDQELDINRLSDYDVDHIVPQSFLKDDSIDNKVLTRSDKARGKSDNVPSEEVVKKMKNYWRQLLNAKLITQRKFDNLTKAERGGLSELDKAGFIKRQLVETRQITKHVAQILDSRMNTKYDENDKLIREVKVITLKSKLVSDFRKDFQFYKVREINNYHHAHDAYLNAVVGTALIKKYPKLESEFVYGDYKVYDVRKMIAKSEQEIGKATAKYFFYSNIMNFFKTEITLANGEIRKRPLIETNGETGEIVWDKGRDFATVRKVLSMPQVNIVKKTEVQTGGFSKESILPKRNSDKLIARKKDWDPKKYGGFDSPTVAYSVLVVAKVEKGKSKKLKSVKELLGITIMERSSFEKNPIDFLEAKGYKEVKKDLIIKLPKYSLFELENGRKRMLASAGELQKGNELALPSKYVNFLYLASHYEKLKGSPEDNEQKQLFVEQHKHYLDEIIEQISEFSKRVILADANLDKVLSAYNKHRDKPIREQAENIIHLFTLTNLGAPAAFKYFDTTIDRKRYTSTKEVLDATLIHQSITGLYETRIDLSQLGGDGGGGSGSSGGGGGTLNIEDEHRLHETSKEPDVSLGSTWLSDFPQAWAETGGMGLAVRQAPLIIPLKATSTPVSIKQYPMSQEARLGIKPHIQRLLDQGILVPCQSPWNTPLLPVKKPGTNDYRPVQDLREVNKRVEDIHPTVPNPYNLLSGLPPSHQWYTVLDLKDAFFCLRLHPTSQPLFAFEWRDPEMGISGQLTWTRLPQGFKNSPTLFNEALHRDLADFRIQHPDLILLQYVDDLLLAATSELDCQQGTRALLQTLGNLGYRASAKKAQICQKQVKYLGYLLKEGQRWLTEARKETVMGQPTPKTPRQLREFLGTAGFCRLWIPGFAEMAAPLYPLTKPGTLFNWGPDQQKAYQEIKQALLTAPALGLPDLTKPFELFVDEKQGYAKGVLTQKLGPWRRPVAYLSKKLDPVAAGWPPCLRMVAAIAVLTKDAGKLTMGQPLVILAPHAVEALVKQPPDRWLSNARMTHYQALLLDTDRVQFGPVVALNPATLLPLPEEGLQHNCLDILAEAHGTRPDLTDQPLPDADHTWYTDGSSLLQEGQRKAGAAVTTETEVIWAKALPAGTSAQRAELIALTQALKMAEGKKLNVYTDSRYAFATAHIHGEIYRRRGWLTSEGKEIKNKDEILALLKALFLPKRLSIIHCPGHQKGHSAEARGNRMADQAARKAAITETPDTSTLLAGKRTADGSEFEKRTADGSEFESPKKKAKVE

SEQ ID NO: 2980 - protein, 2092 aa, synthetic construct
MPAAKRVKLDGGDKKYSIGLDIGTNSVGWAVITDEYKVPSKKFKVLGNTDRHSIKKNLIGALLFDSGETAEATRLKRTARRRYTRRKNRICYLQEIFSNEMAKVDDSFFHRLEESFLVEEDKKHERHPIFGNIVDEVAYHEKYPTIYHLRKKLVDSTDKADLRLIYLALAHMIKFRGHFLIEGDLNPDNSDVDKLFIQLVQTYNQLFEENPINASGVDAKAILSARLSKSRRLENLIAQLPGEKKNGLFGNLIALSLGLTPNFKSNFDLAEDAKLQLSKDTYDDDLDNLLAQIGDQYADLFLAAKNLSDAILLSDILRVNTEITKAPLSASMIKRYDEHHQDLTLLKALVRQQLPEKYKEIFFDQSKNGYAGYIDGGASQEEFYKFIKPILEKMDGTEELLVKLNREDLLRKQRTFDNGSIPHQIHLGELHAILRRQEDFYPFLKDNREKIEKILTFRIPYYVGPLARGNSRFAWMTRKSEETITPWNFEEVVDKGASAQSFIERMTNFDKNLPNEKVLPKHSLLYEYFTVYNELTKVKYVTEGMRKPAFLSGEQKKAIVDLLFKTNRKVTVKQLKEDYFKKIECFDSVEISGVEDRFNASLGTYHDLLKIIKDKDFLDNEENEDILEDIVLTLTLFEDREMIEERLKTYAHLFDDKVMKQLKRRRYTGWGRLSRKLINGIRDKQSGKTILDFLKSDGFANRNFMQLIHDDSLTFKEDIQKAQVSGQGDSLHEHIANLAGSPAIKKGILQTVKVVDELVKVMGRHKPENIVIEMARENQTTQKGQKNSRERMKRIEEGIKELGSQILKEHPVENTQLQNEKLYLYYLQNGRDMYVDQELDINRLSDYDVDHIVPQSFLKDDSIDNKVLTRSDKARGKSDNVPSEEVVKKMKNYWRQLLNAKLITQRKFDNLTKAERGGLSELDKAGFIKRQLVETRQITKHVAQILDSRMNTKYDENDKLIREVKVITLKSKLVSDFRKDFQFYKVREINNYHHAHDAYLNAVVGTALIKKYPKLESEFVYGDYKVYDVRKMIAKSEQEIGKATAKYFFYSNIMNFFKTEITLANGEIRKRPLIETNGETGEIVWDKGRDFATVRKVLSMPQVNIVKKTEVQTGGFSKESILPKRNSDKLIARKKDWDPKKYGGFDSPTVAYSVLVVAKVEKGKSKKLKSVKELLGITIMERSSFEKNPIDFLEAKGYKEVKKDLIIKLPKYSLFELENGRKRMLASAGELQKGNELALPSKYVNFLYLASHYEKLKGSPEDNEQKQLFVEQHKHYLDEIIEQISEFSKRVILADANLDKVLSAYNKHRDKPIREQAENIIHLFTLTNLGAPAAFKYFDTTIDRKRYTSTKEVLDATLIHQSITGLYETRIDLSQLGGDGGPAPAPAPGGTLNIEDEHRLHETSKEPDVSLGSTWLSDFPQAWAETGGMGLAVRQAPLIIPLKATSTPVSIKQYPMSQEARLGIKPHIQRLLDQGILVPCQSPWNTPLLPVKKPGTNDYRPVQDLREVNKRVEDIHPTVPNPYNLLSGLPPSHQWYTVLDLKDAFFCLRLHPTSQPLFAFEWRDPEMGISGQLTWTRLPQGFKNSPTLFNEALHRDLADFRIQHPDLILLQYVDDLLLAATSELDCQQGTRALLQTLGNLGYRASAKKAQICQKQVKYLGYLLKEGQRWLTEARKETVMGQPTPKTPRQLREFLGTAGFCRLWIPGFAEMAAPLYPLTKPGTLFNWGPDQQKAYQEIKQALLTAPALGLPDLTKPFELFVDEKQGYAKGVLTQKLGPWRRPVAYLSKKLDPVAAGWPPCLRMVAAIAVLTKDAGKLTMGQPLVILAPHAVEALVKQPPDRWLSNARMTHYQALLLDTDRVQFGPVVALNPATLLPLPEEGLQHNCLDILAEAHGTRPDLTDQPLPDADHTWYTDGSSLLQEGQRKAGAAVTTETEVIWAKALPAGTSAQRAELIALTQALKMAEGKKLNVYTDSRYAFATAHIHGEIYRRRGWLTSEGKEIKNKDEILALLKALFLPKRLSIIHCPGHQKGHSAEARGNRMADQAARKAAITETPDTSTLLAGKRTADGSEFEKRTADGSEFESPKKKAKVE

SEQ ID NO: 2981 - protein, 2100 aa, synthetic construct
MPAAKRVKLDGGDKKYSIGLDIGTNSVGWAVITDEYKVPSKKFKVLGNTDRHSIKKNLIGALLFDSGETAEATRLKRTARRRYTRRKNRICYLQEIFSNEMAKVDDSFFHRLEESFLVEEDKKHERHPIFGNIVDEVAYHEKYPTIYHLRKKLVDSTDKADLRLIYLALAHMIKFRGHFLIEGDLNPDNSDVDKLFIQLVQTYNQLFEENPINASGVDAKAILSARLSKSRRLENLIAQLPGEKKNGLFGNLIALSLGLTPNFKSNFDLAEDAKLQLSKDTYDDDLDNLLAQIGDQYADLFLAAKNLSDAILLSDILRVNTEITKAPLSASMIKRYDEHHQDLTLLKALVRQQLPEKYKEIFFDQSKNGYAGYIDGGASQEEFYKFIKPILEKMDGTEELLVKLNREDLLRKQRTFDNGSIPHQIHLGELHAILRRQEDFYPFLKDNREKIEKILTFRIPYYVGPLARGNSRFAWMTRKSEETITPWNFEEVVDKGASAQSFIERMTNFDKNLPNEKVLPKHSLLYEYFTVYNELTKVKYVTEGMRKPAFLSGEQKKAIVDLLFKTNRKVTVKQLKEDYFKKIECFDSVEISGVEDRFNASLGTYHDLLKIIKDKDFLDNEENEDILEDIVLTLTLFEDREMIEERLKTYAHLFDDKVMKQLKRRRYTGWGRLSRKLINGIRDKQSGKTILDFLKSDGFANRNFMQLIHDDSLTFKEDIQKAQVSGQGDSLHEHIANLAGSPAIKKGILQTVKVVDELVKVMGRHKPENIVIEMARENQTTQKGQKNSRERMKRIEEGIKELGSQILKEHPVENTQLQNEKLYLYYLQNGRDMYVDQELDINRLSDYDVDHIVPQSFLKDDSIDNKVLTRSDKARGKSDNVPSEEVVKKMKNYWRQLLNAKLITQRKFDNLTKAERGGLSELDKAGFIKRQLVETRQITKHVAQILDSRMNTKYDENDKLIREVKVITLKSKLVSDFRKDFQFYKVREINNYHHAHDAYLNAVVGTALIKKYPKLESEFVYGDYKVYDVRKMIAKSEQEIGKATAKYFFYSNIMNFFKTEITLANGEIRKRPLIETNGETGEIVWDKGRDFATVRKVLSMPQVNIVKKTEVQTGGFSKESILPKRNSDKLIARKKDWDPKKYGGFDSPTVAYSVLVVAKVEKGKSKKLKSVKELLGITIMERSSFEKNPIDFLEAKGYKEVKKDLIIKLPKYSLFELENGRKRMLASAGELQKGNELALPSKYVNFLYLASHYEKLKGSPEDNEQKQLFVEQHKHYLDEIIEQISEFSKRVILADANLDKVLSAYNKHRDKPIREQAENIIHLFTLTNLGAPAAFKYFDTTIDRKRYTSTKEVLDATLIHQSITGLYETRIDLSQLGGDGGGGSGGSGGSGGSGGSGGTLNIEDEHRLHETSKEPDVSLGSTWLSDFPQAWAETGGMGLAVRQAPLIIPLKATSTPVSIKQYPMSQEARLGIKPHIQRLLDQGILVPCQSPWNTPLLPVKKPGTNDYRPVQDLREVNKRVEDIHPTVPNPYNLLSGLPPSHQWYTVLDLKDAFFCLRLHPTSQPLFAFEWRDPEMGISGQLTWTRLPQGFKNSPTLFNEALHRDLADFRIQHPDLILLQYVDDLLLAATSELDCQQGTRALLQTLGNLGYRASAKKAQICQKQVKYLGYLLKEGQRWLTEARKETVMGQPTPKTPRQLREFLGTAGFCRLWIPGFAEMAAPLYPLTKPGTLFNWGPDQQKAYQEIKQALLTAPALGLPDLTKPFELFVDEKQGYAKGVLTQKLGPWRRPVAYLSKKLDPVAAGWPPCLRMVAAIAVLTKDAGKLTMGQPLVILAPHAVEALVKQPPDRWLSNARMTHYQALLLDTDRVQFGPVVALNPATLLPLPEEGLQHNCLDILAEAHGTRPDLTDQPLPDADHTWYTDGSSLLQEGQRKAGAAVTTETEVIWAKALPAGTSAQRAELIALTQALKMAEGKKLNVYTDSRYAFATAHIHGEIYRRRGWLTSEGKEIKNKDEILALLKALFLPKRLSIIHCPGHQKGHSAEARGNRMADQAARKAAITETPDTSTLLAGKRTADGSEFEKRTADGSEFESPKKKAKVE

SEQ ID NO: 2982 - protein, 2093 aa, synthetic construct; identical to SEQ ID NO: 2726

SEQ ID NO: 2983 - protein, 2115 aa, synthetic construct; identical to SEQ ID NO: 2741

SEQ ID NO: 2984 - protein, 2090 aa, synthetic construct
MPAAKRVKLDGGDKKYSIGLDIGTNSVGWAVITDEYKVPSKKFKVLGNTDRHSIKKNLIGALLFDSGETAEATRLKRTARRRYTRRKNRICYLQEIFSNEMAKVDDSFFHRLEESFLVEEDKKHERHPIFGNIVDEVAYHEKYPTIYHLRKKLVDSTDKADLRLIYLALAHMIKFRGHFLIEGDLNPDNSDVDKLFIQLVQTYNQLFEENPINASGVDAKAILSARLSKSRRLENLIAQLPGEKKNGLFGNLIALSLGLTPNFKSNFDLAEDAKLQLSKDTYDDDLDNLLAQIGDQYADLFLAAKNLSDAILLSDILRVNTEITKAPLSASMIKRYDEHHQDLTLLKALVRQQLPEKYKEIFFDQSKNGYAGYIDGGASQEEFYKFIKPILEKMDGTEELLVKLNREDLLRKQRTFDNGSIPHQIHLGELHAILRRQEDFYPFLKDNREKIEKILTFRIPYYVGPLARGNSRFAWMTRKSEETITPWNFEEVVDKGASAQSFIERMTNFDKNLPNEKVLPKHSLLYEYFTVYNELTKVKYVTEGMRKPAFLSGEQKKAIVDLLFKTNRKVTVKQLKEDYFKKIECFDSVEISGVEDRFNASLGTYHDLLKIIKDKDFLDNEENEDILEDIVLTLTLFEDREMIEERLKTYAHLFDDKVMKQLKRRRYTGWGRLSRKLINGIRDKQSGKTILDFLKSDGFANRNFMQLIHDDSLTFKEDIQKAQVSGQGDSLHEHIANLAGSPAIKKGILQTVKVVDELVKVMGRHKPENIVIEMARENQTTQKGQKNSRERMKRIEEGIKELGSQILKEHPVENTQLQNEKLYLYYLQNGRDMYVDQELDINRLSDYDVDHIVPQSFLKDDSIDNKVLTRSDKARGKSDNVPSEEVVKKMKNYWRQLLNAKLITQRKFDNLTKAERGGLSELDKAGFIKRQLVETRQITKHVAQILDSRMNTKYDENDKLIREVKVITLKSKLVSDFRKDFQFYKVREINNYHHAHDAYLNAVVGTALIKKYPKLESEFVYGDYKVYDVRKMIAKSEQEIGKATAKYFFYSNIMNFFKTEITLANGEIRKRPLIETNGETGEIVWDKGRDFATVRKVLSMPQVNIVKKTEVQTGGFSKESILPKRNSDKLIARKKDWDPKKYGGFDSPTVAYSVLVVAKVEKGKSKKLKSVKELLGITIMERSSFEKNPIDFLEAKGYKEVKKDLIIKLPKYSLFELENGRKRMLASAGELQKGNELALPSKYVNFLYLASHYEKLKGSPEDNEQKQLFVEQHKHYLDEIIEQISEFSKRVILADANLDKVLSAYNKHRDKPIREQAENIIHLFTLTNLGAPAAFKYFDTTIDRKRYTSTKEVLDATLIHQSITGLYETRIDLSQLGGDGGGGGGGGGTLNIEDEHRLHETSKEPDVSLGSTWLSDFPQAWAETGGMGLAVRQAPLIIPLKATSTPVSIKQYPMSQEARLGIKPHIQRLLDQGILVPCQSPWNTPLLPVKKPGTNDYRPVQDLREVNKRVEDIHPTVPNPYNLLSGLPPSHQWYTVLDLKDAFFCLRLHPTSQPLFAFEWRDPEMGISGQLTWTRLPQGFKNSPTLFNEALHRDLADFRIQHPDLILLQYVDDLLLAATSELDCQQGTRALLQTLGNLGYRASAKKAQICQKQVKYLGYLLKEGQRWLTEARKETVMGQPTPKTPRQLREFLGTAGFCRLWIPGFAEMAAPLYPLTKPGTLFNWGPDQQKAYQEIKQALLTAPALGLPDLTKPFELFVDEKQGYAKGVLTQKLGPWRRPVAYLSKKLDPVAAGWPPCLRMVAAIAVLTKDAGKLTMGQPLVILAPHAVEALVKQPPDRWLSNARMTHYQALLLDTDRVQFGPVVALNPATLLPLPEEGLQHNCLDILAEAHGTRPDLTDQPLPDADHTWYTDGSSLLQEGQRKAGAAVTTETEVIWAKALPAGTSAQRAELIALTQALKMAEGKKLNVYTDSRYAFATAHIHGEIYRRRGWLTSEGKEIKNKDEILALLKALFLPKRLSIIHCPGHQKGHSAEARGNRMADQAARKAAITETPDTSTLLAGKRTADGSEFEKRTADGSEFESPKKKAKVE

SEQ ID NO: 2985 - protein, 2094 aa, synthetic construct
MPAAKRVKLDGGDKKYSIGLDIGTNSVGWAVITDEYKVPSKKFKVLGNTDRHSIKKNLIGALLFDSGETAEATRLKRTARRRYTRRKNRICYLQEIFSNEMAKVDDSFFHRLEESFLVEEDKKHERHPIFGNIVDEVAYHEKYPTIYHLRKKLVDSTDKADLRLIYLALAHMIKFRGHFLIEGDLNPDNSDVDKLFIQLVQTYNQLFEENPINASGVDAKAILSARLSKSRRLENLIAQLPGEKKNGLFGNLIALSLGLTPNFKSNFDLAEDAKLQLSKDTYDDDLDNLLAQIGDQYADLFLAAKNLSDAILLSDILRVNTEITKAPLSASMIKRYDEHHQDLTLLKALVRQQLPEKYKEIFFDQSKNGYAGYIDGGASQEEFYKFIKPILEKMDGTEELLVKLNREDLLRKQRTFDNGSIPHQIHLGELHAILRRQEDFYPFLKDNREKIEKILTFRIPYYVGPLARGNSRFAWMTRKSEETITPWNFEEVVDKGASAQSFIERMTNFDKNLPNEKVLPKHSLLYEYFTVYNELTKVKYVTEGMRKPAFLSGEQKKAIVDLLFKTNRKVTVKQLKEDYFKKIECFDSVEISGVEDRFNASLGTYHDLLKIIKDKDFLDNEENEDILEDIVLTLTLFEDREMIEERLKTYAHLFDDKVMKQLKRRRYTGWGRLSRKLINGIRDKQSGKTILDFLKSDGFANRNFMQLIHDDSLTFKEDIQKAQVSGQGDSLHEHIANLAGSPAIKKGILQTVKVVDELVKVMGRHKPENIVIEMARENQTTQKGQKNSRERMKRIEEGIKELGSQILKEHPVENTQLQNEKLYLYYLQNGRDMYVDQELDINRLSDYDVDHIVPQSFLKDDSIDNKVLTRSDKARGKSDNVPSEEVVKKMKNYWRQLLNAKLITQRKFDNLTKAERGGLSELDKAGFIKRQLVETRQITKHVAQILDSRMNTKYDENDKLIREVKVITLKSKLVSDFRKDFQFYKVREINNYHHAHDAYLNAVVGTALIKKYPKLESEFVYGDYKVYDVRKMIAKSEQEIGKATAKYFFYSNIMNFFKTEITLANGEIRKRPLIETNGETGEIVWDKGRDFATVRKVLSMPQVNIVKKTEVQTGGFSKESILPKRNSDKLIARKKDWDPKKYGGFDSPTVAYSVLVVAKVEKGKSKKLKSVKELLGITIMERSSFEKNPIDFLEAKGYKEVKKDLIIKLPKYSLFELENGRKRMLASAGELQKGNELALPSKYVNFLYLASHYEKLKGSPEDNEQKQLFVEQHKHYLDEIIEQISEFSKRVILADANLDKVLSAYNKHRDKPIREQAENIIHLFTLTNLGAPAAFKYFDTTIDRKRYTSTKEVLDATLIHQSITGLYETRIDLSQLGGDGGGGSGSSPAPGGTLNIEDEHRLHETSKEPDVSLGSTWLSDFPQAWAETGGMGLAVRQAPLIIPLKATSTPVSIKQYPMSQEARLGIKPHIQRLLDQGILVPCQSPWNTPLLPVKKPGTNDYRPVQDLREVNKRVEDIHPTVPNPYNLLSGLPPSHQWYTVLDLKDAFFCLRLHPTSQPLFAFEWRDPEMGISGQLTWTRLPQGFKNSPTLFNEALHRDLADFRIQHPDLILLQYVDDLLLAATSELDCQQGTRALLQTLGNLGYRASAKKAQICQKQVKYLGYLLKEGQRWLTEARKETVMGQPTPKTPRQLREFLGTAGFCRLWIPGFAEMAAPLYPLTKPGTLFNWGPDQQKAYQEIKQALLTAPALGLPDLTKPFELFVDEKQGYAKGVLTQKLGPWRRPVAYLSKKLDPVAAGWPPCLRMVAAIAVLTKDAGKLTMGQPLVILAPHAVEALVKQPPDRWLSNARMTHYQALLLDTDRVQFGPVVALNPATLLPLPEEGLQHNCLDILAEAHGTRPDLTDQPLPDADHTWYTDGSSLLQEGQRKAGAAVTTETEVIWAKALPAGTSAQRAELIALTQALKMAEGKKLNVYTDSRYAFATAHIHGEIYRRRGWLTSEGKEIKNKDEILALLKALFLPKRLSIIHCPGHQKGHSAEARGNRMADQAARKAAITETPDTSTLLAGKRTADGSEFEKRTADGSEFESPKKKAKVE

SEQ ID NO: 2986 - protein, 2088 aa, synthetic construct
MPAAKRVKLDGGDKKYSIGLDIGTNSVGWAVITDEYKVPSKKFKVLGNTDRHSIKKNLIGALLFDSGETAEATRLKRTARRRYTRRKNRICYLQEIFSNEMAKVDDSFFHRLEESFLVEEDKKHERHPIFGNIVDEVAYHEKYPTIYHLRKKLVDSTDKADLRLIYLALAHMIKFRGHFLIEGDLNPDNSDVDKLFIQLVQTYNQLFEENPINASGVDAKAILSARLSKSRRLENLIAQLPGEKKNGLFGNLIALSLGLTPNFKSNFDLAEDAKLQLSKDTYDDDLDNLLAQIGDQYADLFLAAKNLSDAILLSDILRVNTEITKAPLSASMIKRYDEHHQDLTLLKALVRQQLPEKYKEIFFDQSKNGYAGYIDGGASQEEFYKFIKPILEKMDGTEELLVKLNREDLLRKQRTFDNGSIPHQIHLGELHAILRRQEDFYPFLKDNREKIEKILTFRIPYYVGPLARGNSRFAWMTRKSEETITPWNFEEVVDKGASAQSFIERMTNFDKNLPNEKVLPKHSLLYEYFTVYNELTKVKYVTEGMRKPAFLSGEQKKAIVDLLFKTNRKVTVKQLKEDYFKKIECFDSVEISGVEDRFNASLGTYHDLLKIIKDKDFLDNEENEDILEDIVLTLTLFEDREMIEERLKTYAHLFDDKVMKQLKRRRYTGWGRLSRKLINGIRDKQSGKTILDFLKSDGFANRNFMQLIHDDSLTFKEDIQKAQVSGQGDSLHEHIANLAGSPAIKKGILQTVKVVDELVKVMGRHKPENIVIEMARENQTTQKGQKNSRERMKRIEEGIKELGSQILKEHPVENTQLQNEKLYLYYLQNGRDMYVDQELDINRLSDYDVDHIVPQSFLKDDSIDNKVLTRSDKARGKSDNVPSEEVVKKMKNYWRQLLNAKLITQRKFDNLTKAERGGLSELDKAGFIKRQLVETRQITKHVAQILDSRMNTKYDENDKLIREVKVITLKSKLVSDFRKDFQFYKVREINNYHHAHDAYLNAVVGTALIKKYPKLESEFVYGDYKVYDVRKMIAKSEQEIGKATAKYFFYSNIMNFFKTEITLANGEIRKRPLIETNGETGEIVWDKGRDFATVRKVLSMPQVNIVKKTEVQTGGFSKESILPKRNSDKLIARKKDWDPKKYGGFDSPTVAYSVLVVAKVEKGKSKKLKSVKELLGITIMERSSFEKNPIDFLEAKGYKEVKKDLIIKLPKYSLFELENGRKRMLASAGELQKGNELALPSKYVNFLYLASHYEKLKGSPEDNEQKQLFVEQHKHYLDEIIEQISEFSKRVILADANLDKVLSAYNKHRDKPIREQAENIIHLFTLTNLGAPAAFKYFDTTIDRKRYTSTKEVLDATLIHQSITGLYETRIDLSQLGGDGGGSSGGTLNIEDEHRLHETSKEPDVSLGSTWLSDFPQAWAETGGMGLAVRQAPLIIPLKATSTPVSIKQYPMSQEARLGIKPHIQRLLDQGILVPCQSPWNTPLLPVKKPGTNDYRPVQDLREVNKRVEDIHPTVPNPYNLLSGLPPSHQWYTVLDLKDAFFCLRLHPTSQPLFAFEWRDPEMGISGQLTWTRLPQGFKNSPTLFNEALHRDLADFRIQHPDLILLQYVDDLLLAATSELDCQQGTRALLQTLGNLGYRASAKKAQICQKQVKYLGYLLKEGQRWLTEARKETVMGQPTPKTPRQLREFLGTAGFCRLWIPGFAEMAAPLYPLTKPGTLFNWGPDQQKAYQEIKQALLTAPALGLPDLTKPFELFVDEKQGYAKGVLTQKLGPWRRPVAYLSKKLDPVAAGWPPCLRMVAAIAVLTKDAGKLTMGQPLVILAPHAVEALVKQPPDRWLSNARMTHYQALLLDTDRVQFGPVVALNPATLLPLPEEGLQHNCLDILAEAHGTRPDLTDQPLPDADHTWYTDGSSLLQEGQRKAGAAVTTETEVIWAKALPAGTSAQRAELIALTQALKMAEGKKLNVYTDSRYAFATAHIHGEIYRRRGWLTSEGKEIKNKDEILALLKALFLPKRLSIIHCPGHQKGHSAEARGNRMADQAARKAAITETPDTSTLLAGKRTADGSEFEKRTADGSEFESPKKKAKVE

SEQ ID NO: 2987 - protein, 2096 aa, synthetic construct; identical to SEQ ID NO: 2776

SEQ ID NO: 2988 - protein, 2094 aa, synthetic construct
MPAAKRVKLDGGDKKYSIGLDIGTNSVGWAVITDEYKVPSKKFKVLGNTDRHSIKKNLIGALLFDSGETAEATRLKRTARRRYTRRKNRICYLQEIFSNEMAKVDDSFFHRLEESFLVEEDKKHERHPIFGNIVDEVAYHEKYPTIYHLRKKLVDSTDKADLRLIYLALAHMIKFRGHFLIEGDLNPDNSDVDKLFIQLVQTYNQLFEENPINASGVDAKAILSARLSKSRRLENLIAQLPGEKKNGLFGNLIALSLGLTPNFKSNFDLAEDAKLQLSKDTYDDDLDNLLAQIGDQYADLFLAAKNLSDAILLSDILRVNTEITKAPLSASMIKRYDEHHQDLTLLKALVRQQLPEKYKEIFFDQSKNGYAGYIDGGASQEEFYKFIKPILEKMDGTEELLVKLNREDLLRKQRTFDNGSIPHQIHLGELHAILRRQEDFYPFLKDNREKIEKILTFRIPYYVGPLARGNSRFAWMTRKSEETITPWNFEEVVDKGASAQSFIERMTNFDKNLPNEKVLPKHSLLYEYFTVYNELTKVKYVTEGMRKPAFLSGEQKKAIVDLLFKTNRKVTVKQLKEDYFKKIECFDSVEISGVEDRFNASLGTYHDLLKIIKDKDFLDNEENEDILEDIVLTLTLFEDREMIEERLKTYAHLFDDKVMKQLKRRRYTGWGRLSRKLINGIRDKQSGKTILDFLKSDGFANRNFMQLIHDDSLTFKEDIQKAQVSGQGDSLHEHIANLAGSPAIKKGILQTVKVVDELVKVMGRHKPENIVIEMARENQTTQKGQKNSRERMKRIEEGIKELGSQILKEHPVENTQLQNEKLYLYYLQNGRDMYVDQELDINRLSDYDVDHIVPQSFLKDDSIDNKVLTRSDKARGKSDNVPSEEVVKKMKNYWRQLLNAKLITQRKFDNLTKAERGGLSELDKAGFIKRQLVETRQITKHVAQILDSRMNTKYDENDKLIREVKVITLKSKLVSDFRKDFQFYKVREINNYHHAHDAYLNAVVGTALIKKYPKLESEFVYGDYKVYDVRKMIAKSEQEIGKATAKYFFYSNIMNFFKTEITLANGEIRKRPLIETNGETGEIVWDKGRDFATVRKVLSMPQVNIVKKTEVQTGGFSKESILPKRNSDKLIARKKDWDPKKYGGFDSPTVAYSVLVVAKVEKGKSKKLKSVKELLGITIMERSSFEKNPIDFLEAKGYKEVKKDLIIKLPKYSLFELENGRKRMLASAGELQKGNELALPSKYVNFLYLASHYEKLKGSPEDNEQKQLFVEQHKHYLDEIIEQISEFSKRVILADANLDKVLSAYNKHRDKPIREQAENIIHLFTLTNLGAPAAFKYFDTTIDRKRYTSTKEVLDATLIHQSITGLYETRIDLSQLGGDGGGSSPAPGGGGGTLNIEDEHRLHETSKEPDVSLGSTWLSDFPQAWAETGGMGLAVRQAPLIIPLKATSTPVSIKQYPMSQEARLGIKPHIQRLLDQGILVPCQSPWNTPLLPVKKPGTNDYRPVQDLREVNKRVEDIHPTVPNPYNLLSGLPPSHQWYTVLDLKDAFFCLRLHPTSQPLFAFEWRDPEMGISGQLTWTRLPQGFKNSPTLFNEALHRDLADFRIQHPDLILLQYVDDLLLAATSELDCQQGTRALLQTLGNLGYRASAKKAQICQKQVKYLGYLLKEGQRWLTEARKETVMGQPTPKTPRQLREFLGTAGFCRLWIPGFAEMAAPLYPLTKPGTLFNWGPDQQKAYQEIKQALLTAPALGLPDLTKPFELFVDEKQGYAKGVLTQKLGPWRRPVAYLSKKLDPVAAGWPPCLRMVAAIAVLTKDAGKLTMGQPLVILAPHAVEALVKQPPDRWLSNARMTHYQALLLDTDRVQFGPVVALNPATLLPLPEEGLQHNCLDILAEAHGTRPDLTDQPLPDADHTWYTDGSSLLQEGQRKAGAAVTTETEVIWAKALPAGTSAQRAELIALTQALKMAEGKKLNVYTDSRYAFATAHIHGEIYRRRGWLTSEGKEIKNKDEILALLKALFLPKRLSIIHCPGHQKGHSAEARGNRMADQAARKAAITETPDTSTLLAGKRTADGSEFEKRTADGSEFESPKKKAKVE

SEQ ID NO: 2989 - protein, 2096 aa, synthetic construct; identical to SEQ ID NO: 2727

SEQ ID NO: 2990 - protein, 2096 aa, synthetic construct; identical to SEQ ID NO: 2764

SEQ ID NO: 2991 - protein, 2110 aa, synthetic construct; identical to SEQ ID NO: 2716

SEQ ID NO: 2992 - protein, 2115 aa, synthetic construct
MPAAKRVKLDGGDKKYSIGLDIGTNSVGWAVITDEYKVPSKKFKVLGNTDRHSIKKNLIGALLFDSGETAEATRLKRTARRRYTRRKNRICYLQEIFSNEMAKVDDSFFHRLEESFLVEEDKKHERHPIFGNIVDEVAYHEKYPTIYHLRKKLVDSTDKADLRLIYLALAHMIKFRGHFLIEGDLNPDNSDVDKLFIQLVQTYNQLFEENPINASGVDAKAILSARLSKSRRLENLIAQLPGEKKNGLFGNLIALSLGLTPNFKSNFDLAEDAKLQLSKDTYDDDLDNLLAQIGDQYADLFLAAKNLSDAILLSDILRVNTEITKAPLSASMIKRYDEHHQDLTLLKALVRQQLPEKYKEIFFDQSKNGYAGYIDGGASQEEFYKFIKPILEKMDGTEELLVKLNREDLLRKQRTFDNGSIPHQIHLGELHAILRRQEDFYPFLKDNREKIEKILTFRIPYYVGPLARGNSRFAWMTRKSEETITPWNFEEVVDKGASAQSFIERMTNFDKNLPNEKVLPKHSLLYEYFTVYNELTKVKYVTEGMRKPAFLSGEQKKAIVDLLFKTNRKVTVKQLKEDYFKKIECFDSVEISGVEDRFNASLGTYHDLLKIIKDKDFLDNEENEDILEDIVLTLTLFEDREMIEERLKTYAHLFDDKVMKQLKRRRYTGWGRLSRKLINGIRDKQSGKTILDFLKSDGFANRNFMQLIHDDSLTFKEDIQKAQVSGQGDSLHEHIANLAGSPAIKKGILQTVKVVDELVKVMGRHKPENIVIEMARENQTTQKGQKNSRERMKRIEEGIKELGSQILKEHPVENTQLQNEKLYLYYLQNGRDMYVDQELDINRLSDYDVDHIVPQSFLKDDSIDNKVLTRSDKARGKSDNVPSEEVVKKMKNYWRQLLNAKLITQRKFDNLTKAERGGLSELDKAGFIKRQLVETRQITKHVAQILDSRMNTKYDENDKLIREVKVITLKSKLVSDFRKDFQFYKVREINNYHHAHDAYLNAVVGTALIKKYPKLESEFVYGDYKVYDVRKMIAKSEQEIGKATAKYFFYSNIMNFFKTEITLANGEIRKRPLIETNGETGEIVWDKGRDFATVRKVLSMPQVNIVKKTEVQTGGFSKESILPKRNSDKLIARKKDWDPKKYGGFDSPTVAYSVLVVAKVEKGKSKKLKSVKELLGITIMERSSFEKNPIDFLEAKGYKEVKKDLIIKLPKYSLFELENGRKRMLASAGELQKGNELALPSKYVNFLYLASHYEKLKGSPEDNEQKQLFVEQHKHYLDEIIEQISEFSKRVILADANLDKVLSAYNKHRDKPIREQAENIIHLFTLTNLGAPAAFKYFDTTIDRKRYTSTKEVLDATLIHQSITGLYETRIDLSQLGGDGGEAAAKEAAAKEAAAKEAAAKEAAAKEAAAKGGTLNIEDEHRLHETSKEPDVSLGSTWLSDFPQAWAETGGMGLAVRQAPLIIPLKATSTPVSIKQYPMSQEARLGIKPHIQRLLDQGILVPCQSPWNTPLLPVKKPGTNDYRPVQDLREVNKRVEDIHPTVPNPYNLLSGLPPSHQWYTVLDLKDAFFCLRLHPTSQPLFAFEWRDPEMGISGQLTWTRLPQGFKNSPTLFNEALHRDLADFRIQHPDLILLQYVDDLLLAATSELDCQQGTRALLQTLGNLGYRASAKKAQICQKQVKYLGYLLKEGQRWLTEARKETVMGQPTPKTPRQLREFLGTAGFCRLWIPGFAEMAAPLYPLTKPGTLFNWGPDQQKAYQEIKQALLTAPALGLPDLTKPFELFVDEKQGYAKGVLTQKLGPWRRPVAYLSKKLDPVAAGWPPCLRMVAAIAVLTKDAGKLTMGQPLVILAPHAVEALVKQPPDRWLSNARMTHYQALLLDTDRVQFGPVVALNPATLLPLPEEGLQHNCLDILAEAHGTRPDLTDQPLPDADHTWYTDGSSLLQEGQRKAGAAVTTETEVIWAKALPAGTSAQRAELIALTQALKMAEGKKLNVYTDSRYAFATAHIHGEIYRRRGWLTSEGKEIKNKDEILALLKALFLPKRLSIIHCPGHQKGHSAEARGNRMADQAARKAAITETPDTSTLLAGKRTADGSEFEKRTADGSEFESPKKKAKVE

SEQ ID NO: 2993 - protein, 2094 aa, synthetic construct; identical to SEQ ID NO: 2766

SEQ ID NO: 2994 - protein, 2094 aa, synthetic construct; identical to SEQ ID NO: 2773

SEQ ID NO: 2995 - protein, 2097 aa, synthetic construct
MPAAKRVKLDGGDKKYSIGLDIGTNSVGWAVITDEYKVPSKKFKVLGNTDRHSIKKNLIGALLFDSGETAEATRLKRTARRRYTRRKNRICYLQEIFSNEMAKVDDSFFHRLEESFLVEEDKKHERHPIFGNIVDEVAYHEKYPTIYHLRKKLVDSTDKADLRLIYLALAHMIKFRGHFLIEGDLNPDNSDVDKLFIQLVQTYNQLFEENPINASGVDAKAILSARLSKSRRLENLIAQLPGEKKNGLFGNLIALSLGLTPNFKSNFDLAEDAKLQLSKDTYDDDLDNLLAQIGDQYADLFLAAKNLSDAILLSDILRVNTEITKAPLSASMIKRYDEHHQDLTLLKALVRQQLPEKYKEIFFDQSKNGYAGYIDGGASQEEFYKFIKPILEKMDGTEELLVKLNREDLLRKQRTFDNGSIPHQIHLGELHAILRRQEDFYPFLKDNREKIEKILTFRIPYYVGPLARGNSRFAWMTRKSEETITPWNFEEVVDKGASAQSFIERMTNFDKNLPNEKVLPKHSLLYEYFTVYNELTKVKYVTEGMRKPAFLSGEQKKAIVDLLFKTNRKVTVKQLKEDYFKKIECFDSVEISGVEDRFNASLGTYHDLLKIIKDKDFLDNEENEDILEDIVLTLTLFEDREMIEERLKTYAHLFDDKVMKQLKRRRYTGWGRLSRKLINGIRDKQSGKTILDFLKSDGFANRNFMQLIHDDSLTFKEDIQKAQVSGQGDSLHEHIANLAGSPAIKKGILQTVKVVDELVKVMGRHKPENIVIEMARENQTTQKGQKNSRERMKRIEEGIKELGSQILKEHPVENTQLQNEKLYLYYLQNGRDMYVDQELDINRLSDYDVDHIVPQSFLKDDSIDNKVLTRSDKARGKSDNVPSEEVVKKMKNYWRQLLNAKLITQRKFDNLTKAERGGLSELDKAGFIKRQLVETRQITKHVAQILDSRMNTKYDENDKLIREVKVITLKSKLVSDFRKDFQFYKVREINNYHHAHDAYLNAVVGTALIKKYPKLESEFVYGDYKVYDVRKMIAKSEQEIGKATAKYFFYSNIMNFFKTEITLANGEIRKRPLIETNGETGEIVWDKGRDFATVRKVLSMPQVNIVKKTEVQTGGFSKESILPKRNSDKLIARKKDWDPKKYGGFDSPTVAYSVLVVAKVEKGKSKKLKSVKELLGITIMERSSFEKNPIDFLEAKGYKEVKKDLIIKLPKYSLFELENGRKRMLASAGELQKGNELALPSKYVNFLYLASHYEKLKGSPEDNEQKQLFVEQHKHYLDEIIEQISEFSKRVILADANLDKVLSAYNKHRDKPIREQAENIIHLFTLTNLGAPAAFKYFDTTIDRKRYTSTKEVLDATLIHQSITGLYETRIDLSQLGGDGGGSAGSAAGSGEFGGTLNIEDEHRLHETSKEPDVSLGSTWLSDFPQAWAETGGMGLAVRQAPLIIPLKATSTPVSIKQYPMSQEARLGIKPHIQRLLDQGILVPCQSPWNTPLLPVKKPGTNDYRPVQDLREVNKRVEDIHPTVPNPYNLLSGLPPSHQWYTVLDLKDAFFCLRLHPTSQPLFAFEWRDPEMGISGQLTWTRLPQGFKNSPTLFNEALHRDLADFRIQHPDLILLQYVDDLLLAATSELDCQQGTRALLQTLGNLGYRASAKKAQICQKQVKYLGYLLKEGQRWLTEARKETVMGQPTPKTPRQLREFLGTAGFCRLWIPGFAEMAAPLYPLTKPGTLFNWGPDQQKAYQEIKQALLTAPALGLPDLTKPFELFVDEKQGYAKGVLTQKLGPWRRPVAYLSKKLDPVAAGWPPCLRMVAAIAVLTKDAGKLTMGQPLVILAPHAVEALVKQPPDRWLSNARMTHYQALLLDTDRVQFGPVVALNPATLLPLPEEGLQHNCLDILAEAHGTRPDLTDQPLPDADHTWYTDGSSLLQEGQRKAGAAVTTETEVIWAKALPAGTSAQRAELIALTQALKMAEGKKLNVYTDSRYAFATAHIHGEIYRRRGWLTSEGKEIKNKDEILALLKALFLPKRLSIIHCPGHQKGHSAEARGNRMADQAARKAAITETPDTSTLLAGKRTADGSEFEKRTADGSEFESPKKKAKVE

SEQ ID NO: 2996 - protein, 2091 aa, synthetic construct
MPAAKRVKLDGGDKKYSIGLDIGTNSVGWAVITDEYKVPSKKFKVLGNTDRHSIKKNLIGALLFDSGETAEATRLKRTARRRYTRRKNRICYLQEIFSNEMAKVDDSFFHRLEESFLVEEDKKHERHPIFGNIVDEVAYHEKYPTIYHLRKKLVDSTDKADLRLIYLALAHMIKFRGHFLIEGDLNPDNSDVDKLFIQLVQTYNQLFEENPINASGVDAKAILSARLSKSRRLENLIAQLPGEKKNGLFGNLIALSLGLTPNFKSNFDLAEDAKLQLSKDTYDDDLDNLLAQIGDQYADLFLAAKNLSDAILLSDILRVNTEITKAPLSASMIKRYDEHHQDLTLLKALVRQQLPEKYKEIFFDQSKNGYAGYIDGGASQEEFYKFIKPILEKMDGTEELLVKLNREDLLRKQRTFDNGSIPHQIHLGELHAILRRQEDFYPFLKDNREKIEKILTFRIPYYVGPLARGNSRFAWMTRKSEETITPWNFEEVVDKGASAQSFIERMTNFDKNLPNEKVLPKHSLLYEYFTVYNELTKVKYVTEGMRKPAFLSGEQKKAIVDLLFKTNRKVTVKQLKEDYFKKIECFDSVEISGVEDRFNASLGTYHDLLKIIKDKDFLDNEENEDILEDIVLTLTLFEDREMIEERLKTYAHLFDDKVMKQLKRRRYTGWGRLSRKLINGIRDKQSGKTILDFLKSDGFANRNFMQLIHDDSLTFKEDIQKAQVSGQGDSLHEHIANLAGSPAIKKGILQTVKVVDELVKVMGRHKPENIVIEMARENQTTQKGQKNSRERMKRIEEGIKELGSQILKEHPVENTQLQNEKLYLYYLQNGRDMYVDQELDINRLSDYDVDHIVPQSFLKDDSIDNKVLTRSDKARGKSDNVPSEEVVKKMKNYWRQLLNAKLITQRKFDNLTKAERGGLSELDKAGFIKRQLVETRQITKHVAQILDSRMNTKYDENDKLIREVKVITLKSKLVSDFRKDFQFYKVREINNYHHAHDAYLNAVVGTALIKKYPKLESEFVYGDYKVYDVRKMIAKSEQEIGKATAKYFFYSNIMNFFKTEITLANGEIRKRPLIETNGETGEIVWDKGRDFATVRKVLSMPQVNIVKKTEVQTGGFSKESILPKRNSDKLIARKKDWDPKKYGGFDSPTVAYSVLVVAKVEKGKSKKLKSVKELLGITIMERSSFEKNPIDFLEAKGYKEVKKDLIIKLPKYSLFELENGRKRMLASAGELQKGNELALPSKYVNFLYLASHYEKLKGSPEDNEQKQLFVEQHKHYLDEIIEQISEFSKRVILADANLDKVLSAYNKHRDKPIREQAENIIHLFTLTNLGAPAAFKYFDTTIDRKRYTSTKEVLDATLIHQSITGLYETRIDLSQLGGDGGPAPGSSGGTLNIEDEHRLHETSKEPDVSLGSTWLSDFPQAWAETGGMGLAVRQAPLIIPLKATSTPVSIKQYPMSQEARLGIKPHIQRLLDQGILVPCQSPWNTPLLPVKKPGTNDYRPVQDLREVNKRVEDIHPTVPNPYNLLSGLPPSHQWYTVLDLKDAFFCLRLHPTSQPLFAFEWRDPEMGISGQLTWTRLPQGFKNSPTLFNEALHRDLADFRIQHPDLILLQYVDDLLLAATSELDCQQGTRALLQTLGNLGYRASAKKAQICQKQVKYLGYLLKEGQRWLTEARKETVMGQPTPKTPRQLREFLGTAGFCRLWIPGFAEMAAPLYPLTKPGTLFNWGPDQQKAYQEIKQALLTAPALGLPDLTKPFELFVDEKQGYAKGVLTQKLGPWRRPVAYLSKKLDPVAAGWPPCLRMVAAIAVLTKDAGKLTMGQPLVILAPHAVEALVKQPPDRWLSNARMTHYQALLLDTDRVQFGPVVALNPATLLPLPEEGLQHNCLDILAEAHGTRPDLTDQPLPDADHTWYTDGSSLLQEGQRKAGAAVTTETEVIWAKALPAGTSAQRAELIALTQALKMAEGKKLNVYTDSRYAFATAHIHGEIYRRRGWLTSEGKEIKNKDEILALLKALFLPKRLSIIHCPGHQKGHSAEARGNRMADQAARKAAITETPDTSTLLAGKRTADGSEFEKRTADGSEFESPKKKAKVE

SEQ ID NO: 2997 - protein, 2096 aa, synthetic construct
MPAAKRVKLDGGDKKYSIGLDIGTNSVGWAVITDEYKVPSKKFKVLGNTDRHSIKKNLIGALLFDSGETAEATRLKRTARRRYTRRKNRICYLQEIFSNEMAKVDDSFFHRLEESFLVEEDKKHERHPIFGNIVDEVAYHEKYPTIYHLRKKLVDSTDKADLRLIYLALAHMIKFRGHFLIEGDLNPDNSDVDKLFIQLVQTYNQLFEENPINASGVDAKAILSARLSKSRRLENLIAQLPGEKKNGLFGNLIALSLGLTPNFKSNFDLAEDAKLQLSKDTYDDDLDNLLAQIGDQYADLFLAAKNLSDAILLSDILRVNTEITKAPLSASMIKRYDEHHQDLTLLKALVRQQLPEKYKEIFFDQSKNGYAGYIDGGASQEEFYKFIKPILEKMDGTEELLVKLNREDLLRKQRTFDNGSIPHQIHLGELHAILRRQEDFYPFLKDNREKIEKILTFRIPYYVGPLARGNSRFAWMTRKSEETITPWNFEEVVDKGASAQSFIERMTNFDKNLPNEKVLPKHSLLYEYFTVYNELTKVKYVTEGMRKPAFLSGEQKKAIVDLLFKTNRKVTVKQLKEDYFKKIECFDSVEISGVEDRFNASLGTYHDLLKIIKDKDFLDNEENEDILEDIVLTLTLFEDREMIEERLKTYAHLFDDKVMKQLKRRRYTGWGRLSRKLINGIRDKQSGKTILDFLKSDGFANRNFMQLIHDDSLTFKEDIQKAQVSGQGDSLHEHIANLAGSPAIKKGILQTVKVVDELVKVMGRHKPENIVIEMARENQTTQKGQKNSRERMKRIEEGIKELGSQILKEHPVENTQLQNEKLYLYYLQNGRDMYVDQELDINRLSDYDVDHIVPQSFLKDDSIDNKVLTRSDKARGKSDNVPSEEVVKKMKNYWRQLLNAKLITQRKFDNLTKAERGGLSELDKAGFIKRQLVETRQITKHVAQILDSRMNTKYDENDKLIREVKVITLKSKLVSDFRKDFQFYKVREINNYHHAHDAYLNAVVGTALIKKYPKLESEFVYGDYKVYDVRKMIAKSEQEIGKATAKYFFYSNIMNFFKTEITLANGEIRKRPLIETNGETGEIVWDKGRDFATVRKVLSMPQVNIVKKTEVQTGGFSKESILPKRNSDKLIARKKDWDPKKYGGFDSPTVAYSVLVVAKVEKGKSKKLKSVKELLGITIMERSSFEKNPIDFLEAKGYKEVKKDLIIKLPKYSLFELENGRKRMLASAGELQKGNELALPSKYVNFLYLASHYEKLKGSPEDNEQKQLFVEQHKHYLDEIIEQISEFSKRVILADANLDKVLSAYNKHRDKPIREQAENIIHLFTLTNLGAPAAFKYFDTTIDRKRYTSTKEVLDATLIHQSITGLYETRIDLSQLGGDGGEAAAKGGGGSSGGTLNIEDEHRLHETSKEPDVSLGSTWLSDFPQAWAETGGMGLAVRQAPLIIPLKATSTPVSIKQYPMSQEARLGIKPHIQRLLDQGILVPCQSPWNTPLLPVKKPGTNDYRPVQDLREVNKRVEDIHPTVPNPYNLLSGLPPSHQWYTVLDLKDAFFCLRLHPTSQPLFAFEWRDPEMGISGQLTWTRLPQGFKNSPTLFNEALHRDLADFRIQHPDLILLQYVDDLLLAATSELDCQQGTRALLQTLGNLGYRASAKKAQICQKQVKYLGYLLKEGQRWLTEARKETVMGQPTPKTPRQLREFLGTAGFCRLWIPGFAEMAAPLYPLTKPGTLFNWGPDQQKAYQEIKQALLTAPALGLPDLTKPFELFVDEKQGYAKGVLTQKLGPWRRPVAYLSKKLDPVAAGWPPCLRMVAAIAVLTKDAGKLTMGQPLVILAPHAVEALVKQPPDRWLSNARMTHYQALLLDTDRVQFGPVVALNPATLLPLPEEGLQHNCLDILAEAHGTRPDLTDQPLPDADHTWYTDGSSLLQEGQRKAGAAVTTETEVIWAKALPAGTSAQRAELIALTQALKMAEGKKLNVYTDSRYAFATAHIHGEIYRRRGWLTSEGKEIKNKDEILALLKALFLPKRLSIIHCPGHQKGHSAEARGNRMADQAARKAAITETPDTSTLLAGKRTADGSEFEKRTADGSEFESPKKKAKVE

SEQ ID NO: 2998 - protein, 2100 aa, synthetic construct
MPAAKRVKLDGGDKKYSIGLDIGTNSVGWAVITDEYKVPSKKFKVLGNTDRHSIKKNLIGALLFDSGETAEATRLKRTARRRYTRRKNRICYLQEIFSNEMAKVDDSFFHRLEESFLVEEDKKHERHPIFGNIVDEVAYHEKYPTIYHLRKKLVDSTDKADLRLIYLALAHMIKFRGHFLIEGDLNPDNSDVDKLFIQLVQTYNQLFEENPINASGVDAKAILSARLSKSRRLENLIAQLPGEKKNGLFGNLIALSLGLTPNFKSNFDLAEDAKLQLSKDTYDDDLDNLLAQIGDQYADLFLAAKNLSDAILLSDILRVNTEITKAPLSASMIKRYDEHHQDLTLLKALVRQQLPEKYKEIFFDQSKNGYAGYIDGGASQEEFYKFIKPILEKMDGTEELLVKLNREDLLRKQRTFDNGSIPHQIHLGELHAILRRQEDFYPFLKDNREKIEKILTFRIPYYVGPLARGNSRFAWMTRKSEETITPWNFEEVVDKGASAQSFIERMTNFDKNLPNEKVLPKHSLLYEYFTVYNELTKVKYVTEGMRKPAFLSGEQKKAIVDLLFKTNRKVTVKQLKEDYFKKIECFDSVEISGVEDRFNASLGTYHDLLKIIKDKDFLDNEENEDILEDIVLTLTLFEDREMIEERLKTYAHLFDDKVMKQLKRRRYTGWGRLSRKLINGIRDKQSGKTILDFLKSDGFANRNFMQLIHDDSLTFKEDIQKAQVSGQGDSLHEHIANLAGSPAIKKGILQTVKVVDELVKVMGRHKPENIVIEMARENQTTQKGQKNSRERMKRIEEGIKELGSQILKEHPVENTQLQNEKLYLYYLQNGRDMYVDQELDINRLSDYDVDHIVPQSFLKDDSIDNKVLTRSDKARGKSDNVPSEEVVKKMKNYWRQLLNAKLITQRKFDNLTKAERGGLSELDKAGFIKRQLVETRQITKHVAQILDSRMNTKYDENDKLIREVKVITLKSKLVSDFRKDFQFYKVREINNYHHAHDAYLNAVVGTALIKKYPKLESEFVYGDYKVYDVRKMIAKSEQEIGKATAKYFFYSNIMNFFKTEITLANGEIRKRPLIETNGETGEIVWDKGRDFATVRKVLSMPQVNIVKKTEVQTGGFSKESILPKRNSDKLIARKKDWDPKKYGGFDSPTVAYSVLVVAKVEKGKSKKLKSVKELLGITIMERSSFEKNPIDFLEAKGYKEVKKDLIIKLPKYSLFELENGRKRMLASAGELQKGNELALPSKYVNFLYLASHYEKLKGSPEDNEQKQLFVEQHKHYLDEIIEQISEFSKRVILADANLDKVLSAYNKHRDKPIREQAENIIHLFTLTNLGAPAAFKYFDTTIDRKRYTSTKEVLDATLIHQSITGLYETRIDLSQLGGDGGGSSGSSGSSGSSGSSGGTLNIEDEHRLHETSKEPDVSLGSTWLSDFPQAWAETGGMGLAVRQAPLIIPLKATSTPVSIKQYPMSQEARLGIKPHIQRLLDQGILVPCQSPWNTPLLPVKKPGTNDYRPVQDLREVNKRVEDIHPTVPNPYNLLSGLPPSHQWYTVLDLKDAFFCLRLHPTSQPLFAFEWRDPEMGISGQLTWTRLPQGFKNSPTLFNEALHRDLADFRIQHPDLILLQYVDDLLLAATSELDCQQGTRALLQTLGNLGYRASAKKAQICQKQVKYLGYLLKEGQRWLTEARKETVMGQPTPKTPRQLREFLGTAGFCRLWIPGFAEMAAPLYPLTKPGTLFNWGPDQQKAYQEIKQALLTAPALGLPDLTKPFELFVDEKQGYAKGVLTQKLGPWRRPVAYLSKKLDPVAAGWPPCLRMVAAIAVLTKDAGKLTMGQPLVILAPHAVEALVKQPPDRWLSNARMTHYQALLLDTDRVQFGPVVALNPATLLPLPEEGLQHNCLDILAEAHGTRPDLTDQPLPDADHTWYTDGSSLLQEGQRKAGAAVTTETEVIWAKALPAGTSAQRAELIALTQALKMAEGKKLNVYTDSRYAFATAHIHGEIYRRRGWLTSEGKEIKNKDEILALLKALFLPKRLSIIHCPGHQKGHSAEARGNRMADQAARKAAITETPDTSTLLAGKRTADGSEFEKRTADGSEFESPKKKAKVE

SEQ ID NO: 2999 - protein, 2096 aa, synthetic construct; identical to SEQ ID NO: 2719

SEQ ID NO: 3000 - protein, 2088 aa, synthetic construct
MPAAKRVKLDGGDKKYSIGLDIGTNSVGWAVITDEYKVPSKKFKVLGNTDRHSIKKNLIGALLFDSGETAEATRLKRTARRRYTRRKNRICYLQEIFSNEMAKVDDSFFHRLEESFLVEEDKKHERHPIFGNIVDEVAYHEKYPTIYHLRKKLVDSTDKADLRLIYLALAHMIKFRGHFLIEGDLNPDNSDVDKLFIQLVQTYNQLFEENPINASGVDAKAILSARLSKSRRLENLIAQLPGEKKNGLFGNLIALSLGLTPNFKSNFDLAEDAKLQLSKDTYDDDLDNLLAQIGDQYADLFLAAKNLSDAILLSDILRVNTEITKAPLSASMIKRYDEHHQDLTLLKALVRQQLPEKYKEIFFDQSKNGYAGYIDGGASQEEFYKFIKPILEKMDGTEELLVKLNREDLLRKQRTFDNGSIPHQIHLGELHAILRRQEDFYPFLKDNREKIEKILTFRIPYYVGPLARGNSRFAWMTRKSEETITPWNFEEVVDKGASAQSFIERMTNFDKNLPNEKVLPKHSLLYEYFTVYNELTKVKYVTEGMRKPAFLSGEQKKAIVDLLFKTNRKVTVKQLKEDYFKKIECFDSVEISGVEDRFNASLGTYHDLLKIIKDKDFLDNEENEDILEDIVLTLTLFEDREMIEERLKTYAHLFDDKVMKQLKRRRYTGWGRLSRKLINGIRDKQSGKTILDFLKSDGFANRNFMQLIHDDSLTFKEDIQKAQVSGQGDSLHEHIANLAGSPAIKKGILQTVKVVDELVKVMGRHKPENIVIEMARENQTTQKGQKNSRERMKRIEEGIKELGSQILKEHPVENTQLQNEKLYLYYLQNGRDMYVDQELDINRLSDYDVDHIVPQSFLKDDSIDNKVLTRSDKARGKSDNVPSEEVVKKMKNYWRQLLNAKLITQRKFDNLTKAERGGLSELDKAGFIKRQLVETRQITKHVAQILDSRMNTKYDENDKLIREVKVITLKSKLVSDFRKDFQFYKVREINNYHHAHDAYLNAVVGTALIKKYPKLESEFVYGDYKVYDVRKMIAKSEQEIGKATAKYFFYSNIMNFFKTEITLANGEIRKRPLIETNGETGEIVWDKGRDFATVRKVLSMPQVNIVKKTEVQTGGFSKESILPKRNSDKLIARKKDWDPKKYGGFDSPTVAYSVLVVAKVEKGKSKKLKSVKELLGITIMERSSFEKNPIDFLEAKGYKEVKKDLIIKLPKYSLFELENGRKRMLASAGELQKGNELALPSKYVNFLYLASHYEKLKGSPEDNEQKQLFVEQHKHYLDEIIEQISEFSKRVILADANLDKVLSAYNKHRDKPIREQAENIIHLFTLTNLGAPAAFKYFDTTIDRKRYTSTKEVLDATLIHQSITGLYETRIDLSQLGGDGGGGSGGTLNIEDEHRLHETSKEPDVSLGSTWLSDFPQAWAETGGMGLAVRQAPLIIPLKATSTPVSIKQYPMSQEARLGIKPHIQRLLDQGILVPCQSPWNTPLLPVKKPGTNDYRPVQDLREVNKRVEDIHPTVPNPYNLLSGLPPSHQWYTVLDLKDAFFCLRLHPTSQPLFAFEWRDPEMGISGQLTWTRLPQGFKNSPTLFNEALHRDLADFRIQHPDLILLQYVDDLLLAATSELDCQQGTRALLQTLGNLGYRASAKKAQICQKQVKYLGYLLKEGQRWLTEARKETVMGQPTPKTPRQLREFLGTAGFCRLWIPGFAEMAAPLYPLTKPGTLFNWGPDQQKAYQEIKQALLTAPALGLPDLTKPFELFVDEKQGYAKGVLTQKLGPWRRPVAYLSKKLDPVAAGWPPCLRMVAAIAVLTKDAGKLTMGQPLVILAPHAVEALVKQPPDRWLSNARMTHYQALLLDTDRVQFGPVVALNPATLLPLPEEGLQHNCLDILAEAHGTRPDLTDQPLPDADHTWYTDGSSLLQEGQRKAGAAVTTETEVIWAKALPAGTSAQRAELIALTQALKMAEGKKLNVYTDSRYAFATAHIHGEIYRRRGWLTSEGKEIKNKDEILALLKALFLPKRLSIIHCPGHQKGHSAEARGNRMADQAARKAAITETPDTSTLLAGKRTADGSEFEKRTADGSEFESPKKKAKVE

SEQ ID NO: 3001 - protein, 2100 aa, synthetic construct; identical to SEQ ID NO: 2725

SEQ ID NO: 3002 - protein, 2093 aa, synthetic construct; identical to SEQ ID NO: 2740

SEQ ID NO: 3003 - protein, 2094 aa, synthetic construct; identical to SEQ ID NO: 2752

SEQ ID NO: 3004 - protein, 2097 aa, synthetic construct; identical to SEQ ID NO: 2763

SEQ ID NO: 3005 - protein, 2096 aa, synthetic construct
MPAAKRVKLDGGDKKYSIGLDIGTNSVGWAVITDEYKVPSKKFKVLGNTDRHSIKKNLIGALLFDSGETAEATRLKRTARRRYTRRKNRICYLQEIFSNEMAKVDDSFFHRLEESFLVEEDKKHERHPIFGNIVDEVAYHEKYPTIYHLRKKLVDSTDKADLRLIYLALAHMIKFRGHFLIEGDLNPDNSDVDKLFIQLVQTYNQLFEENPINASGVDAKAILSARLSKSRRLENLIAQLPGEKKNGLFGNLIALSLGLTPNFKSNFDLAEDAKLQLSKDTYDDDLDNLLAQIGDQYADLFLAAKNLSDAILLSDILRVNTEITKAPLSASMIKRYDEHHQDLTLLKALVRQQLPEKYKEIFFDQSKNGYAGYIDGGASQEEFYKFIKPILEKMDGTEELLVKLNREDLLRKQRTFDNGSIPHQIHLGELHAILRRQEDFYPFLKDNREKIEKILTFRIPYYVGPLARGNSRFAWMTRKSEETITPWNFEEVVDKGASAQSFIERMTNFDKNLPNEKVLPKHSLLYEYFTVYNELTKVKYVTEGMRKPAFLSGEQKKAIVDLLFKTNRKVTVKQLKEDYFKKIECFDSVEISGVEDRFNASLGTYHDLLKIIKDKDFLDNEENEDILEDIVLTLTLFEDREMIEERLKTYAHLFDDKVMKQLKRRRYTGWGRLSRKLINGIRDKQSGKTILDFLKSDGFANRNFMQLIHDDSLTFKEDIQKAQVSGQGDSLHEHIANLAGSPAIKKGILQTVKVVDELVKVMGRHKPENIVIEMARENQTTQKGQKNSRERMKRIEEGIKELGSQILKEHPVENTQLQNEKLYLYYLQNGRDMYVDQELDINRLSDYDVDHIVPQSFLKDDSIDNKVLTRSDKARGKSDNVPSEEVVKKMKNYWRQLLNAKLITQRKFDNLTKAERGGLSELDKAGFIKRQLVETRQITKHVAQILDSRMNTKYDENDKLIREVKVITLKSKLVSDFRKDFQFYKVREINNYHHAHDAYLNAVVGTALIKKYPKLESEFVYGDYKVYDVRKMIAKSEQEIGKATAKYFFYSNIMNFFKTEITLANGEIRKRPLIETNGETGEIVWDKGRDFATVRKVLSMPQVNIVKKTEVQTGGFSKESILPKRNSDKLIARKKDWDPKKYGGFDSPTVAYSVLVVAKVEKGKSKKLKSVKELLGITIMERSSFEKNPIDFLEAKGYKEVKKDLIIKLPKYSLFELENGRKRMLASAGELQKGNELALPSKYVNFLYLASHYEKLKGSPEDNEQKQLFVEQHKHYLDEIIEQISEFSKRVILADANLDKVLSAYNKHRDKPIREQAENIIHLFTLTNLGAPAAFKYFDTTIDRKRYTSTKEVLDATLIHQSITGLYETRIDLSQLGGDGGEAAAKPAPGSSGGTLNIEDEHRLHETSKEPDVSLGSTWLSDFPQAWAETGGMGLAVRQAPLIIPLKATSTPVSIKQYPMSQEARLGIKPHIQRLLDQGILVPCQSPWNTPLLPVKKPGTNDYRPVQDLREVNKRVEDIHPTVPNPYNLLSGLPPSHQWYTVLDLKDAFFCLRLHPTSQPLFAFEWRDPEMGISGQLTWTRLPQGFKNSPTLFNEALHRDLADFRIQHPDLILLQYVDDLLLAATSELDCQQGTRALLQTLGNLGYRASAKKAQICQKQVKYLGYLLKEGQRWLTEARKETVMGQPTPKTPRQLREFLGTAGFCRLWIPGFAEMAAPLYPLTKPGTLFNWGPDQQKAYQEIKQALLTAPALGLPDLTKPFELFVDEKQGYAKGVLTQKLGPWRRPVAYLSKKLDPVAAGWPPCLRMVAAIAVLTKDAGKLTMGQPLVILAPHAVEALVKQPPDRWLSNARMTHYQALLLDTDRVQFGPVVALNPATLLPLPEEGLQHNCLDILAEAHGTRPDLTDQPLPDADHTWYTDGSSLLQEGQRKAGAAVTTETEVIWAKALPAGTSAQRAELIALTQALKMAEGKKLNVYTDSRYAFATAHIHGEIYRRRGWLTSEGKEIKNKDEILALLKALFLPKRLSIIHCPGHQKGHSAEARGNRMADQAARKAAITETPDTSTLLAGKRTADGSEFEKRTADGSEFESPKKKAKVE

SEQ ID NO: 3006 - protein, 2089 aa, synthetic construct
MPAAKRVKLDGGDKKYSIGLDIGTNSVGWAVITDEYKVPSKKFKVLGNTDRHSIKKNLIGALLFDSGETAEATRLKRTARRRYTRRKNRICYLQEIFSNEMAKVDDSFFHRLEESFLVEEDKKHERHPIFGNIVDEVAYHEKYPTIYHLRKKLVDSTDKADLRLIYLALAHMIKFRGHFLIEGDLNPDNSDVDKLFIQLVQTYNQLFEENPINASGVDAKAILSARLSKSRRLENLIAQLPGEKKNGLFGNLIALSLGLTPNFKSNFDLAEDAKLQLSKDTYDDDLDNLLAQIGDQYADLFLAAKNLSDAILLSDILRVNTEITKAPLSASMIKRYDEHHQDLTLLKALVRQQLPEKYKEIFFDQSKNGYAGYIDGGASQEEFYKFIKPILEKMDGTEELLVKLNREDLLRKQRTFDNGSIPHQIHLGELHAILRRQEDFYPFLKDNREKIEKILTFRIPYYVGPLARGNSRFAWMTRKSEETITPWNFEEVVDKGASAQSFIERMTNFDKNLPNEKVLPKHSLLYEYFTVYNELTKVKYVTEGMRKPAFLSGEQKKAIVDLLFKTNRKVTVKQLKEDYFKKIECFDSVEISGVEDRFNASLGTYHDLLKIIKDKDFLDNEENEDILEDIVLTLTLFEDREMIEERLKTYAHLFDDKVMKQLKRRRYTGWGRLSRKLINGIRDKQSGKTILDFLKSDGFANRNFMQLIHDDSLTFKEDIQKAQVSGQGDSLHEHIANLAGSPAIKKGILQTVKVVDELVKVMGRHKPENIVIEMARENQTTQKGQKNSRERMKRIEEGIKELGSQILKEHPVENTQLQNEKLYLYYLQNGRDMYVDQELDINRLSDYDVDHIVPQSFLKDDSIDNKVLTRSDKARGKSDNVPSEEVVKKMKNYWRQLLNAKLITQRKFDNLTKAERGGLSELDKAGFIKRQLVETRQITKHVAQILDSRMNTKYDENDKLIREVKVITLKSKLVSDFRKDFQFYKVREINNYHHAHDAYLNAVVGTALIKKYPKLESEFVYGDYKVYDVRKMIAKSEQEIGKATAKYFFYSNIMNFFKTEITLANGEIRKRPLIETNGETGEIVWDKGRDFATVRKVLSMPQVNIVKKTEVQTGGFSKESILPKRNSDKLIARKKDWDPKKYGGFDSPTVAYSVLVVAKVEKGKSKKLKSVKELLGITIMERSSFEKNPIDFLEAKGYKEVKKDLIIKLPKYSLFELENGRKRMLASAGELQKGNELALPSKYVNFLYLASHYEKLKGSPEDNEQKQLFVEQHKHYLDEIIEQISEFSKRVILADANLDKVLSAYNKHRDKPIREQAENIIHLFTLTNLGAPAAFKYFDTTIDRKRYTSTKEVLDATLIHQSITGLYETRIDLSQLGGDGGGGGGGGTLNIEDEHRLHETSKEPDVSLGSTWLSDFPQAWAETGGMGLAVRQAPLIIPLKATSTPVSIKQYPMSQEARLGIKPHIQRLLDQGILVPCQSPWNTPLLPVKKPGTNDYRPVQDLREVNKRVEDIHPTVPNPYNLLSGLPPSHQWYTVLDLKDAFFCLRLHPTSQPLFAFEWRDPEMGISGQLTWTRLPQGFKNSPTLFNEALHRDLADFRIQHPDLILLQYVDDLLLAATSELDCQQGTRALLQTLGNLGYRASAKKAQICQKQVKYLGYLLKEGQRWLTEARKETVMGQPTPKTPRQLREFLGTAGFCRLWIPGFAEMAAPLYPLTKPGTLFNWGPDQQKAYQEIKQALLTAPALGLPDLTKPFELFVDEKQGYAKGVLTQKLGPWRRPVAYLSKKLDPVAAGWPPCLRMVAAIAVLTKDAGKLTMGQPLVILAPHAVEALVKQPPDRWLSNARMTHYQALLLDTDRVQFGPVVALNPATLLPLPEEGLQHNCLDILAEAHGTRPDLTDQPLPDADHTWYTDGSSLLQEGQRKAGAAVTTETEVIWAKALPAGTSAQRAELIALTQALKMAEGKKLNVYTDSRYAFATAHIHGEIYRRRGWLTSEGKEIKNKDEILALLKALFLPKRLSIIHCPGHQKGHSAEARGNRMADQAARKAAITETPDTSTLLAGKRTADGSEFEKRTADGSEFESPKKKAKVE

SEQ ID NO: 3007 - protein, 2096 aa, synthetic construct; identical to SEQ ID NO: 2748

SEQ ID NO: 3008 - protein, 2090 aa, synthetic construct; identical to SEQ ID NO: 2730

SEQ ID NO: 3009 - protein, 2096 aa, synthetic construct
MPAAKRVKLDGGDKKYSIGLDIGTNSVGWAVITDEYKVPSKKFKVLGNTDRHSIKKNLIGALLFDSGETAEATRLKRTARRRYTRRKNRICYLQEIFSNEMAKVDDSFFHRLEESFLVEEDKKHERHPIFGNIVDEVAYHEKYPTIYHLRKKLVDSTDKADLRLIYLALAHMIKFRGHFLIEGDLNPDNSDVDKLFIQLVQTYNQLFEENPINASGVDAKAILSARLSKSRRLENLIAQLPGEKKNGLFGNLIALSLGLTPNFKSNFDLAEDAKLQLSKDTYDDDLDNLLAQIGDQYADLFLAAKNLSDAILLSDILRVNTEITKAPLSASMIKRYDEHHQDLTLLKALVRQQLPEKYKEIFFDQSKNGYAGYIDGGASQEEFYKFIKPILEKMDGTEELLVKLNREDLLRKQRTFDNGSIPHQIHLGELHAILRRQEDFYPFLKDNREKIEKILTFRIPYYVGPLARGNSRFAWMTRKSEETITPWNFEEVVDKGASAQSFIERMTNFDKNLPNEKVLPKHSLLYEYFTVYNELTKVKYVTEGMRKPAFLSGEQKKAIVDLLFKTNRKVTVKQLKEDYFKKIECFDSVEISGVEDRFNASLGTYHDLLKIIKDKDFLDNEENEDILEDIVLTLTLFEDREMIEERLKTYAHLFDDKVMKQLKRRRYTGWGRLSRKLINGIRDKQSGKTILDFLKSDGFANRNFMQLIHDDSLTFKEDIQKAQVSGQGDSLHEHIANLAGSPAIKKGILQTVKVVDELVKVMGRHKPENIVIEMARENQTTQKGQKNSRERMKRIEEGIKELGSQILKEHPVENTQLQNEKLYLYYLQNGRDMYVDQELDINRLSDYDVDHIVPQSFLKDDSIDNKVLTRSDKARGKSDNVPSEEVVKKMKNYWRQLLNAKLITQRKFDNLTKAERGGLSELDKAGFIKRQLVETRQITKHVAQILDSRMNTKYDENDKLIREVKVITLKSKLVSDFRKDFQFYKVREINNYHHAHDAYLNAVVGTALIKKYPKLESEFVYGDYKVYDVRKMIAKSEQEIGKATAKYFFYSNIMNFFKTEITLANGEIRKRPLIETNGETGEIVWDKGRDFATVRKVLSMPQVNIVKKTEVQTGGFSKESILPKRNSDKLIARKKDWDPKKYGGFDSPTVAYSVLVVAKVEKGKSKKLKSVKELLGITIMERSSFEKNPIDFLEAKGYKEVKKDLIIKLPKYSLFELENGRKRMLASAGELQKGNELALPSKYVNFLYLASHYEKLKGSPEDNEQKQLFVEQHKHYLDEIIEQISEFSKRVILADANLDKVLSAYNKHRDKPIREQAENIIHLFTLTNLGAPAAFKYFDTTIDRKRYTSTKEVLDATLIHQSITGLYETRIDLSQLGGDGGPAPEAAAKGGGGGTLNIEDEHRLHETSKEPDVSLGSTWLSDFPQAWAETGGMGLAVRQAPLIIPLKATSTPVSIKQYPMSQEARLGIKPHIQRLLDQGILVPCQSPWNTPLLPVKKPGTNDYRPVQDLREVNKRVEDIHPTVPNPYNLLSGLPPSHQWYTVLDLKDAFFCLRLHPTSQPLFAFEWRDPEMGISGQLTWTRLPQGFKNSPTLFNEALHRDLADFRIQHPDLILLQYVDDLLLAATSELDCQQGTRALLQTLGNLGYRASAKKAQICQKQVKYLGYLLKEGQRWLTEARKETVMGQPTPKTPRQLREFLGTAGFCRLWIPGFAEMAAPLYPLTKPGTLFNWGPDQQKAYQEIKQALLTAPALGLPDLTKPFELFVDEKQGYAKGVLTQKLGPWRRPVAYLSKKLDPVAAGWPPCLRMVAAIAVLTKDAGKLTMGQPLVILAPHAVEALVKQPPDRWLSNARMTHYQALLLDTDRVQFGPVVALNPATLLPLPEEGLQHNCLDILAEAHGTRPDLTDQPLPDADHTWYTDGSSLLQEGQRKAGAAVTTETEVIWAKALPAGTSAQRAELIALTQALKMAEGKKLNVYTDSRYAFATAHIHGEIYRRRGWLTSEGKEIKNKDEILALLKALFLPKRLSIIHCPGHQKGHSAEARGNRMADQAARKAAITETPDTSTLLAGKRTADGSEFEKRTADGSEFESPKKKAKVE

SEQ ID NO: 3010 - protein, 2101 aa, synthetic construct
MPAAKRVKLDGGDKKYSIGLDIGTNSVGWAVITDEYKVPSKKFKVLGNTDRHSIKKNLIGALLFDSGETAEATRLKRTARRRYTRRKNRICYLQEIFSNEMAKVDDSFFHRLEESFLVEEDKKHERHPIFGNIVDEVAYHEKYPTIYHLRKKLVDSTDKADLRLIYLALAHMIKFRGHFLIEGDLNPDNSDVDKLFIQLVQTYNQLFEENPINASGVDAKAILSARLSKSRRLENLIAQLPGEKKNGLFGNLIALSLGLTPNFKSNFDLAEDAKLQLSKDTYDDDLDNLLAQIGDQYADLFLAAKNLSDAILLSDILRVNTEITKAPLSASMIKRYDEHHQDLTLLKALVRQQLPEKYKEIFFDQSKNGYAGYIDGGASQEEFYKFIKPILEKMDGTEELLVKLNREDLLRKQRTFDNGSIPHQIHLGELHAILRRQEDFYPFLKDNREKIEKILTFRIPYYVGPLARGNSRFAWMTRKSEETITPWNFEEVVDKGASAQSFIERMTNFDKNLPNEKVLPKHSLLYEYFTVYNELTKVKYVTEGMRKPAFLSGEQKKAIVDLLFKTNRKVTVKQLKEDYFKKIECFDSVEISGVEDRFNASLGTYHDLLKIIKDKDFLDNEENEDILEDIVLTLTLFEDREMIEERLKTYAHLFDDKVMKQLKRRRYTGWGRLSRKLINGIRDKQSGKTILDFLKSDGFANRNFMQLIHDDSLTFKEDIQKAQVSGQGDSLHEHIANLAGSPAIKKGILQTVKVVDELVKVMGRHKPENIVIEMARENQTTQKGQKNSRERMKRIEEGIKELGSQILKEHPVENTQLQNEKLYLYYLQNGRDMYVDQELDINRLSDYDVDHIVPQSFLKDDSIDNKVLTRSDKARGKSDNVPSEEVVKKMKNYWRQLLNAKLITQRKFDNLTKAERGGLSELDKAGFIKRQLVETRQITKHVAQILDSRMNTKYDENDKLIREVKVITLKSKLVSDFRKDFQFYKVREINNYHHAHDAYLNAVVGTALIKKYPKLESEFVYGDYKVYDVRKMIAKSEQEIGKATAKYFFYSNIMNFFKTEITLANGEIRKRPLIETNGETGEIVWDKGRDFATVRKVLSMPQVNIVKKTEVQTGGFSKESILPKRNSDKLIARKKDWDPKKYGGFDSPTVAYSVLVVAKVEKGKSKKLKSVKELLGITIMERSSFEKNPIDFLEAKGYKEVKKDLIIKLPKYSLFELENGRKRMLASAGELQKGNELALPSKYVNFLYLASHYEKLKGSPEDNEQKQLFVEQHKHYLDEIIEQISEFSKRVILADANLDKVLSAYNKHRDKPIREQAENIIHLFTLTNLGAPAAFKYFDTTIDRKRYTSTKEVLDATLIHQSITGLYETRIDLSQLGGDGGSGSETPGTSESATPESGGTLNIEDEHRLHETSKEPDVSLGSTWLSDFPQAWAETGGMGLAVRQAPLIIPLKATSTPVSIKQYPMSQEARLGIKPHIQRLLDQGILVPCQSPWNTPLLPVKKPGTNDYRPVQDLREVNKRVEDIHPTVPNPYNLLSGLPPSHQWYTVLDLKDAFFCLRLHPTSQPLFAFEWRDPEMGISGQLTWTRLPQGFKNSPTLFNEALHRDLADFRIQHPDLILLQYVDDLLLAATSELDCQQGTRALLQTLGNLGYRASAKKAQICQKQVKYLGYLLKEGQRWLTEARKETVMGQPTPKTPRQLREFLGTAGFCRLWIPGFAEMAAPLYPLTKPGTLFNWGPDQQKAYQEIKQALLTAPALGLPDLTKPFELFVDEKQGYAKGVLTQKLGPWRRPVAYLSKKLDPVAAGWPPCLRMVAAIAVLTKDAGKLTMGQPLVILAPHAVEALVKQPPDRWLSNARMTHYQALLLDTDRVQFGPVVALNPATLLPLPEEGLQHNCLDILAEAHGTRPDLTDQPLPDADHTWYTDGSSLLQEGQRKAGAAVTTETEVIWAKALPAGTSAQRAELIALTQALKMAEGKKLNVYTDSRYAFATAHIHGEIYRRRGWLTSEGKEIKNKDEILALLKALFLPKRLSIIHCPGHQKGHSAEARGNRMADQAARKAAITETPDTSTLLAGKRTADGSEFEKRTADGSEFESPKKKAKVE

SEQ ID NO: 3011 - protein, 2091 aa, synthetic construct
MPAAKRVKLDGGDKKYSIGLDIGTNSVGWAVITDEYKVPSKKFKVLGNTDRHSIKKNLIGALLFDSGETAEATRLKRTARRRYTRRKNRICYLQEIFSNEMAKVDDSFFHRLEESFLVEEDKKHERHPIFGNIVDEVAYHEKYPTIYHLRKKLVDSTDKADLRLIYLALAHMIKFRGHFLIEGDLNPDNSDVDKLFIQLVQTYNQLFEENPINASGVDAKAILSARLSKSRRLENLIAQLPGEKKNGLFGNLIALSLGLTPNFKSNFDLAEDAKLQLSKDTYDDDLDNLLAQIGDQYADLFLAAKNLSDAILLSDILRVNTEITKAPLSASMIKRYDEHHQDLTLLKALVRQQLPEKYKEIFFDQSKNGYAGYIDGGASQEEFYKFIKPILEKMDGTEELLVKLNREDLLRKQRTFDNGSIPHQIHLGELHAILRRQEDFYPFLKDNREKIEKILTFRIPYYVGPLARGNSRFAWMTRKSEETITPWNFEEVVDKGASAQSFIERMTNFDKNLPNEKVLPKHSLLYEYFTVYNELTKVKYVTEGMRKPAFLSGEQKKAIVDLLFKTNRKVTVKQLKEDYFKKIECFDSVEISGVEDRFNASLGTYHDLLKIIKDKDFLDNEENEDILEDIVLTLTLFEDREMIEERLKTYAHLFDDKVMKQLKRRRYTGWGRLSRKLINGIRDKQSGKTILDFLKSDGFANRNFMQLIHDDSLTFKEDIQKAQVSGQGDSLHEHIANLAGSPAIKKGILQTVKVVDELVKVMGRHKPENIVIEMARENQTTQKGQKNSRERMKRIEEGIKELGSQILKEHPVENTQLQNEKLYLYYLQNGRDMYVDQELDINRLSDYDVDHIVPQSFLKDDSIDNKVLTRSDKARGKSDNVPSEEVVKKMKNYWRQLLNAKLITQRKFDNLTKAERGGLSELDKAGFIKRQLVETRQITKHVAQILDSRMNTKYDENDKLIREVKVITLKSKLVSDFRKDFQFYKVREINNYHHAHDAYLNAVVGTALIKKYPKLESEFVYGDYKVYDVRKMIAKSEQEIGKATAKYFFYSNIMNFFKTEITLANGEIRKRPLIETNGETGEIVWDKGRDFATVRKVLSMPQVNIVKKTEVQTGGFSKESILPKRNSDKLIARKKDWDPKKYGGFDSPTVAYSVLVVAKVEKGKSKKLKSVKELLGITIMERSSFEKNPIDFLEAKGYKEVKKDLIIKLPKYSLFELENGRKRMLASAGELQKGNELALPSKYVNFLYLASHYEKLKGSPEDNEQKQLFVEQHKHYLDEIIEQISEFSKRVILADANLDKVLSAYNKHRDKPIREQAENIIHLFTLTNLGAPAAFKYFDTTIDRKRYTSTKEVLDATLIHQSITGLYETRIDLSQLGGDGGGGSGSSGGTLNIEDEHRLHETSKEPDVSLGSTWLSDFPQAWAETGGMGLAVRQAPLIIPLKATSTPVSIKQYPMSQEARLGIKPHIQRLLDQGILVPCQSPWNTPLLPVKKPGTNDYRPVQDLREVNKRVEDIHPTVPNPYNLLSGLPPSHQWYTVLDLKDAFFCLRLHPTSQPLFAFEWRDPEMGISGQLTWTRLPQGFKNSPTLFNEALHRDLADFRIQHPDLILLQYVDDLLLAATSELDCQQGTRALLQTLGNLGYRASAKKAQICQKQVKYLGYLLKEGQRWLTEARKETVMGQPTPKTPRQLREFLGTAGFCRLWIPGFAEMAAPLYPLTKPGTLFNWGPDQQKAYQEIKQALLTAPALGLPDLTKPFELFVDEKQGYAKGVLTQKLGPWRRPVAYLSKKLDPVAAGWPPCLRMVAAIAVLTKDAGKLTMGQPLVILAPHAVEALVKQPPDRWLSNARMTHYQALLLDTDRVQFGPVVALNPATLLPLPEEGLQHNCLDILAEAHGTRPDLTDQPLPDADHTWYTDGSSLLQEGQRKAGAAVTTETEVIWAKALPAGTSAQRAELIALTQALKMAEGKKLNVYTDSRYAFATAHIHGEIYRRRGWLTSEGKEIKNKDEILALLKALFLPKRLSIIHCPGHQKGHSAEARGNRMADQAARKAAITETPDTSTLLAGKRTADGSEFEKRTADGSEFESPKKKAKVE

SEQ ID NO: 3012 - protein, 2096 aa, synthetic construct; identical to SEQ ID NO: 2758

SEQ ID NO: 3013 - protein, 2094 aa, synthetic construct
MPAAKRVKLDGGDKKYSIGLDIGTNSVGWAVITDEYKVPSKKFKVLGNTDRHSIKKNLIGALLFDSGETAEATRLKRTARRRYTRRKNRICYLQEIFSNEMAKVDDSFFHRLEESFLVEEDKKHERHPIFGNIVDEVAYHEKYPTIYHLRKKLVDSTDKADLRLIYLALAHMIKFRGHFLIEGDLNPDNSDVDKLFIQLVQTYNQLFEENPINASGVDAKAILSARLSKSRRLENLIAQLPGEKKNGLFGNLIALSLGLTPNFKSNFDLAEDAKLQLSKDTYDDDLDNLLAQIGDQYADLFLAAKNLSDAILLSDILRVNTEITKAPLSASMIKRYDEHHQDLTLLKALVRQQLPEKYKEIFFDQSKNGYAGYIDGGASQEEFYKFIKPILEKMDGTEELLVKLNREDLLRKQRTFDNGSIPHQIHLGELHAILRRQEDFYPFLKDNREKIEKILTFRIPYYVGPLARGNSRFAWMTRKSEETITPWNFEEVVDKGASAQSFIERMTNFDKNLPNEKVLPKHSLLYEYFTVYNELTKVKYVTEGMRKPAFLSGEQKKAIVDLLFKTNRKVTVKQLKEDYFKKIECFDSVEISGVEDRFNASLGTYHDLLKIIKDKDFLDNEENEDILEDIVLTLTLFEDREMIEERLKTYAHLFDDKVMKQLKRRRYTGWGRLSRKLINGIRDKQSGKTILDFLKSDGFANRNFMQLIHDDSLTFKEDIQKAQVSGQGDSLHEHIANLAGSPAIKKGILQTVKVVDELVKVMGRHKPENIVIEMARENQTTQKGQKNSRERMKRIEEGIKELGSQILKEHPVENTQLQNEKLYLYYLQNGRDMYVDQELDINRLSDYDVDHIVPQSFLKDDSIDNKVLTRSDKARGKSDNVPSEEVVKKMKNYWRQLLNAKLITQRKFDNLTKAERGGLSELDKAGFIKRQLVETRQITKHVAQILDSRMNTKYDENDKLIREVKVITLKSKLVSDFRKDFQFYKVREINNYHHAHDAYLNAVVGTALIKKYPKLESEFVYGDYKVYDVRKMIAKSEQEIGKATAKYFFYSNIMNFFKTEITLANGEIRKRPLIETNGETGEIVWDKGRDFATVRKVLSMPQVNIVKKTEVQTGGFSKESILPKRNSDKLIARKKDWDPKKYGGFDSPTVAYSVLVVAKVEKGKSKKLKSVKELLGITIMERSSFEKNPIDFLEAKGYKEVKKDLIIKLPKYSLFELENGRKRMLASAGELQKGNELALPSKYVNFLYLASHYEKLKGSPEDNEQKQLFVEQHKHYLDEIIEQISEFSKRVILADANLDKVLSAYNKHRDKPIREQAENIIHLFTLTNLGAPAAFKYFDTTIDRKRYTSTKEVLDATLIHQSITGLYETRIDLSQLGGDGGPAPGGSGGGGGTLNIEDEHRLHETSKEPDVSLGSTWLSDFPQAWAETGGMGLAVRQAPLIIPLKATSTPVSIKQYPMSQEARLGIKPHIQRLLDQGILVPCQSPWNTPLLPVKKPGTNDYRPVQDLREVNKRVEDIHPTVPNPYNLLSGLPPSHQWYTVLDLKDAFFCLRLHPTSQPLFAFEWRDPEMGISGQLTWTRLPQGFKNSPTLFNEALHRDLADFRIQHPDLILLQYVDDLLLAATSELDCQQGTRALLQTLGNLGYRASAKKAQICQKQVKYLGYLLKEGQRWLTEARKETVMGQPTPKTPRQLREFLGTAGFCRLWIPGFAEMAAPLYPLTKPGTLFNWGPDQQKAYQEIKQALLTAPALGLPDLTKPFELFVDEKQGYAKGVLTQKLGPWRRPVAYLSKKLDPVAAGWPPCLRMVAAIAVLTKDAGKLTMGQPLVILAPHAVEALVKQPPDRWLSNARMTHYQALLLDTDRVQFGPVVALNPATLLPLPEEGLQHNCLDILAEAHGTRPDLTDQPLPDADHTWYTDGSSLLQEGQRKAGAAVTTETEVIWAKALPAGTSAQRAELIALTQALKMAEGKKLNVYTDSRYAFATAHIHGEIYRRRGWLTSEGKEIKNKDEILALLKALFLPKRLSIIHCPGHQKGHSAEARGNRMADQAARKAAITETPDTSTLLAGKRTADGSEFEKRTADGSEFESPKKKAKVE

SEQ ID NO: 3014 - protein, 2096 aa, synthetic construct; identical to SEQ ID NO: 2714

SEQ ID NO: 3015 - protein, 2093 aa, synthetic construct; identical to SEQ ID NO: 2718

SEQ ID NO: 3016 - protein, 2094 aa, synthetic construct; identical to SEQ ID NO: 2762

SEQ ID NO: 3017 - protein, 2095 aa, synthetic construct; identical to SEQ ID NO: 2749

SEQ ID NO: 3018 - protein, 2096 aa, synthetic construct; identical to SEQ ID NO: 2721

SEQ ID NO: 3019 - protein, 2096 aa, synthetic construct; identical to SEQ ID NO: 2747

SEQ ID NO: 3020 - protein, 2096 aa, synthetic construct; identical to SEQ ID NO: 2755

SEQ ID NO: 3021 - protein, 2096 aa, synthetic construct
MPAAKRVKLDGGDKKYSIGLDIGTNSVGWAVITDEYKVPSKKFKVLGNTDRHSIKKNLIGALLFDSGETAEATRLKRTARRRYTRRKNRICYLQEIFSNEMAKVDDSFFHRLEESFLVEEDKKHERHPIFGNIVDEVAYHEKYPTIYHLRKKLVDSTDKADLRLIYLALAHMIKFRGHFLIEGDLNPDNSDVDKLFIQLVQTYNQLFEENPINASGVDAKAILSARLSKSRRLENLIAQLPGEKKNGLFGNLIALSLGLTPNFKSNFDLAEDAKLQLSKDTYDDDLDNLLAQIGDQYADLFLAAKNLSDAILLSDILRVNTEITKAPLSASMIKRYDEHHQDLTLLKALVRQQLPEKYKEIFFDQSKNGYAGYIDGGASQEEFYKFIKPILEKMDGTEELLVKLNREDLLRKQRTFDNGSIPHQIHLGELHAILRRQEDFYPFLKDNREKIEKILTFRIPYYVGPLARGNSRFAWMTRKSEETITPWNFEEVVDKGASAQSFIERMTNFDKNLPNEKVLPKHSLLYEYFTVYNELTKVKYVTEGMRKPAFLSGEQKKAIVDLLFKTNRKVTVKQLKEDYFKKIECFDSVEISGVEDRFNASLGTYHDLLKIIKDKDFLDNEENEDILEDIVLTLTLFEDREMIEERLKTYAHLFDDKVMKQLKRRRYTGWGRLSRKLINGIRDKQSGKTILDFLKSDGFANRNFMQLIHDDSLTFKEDIQKAQVSGQGDSLHEHIANLAGSPAIKKGILQTVKVVDELVKVMGRHKPENIVIEMARENQTTQKGQKNSRERMKRIEEGIKELGSQILKEHPVENTQLQNEKLYLYYLQNGRDMYVDQELDINRLSDYDVDHIVPQSFLKDDSIDNKVLTRSDKARGKSDNVPSEEVVKKMKNYWRQLLNAKLITQRKFDNLTKAERGGLSELDKAGFIKRQLVETRQITKHVAQILDSRMNTKYDENDKLIREVKVITLKSKLVSDFRKDFQFYKVREINNYHHAHDAYLNAVVGTALIKKYPKLESEFVYGDYKVYDVRKMIAKSEQEIGKATAKYFFYSNIMNFFKTEITLANGEIRKRPLIETNGETGEIVWDKGRDFATVRKVLSMPQVNIVKKTEVQTGGFSKESILPKRNSDKLIARKKDWDPKKYGGFDSPTVAYSVLVVAKVEKGKSKKLKSVKELLGITIMERSSFEKNPIDFLEAKGYKEVKKDLIIKLPKYSLFELENGRKRMLASAGELQKGNELALPSKYVNFLYLASHYEKLKGSPEDNEQKQLFVEQHKHYLDEIIEQISEFSKRVILADANLDKVLSAYNKHRDKPIREQAENIIHLFTLTNLGAPAAFKYFDTTIDRKRYTSTKEVLDATLIHQSITGLYETRIDLSQLGGDGGEAAAKGSSGGSGGTLNIEDEHRLHETSKEPDVSLGSTWLSDFPQAWAETGGMGLAVRQAPLIIPLKATSTPVSIKQYPMSQEARLGIKPHIQRLLDQGILVPCQSPWNTPLLPVKKPGTNDYRPVQDLREVNKRVEDIHPTVPNPYNLLSGLPPSHQWYTVLDLKDAFFCLRLHPTSQPLFAFEWRDPEMGISGQLTWTRLPQGFKNSPTLFNEALHRDLADFRIQHPDLILLQYVDDLLLAATSELDCQQGTRALLQTLGNLGYRASAKKAQICQKQVKYLGYLLKEGQRWLTEARKETVMGQPTPKTPRQLREFLGTAGFCRLWIPGFAEMAAPLYPLTKPGTLFNWGPDQQKAYQEIKQALLTAPALGLPDLTKPFELFVDEKQGYAKGVLTQKLGPWRRPVAYLSKKLDPVAAGWPPCLRMVAAIAVLTKDAGKLTMGQPLVILAPHAVEALVKQPPDRWLSNARMTHYQALLLDTDRVQFGPVVALNPATLLPLPEEGLQHNCLDILAEAHGTRPDLTDQPLPDADHTWYTDGSSLLQEGQRKAGAAVTTETEVIWAKALPAGTSAQRAELIALTQALKMAEGKKLNVYTDSRYAFATAHIHGEIYRRRGWLTSEGKEIKNKDEILALLKALFLPKRLSIIHCPGHQKGHSAEARGNRMADQAARKAAITETPDTSTLLAGKRTADGSEFEKRTADGSEFESPKKKAKVE

SEQ ID NO: 3022 - protein, 2094 aa, synthetic construct
MPAAKRVKLDGGDKKYSIGLDIGTNSVGWAVITDEYKVPSKKFKVLGNTDRHSIKKNLIGALLFDSGETAEATRLKRTARRRYTRRKNRICYLQEIFSNEMAKVDDSFFHRLEESFLVEEDKKHERHPIFGNIVDEVAYHEKYPTIYHLRKKLVDSTDKADLRLIYLALAHMIKFRGHFLIEGDLNPDNSDVDKLFIQLVQTYNQLFEENPINASGVDAKAILSARLSKSRRLENLIAQLPGEKKNGLFGNLIALSLGLTPNFKSNFDLAEDAKLQLSKDTYDDDLDNLLAQIGDQYADLFLAAKNLSDAILLSDILRVNTEITKAPLSASMIKRYDEHHQDLTLLKALVRQQLPEKYKEIFFDQSKNGYAGYIDGGASQEEFYKFIKPILEKMDGTEELLVKLNREDLLRKQRTFDNGSIPHQIHLGELHAILRRQEDFYPFLKDNREKIEKILTFRIPYYVGPLARGNSRFAWMTRKSEETITPWNFEEVVDKGASAQSFIERMTNFDKNLPNEKVLPKHSLLYEYFTVYNELTKVKYVTEGMRKPAFLSGEQKKAIVDLLFKTNRKVTVKQLKEDYFKKIECFDSVEISGVEDRFNASLGTYHDLLKIIKDKDFLDNEENEDILEDIVLTLTLFEDREMIEERLKTYAHLFDDKVMKQLKRRRYTGWGRLSRKLINGIRDKQSGKTILDFLKSDGFANRNFMQLIHDDSLTFKEDIQKAQVSGQGDSLHEHIANLAGSPAIKKGILQTVKVVDELVKVMGRHKPENIVIEMARENQTTQKGQKNSRERMKRIEEGIKELGSQILKEHPVENTQLQNEKLYLYYLQNGRDMYVDQELDINRLSDYDVDHIVPQSFLKDDSIDNKVLTRSDKARGKSDNVPSEEVVKKMKNYWRQLLNAKLITQRKFDNLTKAERGGLSELDKAGFIKRQLVETRQITKHVAQILDSRMNTKYDENDKLIREVKVITLKSKLVSDFRKDFQFYKVREINNYHHAHDAYLNAVVGTALIKKYPKLESEFVYGDYKVYDVRKMIAKSEQEIGKATAKYFFYSNIMNFFKTEITLANGEIRKRPLIETNGETGEIVWDKGRDFATVRKVLSMPQVNIVKKTEVQTGGFSKESILPKRNSDKLIARKKDWDPKKYGGFDSPTVAYSVLVVAKVEKGKSKKLKSVKELLGITIMERSSFEKNPIDFLEAKGYKEVKKDLIIKLPKYSLFELENGRKRMLASAGELQKGNELALPSKYVNFLYLASHYEKLKGSPEDNEQKQLFVEQHKHYLDEIIEQISEFSKRVILADANLDKVLSAYNKHRDKPIREQAENIIHLFTLTNLGAPAAFKYFDTTIDRKRYTSTKEVLDATLIHQSITGLYETRIDLSQLGGDGGGGGGSSGGSGGTLNIEDEHRLHETSKEPDVSLGSTWLSDFPQAWAETGGMGLAVRQAPLIIPLKATSTPVSIKQYPMSQEARLGIKPHIQRLLDQGILVPCQSPWNTPLLPVKKPGTNDYRPVQDLREVNKRVEDIHPTVPNPYNLLSGLPPSHQWYTVLDLKDAFFCLRLHPTSQPLFAFEWRDPEMGISGQLTWTRLPQGFKNSPTLFNEALHRDLADFRIQHPDLILLQYVDDLLLAATSELDCQQGTRALLQTLGNLGYRASAKKAQICQKQVKYLGYLLKEGQRWLTEARKETVMGQPTPKTPRQLREFLGTAGFCRLWIPGFAEMAAPLYPLTKPGTLFNWGPDQQKAYQEIKQALLTAPALGLPDLTKPFELFVDEKQGYAKGVLTQKLGPWRRPVAYLSKKLDPVAAGWPPCLRMVAAIAVLTKDAGKLTMGQPLVILAPHAVEALVKQPPDRWLSNARMTHYQALLLDTDRVQFGPVVALNPATLLPLPEEGLQHNCLDILAEAHGTRPDLTDQPLPDADHTWYTDGSSLLQEGQRKAGAAVTTETEVIWAKALPAGTSAQRAELIALTQALKMAEGKKLNVYTDSRYAFATAHIHGEIYRRRGWLTSEGKEIKNKDEILALLKALFLPKRLSIIHCPGHQKGHSAEARGNRMADQAARKAAITETPDTSTLLAGKRTADGSEFEKRTADGSEFESPKKKAKVE

SEQ ID NO: 3023 - protein, 2096 aa, synthetic construct; identical to SEQ ID NO: 2759

SEQ ID NO: 3024 - protein, 2092 aa, synthetic construct
MPAAKRVKLDGGDKKYSIGLDIGTNSVGWAVITDEYKVPSKKFKVLGNTDRHSIKKNLIGALLFDSGETAEATRLKRTARRRYTRRKNRICYLQEIFSNEMAKVDDSFFHRLEESFLVEEDKKHERHPIFGNIVDEVAYHEKYPTIYHLRKKLVDSTDKADLRLIYLALAHMIKFRGHFLIEGDLNPDNSDVDKLFIQLVQTYNQLFEENPINASGVDAKAILSARLSKSRRLENLIAQLPGEKKNGLFGNLIALSLGLTPNFKSNFDLAEDAKLQLSKDTYDDDLDNLLAQIGDQYADLFLAAKNLSDAILLSDILRVNTEITKAPLSASMIKRYDEHHQDLTLLKALVRQQLPEKYKEIFFDQSKNGYAGYIDGGASQEEFYKFIKPILEKMDGTEELLVKLNREDLLRKQRTFDNGSIPHQIHLGELHAILRRQEDFYPFLKDNREKIEKILTFRIPYYVGPLARGNSRFAWMTRKSEETITPWNFEEVVDKGASAQSFIERMTNFDKNLPNEKVLPKHSLLYEYFTVYNELTKVKYVTEGMRKPAFLSGEQKKAIVDLLFKTNRKVTVKQLKEDYFKKIECFDSVEISGVEDRFNASLGTYHDLLKIIKDKDFLDNEENEDILEDIVLTLTLFEDREMIEERLKTYAHLFDDKVMKQLKRRRYTGWGRLSRKLINGIRDKQSGKTILDFLKSDGFANRNFMQLIHDDSLTFKEDIQKAQVSGQGDSLHEHIANLAGSPAIKKGILQTVKVVDELVKVMGRHKPENIVIEMARENQTTQKGQKNSRERMKRIEEGIKELGSQILKEHPVENTQLQNEKLYLYYLQNGRDMYVDQELDINRLSDYDVDHIVPQSFLKDDSIDNKVLTRSDKARGKSDNVPSEEVVKKMKNYWRQLLNAKLITQRKFDNLTKAERGGLSELDKAGFIKRQLVETRQITKHVAQILDSRMNTKYDENDKLIREVKVITLKSKLVSDFRKDFQFYKVREINNYHHAHDAYLNAVVGTALIKKYPKLESEFVYGDYKVYDVRKMIAKSEQEIGKATAKYFFYSNIMNFFKTEITLANGEIRKRPLIETNGETGEIVWDKGRDFATVRKVLSMPQVNIVKKTEVQTGGFSKESILPKRNSDKLIARKKDWDPKKYGGFDSPTVAYSVLVVAKVEKGKSKKLKSVKELLGITIMERSSFEKNPIDFLEAKGYKEVKKDLIIKLPKYSLFELENGRKRMLASAGELQKGNELALPSKYVNFLYLASHYEKLKGSPEDNEQKQLFVEQHKHYLDEIIEQISEFSKRVILADANLDKVLSAYNKHRDKPIREQAENIIHLFTLTNLGAPAAFKYFDTTIDRKRYTSTKEVLDATLIHQSITGLYETRIDLSQLGGDGGGGGGGGGGGTLNIEDEHRLHETSKEPDVSLGSTWLSDFPQAWAETGGMGLAVRQAPLIIPLKATSTPVSIKQYPMSQEARLGIKPHIQRLLDQGILVPCQSPWNTPLLPVKKPGTNDYRPVQDLREVNKRVEDIHPTVPNPYNLLSGLPPSHQWYTVLDLKDAFFCLRLHPTSQPLFAFEWRDPEMGISGQLTWTRLPQGFKNSPTLFNEALHRDLADFRIQHPDLILLQYVDDLLLAATSELDCQQGTRALLQTLGNLGYRASAKKAQICQKQVKYLGYLLKEGQRWLTEARKETVMGQPTPKTPRQLREFLGTAGFCRLWIPGFAEMAAPLYPLTKPGTLFNWGPDQQKAYQEIKQALLTAPALGLPDLTKPFELFVDEKQGYAKGVLTQKLGPWRRPVAYLSKKLDPVAAGWPPCLRMVAAIAVLTKDAGKLTMGQPLVILAPHAVEALVKQPPDRWLSNARMTHYQALLLDTDRVQFGPVVALNPATLLPLPEEGLQHNCLDILAEAHGTRPDLTDQPLPDADHTWYTDGSSLLQEGQRKAGAAVTTETEVIWAKALPAGTSAQRAELIALTQALKMAEGKKLNVYTDSRYAFATAHIHGEIYRRRGWLTSEGKEIKNKDEILALLKALFLPKRLSIIHCPGHQKGHSAEARGNRMADQAARKAAITETPDTSTLLAGKRTADGSEFEKRTADGSEFESPKKKAKVE

SEQ ID NO: 3025 - protein, 2094 aa, synthetic construct; identical to SEQ ID NO: 2742

SEQ ID NO: 3026 - protein, 2094 aa, synthetic construct; identical to SEQ ID NO: 2715

SEQ ID NO: 3027 - protein, 2097 aa, synthetic construct; identical to SEQ ID NO: 2728

SEQ ID NO: 3028 - protein, 2091 aa, synthetic construct; identical to SEQ ID NO: 2743

SEQ ID NO: 3029 - protein, 2090 aa, synthetic construct
MPAAKRVKLDGGDKKYSIGLDIGTNSVGWAVITDEYKVPSKKFKVLGNTDRHSIKKNLIGALLFDSGETAEATRLKRTARRRYTRRKNRICYLQEIFSNEMAKVDDSFFHRLEESFLVEEDKKHERHPIFGNIVDEVAYHEKYPTIYHLRKKLVDSTDKADLRLIYLALAHMIKFRGHFLIEGDLNPDNSDVDKLFIQLVQTYNQLFEENPINASGVDAKAILSARLSKSRRLENLIAQLPGEKKNGLFGNLIALSLGLTPNFKSNFDLAEDAKLQLSKDTYDDDLDNLLAQIGDQYADLFLAAKNLSDAILLSDILRVNTEITKAPLSASMIKRYDEHHQDLTLLKALVRQQLPEKYKEIFFDQSKNGYAGYIDGGASQEEFYKFIKPILEKMDGTEELLVKLNREDLLRKQRTFDNGSIPHQIHLGELHAILRRQEDFYPFLKDNREKIEKILTFRIPYYVGPLARGNSRFAWMTRKSEETITPWNFEEVVDKGASAQSFIERMTNFDKNLPNEKVLPKHSLLYEYFTVYNELTKVKYVTEGMRKPAFLSGEQKKAIVDLLFKTNRKVTVKQLKEDYFKKIECFDSVEISGVEDRFNASLGTYHDLLKIIKDKDFLDNEENEDILEDIVLTLTLFEDREMIEERLKTYAHLFDDKVMKQLKRRRYTGWGRLSRKLINGIRDKQSGKTILDFLKSDGFANRNFMQLIHDDSLTFKEDIQKAQVSGQGDSLHEHIANLAGSPAIKKGILQTVKVVDELVKVMGRHKPENIVIEMARENQTTQKGQKNSRERMKRIEEGIKELGSQILKEHPVENTQLQNEKLYLYYLQNGRDMYVDQELDINRLSDYDVDHIVPQSFLKDDSIDNKVLTRSDKARGKSDNVPSEEVVKKMKNYWRQLLNAKLITQRKFDNLTKAERGGLSELDKAGFIKRQLVETRQITKHVAQILDSRMNTKYDENDKLIREVKVITLKSKLVSDFRKDFQFYKVREINNYHHAHDAYLNAVVGTALIKKYPKLESEFVYGDYKVYDVRKMIAKSEQEIGKATAKYFFYSNIMNFFKTEITLANGEIRKRPLIETNGETGEIVWDKGRDFATVRKVLSMPQVNIVKKTEVQTGGFSKESILPKRNSDKLIARKKDWDPKKYGGFDSPTVAYSVLVVAKVEKGKSKKLKSVKELLGITIMERSSFEKNPIDFLEAKGYKEVKKDLIIKLPKYSLFELENGRKRMLASAGELQKGNELALPSKYVNFLYLASHYEKLKGSPEDNEQKQLFVEQHKHYLDEIIEQISEFSKRVILADANLDKVLSAYNKHRDKPIREQAENIIHLFTLTNLGAPAAFKYFDTTIDRKRYTSTKEVLDATLIHQSITGLYETRIDLSQLGGDGGPAPAPGGTLNIEDEHRLHETSKEPDVSLGSTWLSDFPQAWAETGGMGLAVRQAPLIIPLKATSTPVSIKQYPMSQEARLGIKPHIQRLLDQGILVPCQSPWNTPLLPVKKPGTNDYRPVQDLREVNKRVEDIHPTVPNPYNLLSGLPPSHQWYTVLDLKDAFFCLRLHPTSQPLFAFEWRDPEMGISGQLTWTRLPQGFKNSPTLFNEALHRDLADFRIQHPDLILLQYVDDLLLAATSELDCQQGTRALLQTLGNLGYRASAKKAQICQKQVKYLGYLLKEGQRWLTEARKETVMGQPTPKTPRQLREFLGTAGFCRLWIPGFAEMAAPLYPLTKPGTLFNWGPDQQKAYQEIKQALLTAPALGLPDLTKPFELFVDEKQGYAKGVLTQKLGPWRRPVAYLSKKLDPVAAGWPPCLRMVAAIAVLTKDAGKLTMGQPLVILAPHAVEALVKQPPDRWLSNARMTHYQALLLDTDRVQFGPVVALNPATLLPLPEEGLQHNCLDILAEAHGTRPDLTDQPLPDADHTWYTDGSSLLQEGQRKAGAAVTTETEVIWAKALPAGTSAQRAELIALTQALKMAEGKKLNVYTDSRYAFATAHIHGEIYRRRGWLTSEGKEIKNKDEILALLKALFLPKRLSIIHCPGHQKGHSAEARGNRMADQAARKAAITETPDTSTLLAGKRTADGSEFEKRTADGSEFESPKKKAKVE

SEQ ID NO: 3030 - protein, 2091 aa, synthetic construct; identical to SEQ ID NO: 2750

SEQ ID NO: 3031 - protein, 2094 aa, synthetic construct; identical to SEQ ID NO: 2768

SEQ ID NO: 3032 - protein, 2094 aa, synthetic construct; identical to SEQ ID NO: 2770

SEQ ID NO: 3033 - protein, 2091 aa, synthetic construct; identical to SEQ ID NO: 2779

SEQ ID NO: 3034 - protein, 2093 aa, synthetic construct; identical to SEQ ID NO: 2774

SEQ ID NO: 3035 - protein, 2103 aa, synthetic construct
MPAAKRVKLDGGDKKYSIGLDIGTNSVGWAVITDEYKVPSKKFKVLGNTDRHSIKKNLIGALLFDSGETAEATRLKRTARRRYTRRKNRICYLQEIFSNEMAKVDDSFFHRLEESFLVEEDKKHERHPIFGNIVDEVAYHEKYPTIYHLRKKLVDSTDKADLRLIYLALAHMIKFRGHFLIEGDLNPDNSDVDKLFIQLVQTYNQLFEENPINASGVDAKAILSARLSKSRRLENLIAQLPGEKKNGLFGNLIALSLGLTPNFKSNFDLAEDAKLQLSKDTYDDDLDNLLAQIGDQYADLFLAAKNLSDAILLSDILRVNTEITKAPLSASMIKRYDEHHQDLTLLKALVRQQLPEKYKEIFFDQSKNGYAGYIDGGASQEEFYKFIKPILEKMDGTEELLVKLNREDLLRKQRTFDNGSIPHQIHLGELHAILRRQEDFYPFLKDNREKIEKILTFRIPYYVGPLARGNSRFAWMTRKSEETITPWNFEEVVDKGASAQSFIERMTNFDKNLPNEKVLPKHSLLYEYFTVYNELTKVKYVTEGMRKPAFLSGEQKKAIVDLLFKTNRKVTVKQLKEDYFKKIECFDSVEISGVEDRFNASLGTYHDLLKIIKDKDFLDNEENEDILEDIVLTLTLFEDREMIEERLKTYAHLFDDKVMKQLKRRRYTGWGRLSRKLINGIRDKQSGKTILDFLKSDGFANRNFMQLIHDDSLTFKEDIQKAQVSGQGDSLHEHIANLAGSPAIKKGILQTVKVVDELVKVMGRHKPENIVIEMARENQTTQKGQKNSRERMKRIEEGIKELGSQILKEHPVENTQLQNEKLYLYYLQNGRDMYVDQELDINRLSDYDVDHIVPQSFLKDDSIDNKVLTRSDKARGKSDNVPSEEVVKKMKNYWRQLLNAKLITQRKFDNLTKAERGGLSELDKAGFIKRQLVETRQITKHVAQILDSRMNTKYDENDKLIREVKVITLKSKLVSDFRKDFQFYKVREINNYHHAHDAYLNAVVGTALIKKYPKLESEFVYGDYKVYDVRKMIAKSEQEIGKATAKYFFYSNIMNFFKTEITLANGEIRKRPLIETNGETGEIVWDKGRDFATVRKVLSMPQVNIVKKTEVQTGGFSKESILPKRNSDKLIARKKDWDPKKYGGFDSPTVAYSVLVVAKVEKGKSKKLKSVKELLGITIMERSSFEKNPIDFLEAKGYKEVKKDLIIKLPKYSLFELENGRKRMLASAGELQKGNELALPSKYVNFLYLASHYEKLKGSPEDNEQKQLFVEQHKHYLDEIIEQISEFSKRVILADANLDKVLSAYNKHRDKPIREQAENIIHLFTLTNLGAPAAFKYFDTTIDRKRYTSTKEVLDATLIHQSITGLYETRIDLSQLGGDGGGGSGGSGGSGGSGGSGGSGGTLNIEDEHRLHETSKEPDVSLGSTWLSDFPQAWAETGGMGLAVRQAPLIIPLKATSTPVSIKQYPMSQEARLGIKPHIQRLLDQGILVPCQSPWNTPLLPVKKPGTNDYRPVQDLREVNKRVEDIHPTVPNPYNLLSGLPPSHQWYTVLDLKDAFFCLRLHPTSQPLFAFEWRDPEMGISGQLTWTRLPQGFKNSPTLFNEALHRDLADFRIQHPDLILLQYVDDLLLAATSELDCQQGTRALLQTLGNLGYRASAKKAQICQKQVKYLGYLLKEGQRWLTEARKETVMGQPTPKTPRQLREFLGKAGFCRLFIPGFAEMAAPLYPLTKPGTLFNWGPDQQKAYQEIKQALLTAPALGLPDLTKPFELFVDEKQGYAKGVLTQKLGPWRRPVAYLSKKLDPVAAGWPPCLRMVAAIAVLTKDAGKLTMGQPLVILAPHAVEALVKQPPDRWLSNARMTHYQALLLDTDRVQFGPVVALNPATLLPLPEEGLQHNCLDILAEAHGTRPDLTDQPLPDADHTWYTDGSSLLQEGQRKAGAAVTTETEVIWAKALPAGTSAQRAELIALTQALKMAEGKKLNVYTDSRYAFATAHIHGEIYRRRGWLTSEGKEIKNKDEILALLKALFLPKRLSIIHCPGHQKGHSAEARGNRMADQAARKAAITETPDTSTLLAGKRTADGSEFEKRTADGSEFESPKKKAKVE

SEQ ID NO: 3036 - protein, 2105 aa, synthetic construct; identical to SEQ ID NO: 2844

SEQ ID NO: 3037 - protein, 2088 aa, synthetic construct; identical to SEQ ID NO: 2812

SEQ ID NO: 3038 - protein, 2103 aa, synthetic construct; identical to SEQ ID NO: 2816

SEQ ID NO: 3039 - protein, 2097 aa, synthetic construct; identical to SEQ ID NO: 2795

SEQ ID NO: 3040 - protein, 2096 aa, synthetic construct; identical to SEQ ID NO: 2831

SEQ ID NO: 3041 - protein, 2095 aa, synthetic construct; identical to SEQ ID NO: 2845

SEQ ID NO: 3042 - protein, 2094 aa, synthetic construct; identical to SEQ ID NO: 2818

SEQ ID NO: 3043 - protein, 2110 aa, synthetic construct; identical to SEQ ID NO: 2803

SEQ ID NO: 3044 - protein, 2091 aa, synthetic construct
MPAAKRVKLDGGDKKYSIGLDIGTNSVGWAVITDEYKVPSKKFKVLGNTDRHSIKKNLIGALLFDSGETAEATRLKRTARRRYTRRKNRICYLQEIFSNEMAKVDDSFFHRLEESFLVEEDKKHERHPIFGNIVDEVAYHEKYPTIYHLRKKLVDSTDKADLRLIYLALAHMIKFRGHFLIEGDLNPDNSDVDKLFIQLVQTYNQLFEENPINASGVDAKAILSARLSKSRRLENLIAQLPGEKKNGLFGNLIALSLGLTPNFKSNFDLAEDAKLQLSKDTYDDDLDNLLAQIGDQYADLFLAAKNLSDAILLSDILRVNTEITKAPLSASMIKRYDEHHQDLTLLKALVRQQLPEKYKEIFFDQSKNGYAGYIDGGASQEEFYKFIKPILEKMDGTEELLVKLNREDLLRKQRTFDNGSIPHQIHLGELHAILRRQEDFYPFLKDNREKIEKILTFRIPYYVGPLARGNSRFAWMTRKSEETITPWNFEEVVDKGASAQSFIERMTNFDKNLPNEKVLPKHSLLYEYFTVYNELTKVKYVTEGMRKPAFLSGEQKKAIVDLLFKTNRKVTVKQLKEDYFKKIECFDSVEISGVEDRFNASLGTYHDLLKIIKDKDFLDNEENEDILEDIVLTLTLFEDREMIEERLKTYAHLFDDKVMKQLKRRRYTGWGRLSRKLINGIRDKQSGKTILDFLKSDGFANRNFMQLIHDDSLTFKEDIQKAQVSGQGDSLHEHIANLAGSPAIKKGILQTVKVVDELVKVMGRHKPENIVIEMARENQTTQKGQKNSRERMKRIEEGIKELGSQILKEHPVENTQLQNEKLYLYYLQNGRDMYVDQELDINRLSDYDVDHIVPQSFLKDDSIDNKVLTRSDKARGKSDNVPSEEVVKKMKNYWRQLLNAKLITQRKFDNLTKAERGGLSELDKAGFIKRQLVETRQITKHVAQILDSRMNTKYDENDKLIREVKVITLKSKLVSDFRKDFQFYKVREINNYHHAHDAYLNAVVGTALIKKYPKLESEFVYGDYKVYDVRKMIAKSEQEIGKATAKYFFYSNIMNFFKTEITLANGEIRKRPLIETNGETGEIVWDKGRDFATVRKVLSMPQVNIVKKTEVQTGGFSKESILPKRNSDKLIARKKDWDPKKYGGFDSPTVAYSVLVVAKVEKGKSKKLKSVKELLGITIMERSSFEKNPIDFLEAKGYKEVKKDLIIKLPKYSLFELENGRKRMLASAGELQKGNELALPSKYVNFLYLASHYEKLKGSPEDNEQKQLFVEQHKHYLDEIIEQISEFSKRVILADANLDKVLSAYNKHRDKPIREQAENIIHLFTLTNLGAPAAFKYFDTTIDRKRYTSTKEVLDATLIHQSITGLYETRIDLSQLGGDGGGGGGGGGGTLNIEDEHRLHETSKEPDVSLGSTWLSDFPQAWAETGGMGLAVRQAPLIIPLKATSTPVSIKQYPMSQEARLGIKPHIQRLLDQGILVPCQSPWNTPLLPVKKPGTNDYRPVQDLREVNKRVEDIHPTVPNPYNLLSGLPPSHQWYTVLDLKDAFFCLRLHPTSQPLFAFEWRDPEMGISGQLTWTRLPQGFKNSPTLFNEALHRDLADFRIQHPDLILLQYVDDLLLAATSELDCQQGTRALLQTLGNLGYRASAKKAQICQKQVKYLGYLLKEGQRWLTEARKETVMGQPTPKTPRQLREFLGKAGFCRLFIPGFAEMAAPLYPLTKPGTLFNWGPDQQKAYQEIKQALLTAPALGLPDLTKPFELFVDEKQGYAKGVLTQKLGPWRRPVAYLSKKLDPVAAGWPPCLRMVAAIAVLTKDAGKLTMGQPLVILAPHAVEALVKQPPDRWLSNARMTHYQALLLDTDRVQFGPVVALNPATLLPLPEEGLQHNCLDILAEAHGTRPDLTDQPLPDADHTWYTDGSSLLQEGQRKAGAAVTTETEVIWAKALPAGTSAQRAELIALTQALKMAEGKKLNVYTDSRYAFATAHIHGEIYRRRGWLTSEGKEIKNKDEILALLKALFLPKRLSIIHCPGHQKGHSAEARGNRMADQAARKAAITETPDTSTLLAGKRTADGSEFEKRTADGSEFESPKKKAKVE

SEQ ID NO: 3045 - protein, 2096 aa, synthetic construct
MPAAKRVKLDGGDKKYSIGLDIGTNSVGWAVITDEYKVPSKKFKVLGNTDRHSIKKNLIGALLFDSGETAEATRLKRTARRRYTRRKNRICYLQEIFSNEMAKVDDSFFHRLEESFLVEEDKKHERHPIFGNIVDEVAYHEKYPTIYHLRKKLVDSTDKADLRLIYLALAHMIKFRGHFLIEGDLNPDNSDVDKLFIQLVQTYNQLFEENPINASGVDAKAILSARLSKSRRLENLIAQLPGEKKNGLFGNLIALSLGLTPNFKSNFDLAEDAKLQLSKDTYDDDLDNLLAQIGDQYADLFLAAKNLSDAILLSDILRVNTEITKAPLSASMIKRYDEHHQDLTLLKALVRQQLPEKYKEIFFDQSKNGYAGYIDGGASQEEFYKFIKPILEKMDGTEELLVKLNREDLLRKQRTFDNGSIPHQIHLGELHAILRRQEDFYPFLKDNREKIEKILTFRIPYYVGPLARGNSRFAWMTRKSEETITPWNFEEVVDKGASAQSFIERMTNFDKNLPNEKVLPKHSLLYEYFTVYNELTKVKYVTEGMRKPAFLSGEQKKAIVDLLFKTNRKVTVKQLKEDYFKKIECFDSVEISGVEDRFNASLGTYHDLLKIIKDKDFLDNEENEDILEDIVLTLTLFEDREMIEERLKTYAHLFDDKVMKQLKRRRYTGWGRLSRKLINGIRDKQSGKTILDFLKSDGFANRNFMQLIHDDSLTFKEDIQKAQVSGQGDSLHEHIANLAGSPAIKKGILQTVKVVDELVKVMGRHKPENIVIEMARENQTTQKGQKNSRERMKRIEEGIKELGSQILKEHPVENTQLQNEKLYLYYLQNGRDMYVDQELDINRLSDYDVDHIVPQSFLKDDSIDNKVLTRSDKARGKSDNVPSEEVVKKMKNYWRQLLNAKLITQRKFDNLTKAERGGLSELDKAGFIKRQLVETRQITKHVAQILDSRMNTKYDENDKLIREVKVITLKSKLVSDFRKDFQFYKVREINNYHHAHDAYLNAVVGTALIKKYPKLESEFVYGDYKVYDVRKMIAKSEQEIGKATAKYFFYSNIMNFFKTEITLANGEIRKRPLIETNGETGEIVWDKGRDFATVRKVLSMPQVNIVKKTEVQTGGFSKESILPKRNSDKLIARKKDWDPKKYGGFDSPTVAYSVLVVAKVEKGKSKKLKSVKELLGITIMERSSFEKNPIDFLEAKGYKEVKKDLIIKLPKYSLFELENGRKRMLASAGELQKGNELALPSKYVNFLYLASHYEKLKGSPEDNEQKQLFVEQHKHYLDEIIEQISEFSKRVILADANLDKVLSAYNKHRDKPIREQAENIIHLFTLTNLGAPAAFKYFDTTIDRKRYTSTKEVLDATLIHQSITGLYETRIDLSQLGGDGGGGGEAAAKGGSGGTLNIEDEHRLHETSKEPDVSLGSTWLSDFPQAWAETGGMGLAVRQAPLIIPLKATSTPVSIKQYPMSQEARLGIKPHIQRLLDQGILVPCQSPWNTPLLPVKKPGTNDYRPVQDLREVNKRVEDIHPTVPNPYNLLSGLPPSHQWYTVLDLKDAFFCLRLHPTSQPLFAFEWRDPEMGISGQLTWTRLPQGFKNSPTLFNEALHRDLADFRIQHPDLILLQYVDDLLLAATSELDCQQGTRALLQTLGNLGYRASAKKAQICQKQVKYLGYLLKEGQRWLTEARKETVMGQPTPKTPRQLREFLGKAGFCRLFIPGFAEMAAPLYPLTKPGTLFNWGPDQQKAYQEIKQALLTAPALGLPDLTKPFELFVDEKQGYAKGVLTQKLGPWRRPVAYLSKKLDPVAAGWPPCLRMVAAIAVLTKDAGKLTMGQPLVILAPHAVEALVKQPPDRWLSNARMTHYQALLLDTDRVQFGPVVALNPATLLPLPEEGLQHNCLDILAEAHGTRPDLTDQPLPDADHTWYTDGSSLLQEGQRKAGAAVTTETEVIWAKALPAGTSAQRAELIALTQALKMAEGKKLNVYTDSRYAFATAHIHGEIYRRRGWLTSEGKEIKNKDEILALLKALFLPKRLSIIHCPGHQKGHSAEARGNRMADQAARKAAITETPDTSTLLAGKRTADGSEFEKRTADGSEFESPKKKAKVE

SEQ ID NO: 3046 - protein, 2096 aa, synthetic construct; identical to SEQ ID NO: 2829

SEQ ID NO: 3047 - protein, 2094 aa, synthetic construct
MPAAKRVKLDGGDKKYSIGLDIGTNSVGWAVITDEYKVPSKKFKVLGNTDRHSIKKNLIGALLFDSGETAEATRLKRTARRRYTRRKNRICYLQEIFSNEMAKVDDSFFHRLEESFLVEEDKKHERHPIFGNIVDEVAYHEKYPTIYHLRKKLVDSTDKADLRLIYLALAHMIKFRGHFLIEGDLNPDNSDVDKLFIQLVQTYNQLFEENPINASGVDAKAILSARLSKSRRLENLIAQLPGEKKNGLFGNLIALSLGLTPNFKSNFDLAEDAKLQLSKDTYDDDLDNLLAQIGDQYADLFLAAKNLSDAILLSDILRVNTEITKAPLSASMIKRYDEHHQDLTLLKALVRQQLPEKYKEIFFDQSKNGYAGYIDGGASQEEFYKFIKPILEKMDGTEELLVKLNREDLLRKQRTFDNGSIPHQIHLGELHAILRRQEDFYPFLKDNREKIEKILTFRIPYYVGPLARGNSRFAWMTRKSEETITPWNFEEVVDKGASAQSFIERMTNFDKNLPNEKVLPKHSLLYEYFTVYNELTKVKYVTEGMRKPAFLSGEQKKAIVDLLFKTNRKVTVKQLKEDYFKKIECFDSVEISGVEDRFNASLGTYHDLLKIIKDKDFLDNEENEDILEDIVLTLTLFEDREMIEERLKTYAHLFDDKVMKQLKRRRYTGWGRLSRKLINGIRDKQSGKTILDFLKSDGFANRNFMQLIHDDSLTFKEDIQKAQVSGQGDSLHEHIANLAGSPAIKKGILQTVKVVDELVKVMGRHKPENIVIEMARENQTTQKGQKNSRERMKRIEEGIKELGSQILKEHPVENTQLQNEKLYLYYLQNGRDMYVDQELDINRLSDYDVDHIVPQSFLKDDSIDNKVLTRSDKARGKSDNVPSEEVVKKMKNYWRQLLNAKLITQRKFDNLTKAERGGLSELDKAGFIKRQLVETRQITKHVAQILDSRMNTKYDENDKLIREVKVITLKSKLVSDFRKDFQFYKVREINNYHHAHDAYLNAVVGTALIKKYPKLESEFVYGDYKVYDVRKMIAKSEQEIGKATAKYFFYSNIMNFFKTEITLANGEIRKRPLIETNGETGEIVWDKGRDFATVRKVLSMPQVNIVKKTEVQTGGFSKESILPKRNSDKLIARKKDWDPKKYGGFDSPTVAYSVLVVAKVEKGKSKKLKSVKELLGITIMERSSFEKNPIDFLEAKGYKEVKKDLIIKLPKYSLFELENGRKRMLASAGELQKGNELALPSKYVNFLYLASHYEKLKGSPEDNEQKQLFVEQHKHYLDEIIEQISEFSKRVILADANLDKVLSAYNKHRDKPIREQAENIIHLFTLTNLGAPAAFKYFDTTIDRKRYTSTKEVLDATLIHQSITGLYETRIDLSQLGGDGGGSSGGGGGSGGTLNIEDEHRLHETSKEPDVSLGSTWLSDFPQAWAETGGMGLAVRQAPLIIPLKATSTPVSIKQYPMSQEARLGIKPHIQRLLDQGILVPCQSPWNTPLLPVKKPGTNDYRPVQDLREVNKRVEDIHPTVPNPYNLLSGLPPSHQWYTVLDLKDAFFCLRLHPTSQPLFAFEWRDPEMGISGQLTWTRLPQGFKNSPTLFNEALHRDLADFRIQHPDLILLQYVDDLLLAATSELDCQQGTRALLQTLGNLGYRASAKKAQICQKQVKYLGYLLKEGQRWLTEARKETVMGQPTPKTPRQLREFLGKAGFCRLFIPGFAEMAAPLYPLTKPGTLFNWGPDQQKAYQEIKQALLTAPALGLPDLTKPFELFVDEKQGYAKGVLTQKLGPWRRPVAYLSKKLDPVAAGWPPCLRMVAAIAVLTKDAGKLTMGQPLVILAPHAVEALVKQPPDRWLSNARMTHYQALLLDTDRVQFGPVVALNPATLLPLPEEGLQHNCLDILAEAHGTRPDLTDQPLPDADHTWYTDGSSLLQEGQRKAGAAVTTETEVIWAKALPAGTSAQRAELIALTQALKMAEGKKLNVYTDSRYAFATAHIHGEIYRRRGWLTSEGKEIKNKDEILALLKALFLPKRLSIIHCPGHQKGHSAEARGNRMADQAARKAAITETPDTSTLLAGKRTADGSEFEKRTADGSEFESPKKKAKVE

SEQ ID NO: 3048 - protein, 2094 aa, synthetic construct; identical to SEQ ID NO: 2852

SEQ ID NO: 3049 - protein, 2097 aa, synthetic construct; identical to SEQ ID NO: 2814

SEQ ID NO: 3050 - protein, 2096 aa, synthetic construct
MPAAKRVKLDGGDKKYSIGLDIGTNSVGWAVITDEYKVPSKKFKVLGNTDRHSIKKNLIGALLFDSGETAEATRLKRTARRRYTRRKNRICYLQEIFSNEMAKVDDSFFHRLEESFLVEEDKKHERHPIFGNIVDEVAYHEKYPTIYHLRKKLVDSTDKADLRLIYLALAHMIKFRGHFLIEGDLNPDNSDVDKLFIQLVQTYNQLFEENPINASGVDAKAILSARLSKSRRLENLIAQLPGEKKNGLFGNLIALSLGLTPNFKSNFDLAEDAKLQLSKDTYDDDLDNLLAQIGDQYADLFLAAKNLSDAILLSDILRVNTEITKAPLSASMIKRYDEHHQDLTLLKALVRQQLPEKYKEIFFDQSKNGYAGYIDGGASQEEFYKFIKPILEKMDGTEELLVKLNREDLLRKQRTFDNGSIPHQIHLGELHAILRRQEDFYPFLKDNREKIEKILTFRIPYYVGPLARGNSRFAWMTRKSEETITPWNFEEVVDKGASAQSFIERMTNFDKNLPNEKVLPKHSLLYEYFTVYNELTKVKYVTEGMRKPAFLSGEQKKAIVDLLFKTNRKVTVKQLKEDYFKKIECFDSVEISGVEDRFNASLGTYHDLLKIIKDKDFLDNEENEDILEDIVLTLTLFEDREMIEERLKTYAHLFDDKVMKQLKRRRYTGWGRLSRKLINGIRDKQSGKTILDFLKSDGFANRNFMQLIHDDSLTFKEDIQKAQVSGQGDSLHEHIANLAGSPAIKKGILQTVKVVDELVKVMGRHKPENIVIEMARENQTTQKGQKNSRERMKRIEEGIKELGSQILKEHPVENTQLQNEKLYLYYLQNGRDMYVDQELDINRLSDYDVDHIVPQSFLKDDSIDNKVLTRSDKARGKSDNVPSEEVVKKMKNYWRQLLNAKLITQRKFDNLTKAERGGLSELDKAGFIKRQLVETRQITKHVAQILDSRMNTKYDENDKLIREVKVITLKSKLVSDFRKDFQFYKVREINNYHHAHDAYLNAVVGTALIKKYPKLESEFVYGDYKVYDVRKMIAKSEQEIGKATAKYFFYSNIMNFFKTEITLANGEIRKRPLIETNGETGEIVWDKGRDFATVRKVLSMPQVNIVKKTEVQTGGFSKESILPKRNSDKLIARKKDWDPKKYGGFDSPTVAYSVLVVAKVEKGKSKKLKSVKELLGITIMERSSFEKNPIDFLEAKGYKEVKKDLIIKLPKYSLFELENGRKRMLASAGELQKGNELALPSKYVNFLYLASHYEKLKGSPEDNEQKQLFVEQHKHYLDEIIEQISEFSKRVILADANLDKVLSAYNKHRDKPIREQAENIIHLFTLTNLGAPAAFKYFDTTIDRKRYTSTKEVLDATLIHQSITGLYETRIDLSQLGGDGGGGGEAAAKGSSGGTLNIEDEHRLHETSKEPDVSLGSTWLSDFPQAWAETGGMGLAVRQAPLIIPLKATSTPVSIKQYPMSQEARLGIKPHIQRLLDQGILVPCQSPWNTPLLPVKKPGTNDYRPVQDLREVNKRVEDIHPTVPNPYNLLSGLPPSHQWYTVLDLKDAFFCLRLHPTSQPLFAFEWRDPEMGISGQLTWTRLPQGFKNSPTLFNEALHRDLADFRIQHPDLILLQYVDDLLLAATSELDCQQGTRALLQTLGNLGYRASAKKAQICQKQVKYLGYLLKEGQRWLTEARKETVMGQPTPKTPRQLREFLGKAGFCRLFIPGFAEMAAPLYPLTKPGTLFNWGPDQQKAYQEIKQALLTAPALGLPDLTKPFELFVDEKQGYAKGVLTQKLGPWRRPVAYLSKKLDPVAAGWPPCLRMVAAIAVLTKDAGKLTMGQPLVILAPHAVEALVKQPPDRWLSNARMTHYQALLLDTDRVQFGPVVALNPATLLPLPEEGLQHNCLDILAEAHGTRPDLTDQPLPDADHTWYTDGSSLLQEGQRKAGAAVTTETEVIWAKALPAGTSAQRAELIALTQALKMAEGKKLNVYTDSRYAFATAHIHGEIYRRRGWLTSEGKEIKNKDEILALLKALFLPKRLSIIHCPGHQKGHSAEARGNRMADQAARKAAITETPDTSTLLAGKRTADGSEFEKRTADGSEFESPKKKAKVE

SEQ ID NO: 3051 - protein, 2096 aa, synthetic construct; identical to SEQ ID NO: 2785

SEQ ID NO: 3052 - protein, 2096 aa, synthetic construct; identical to SEQ ID NO: 2822

SEQ ID NO: 3053 - protein, 2096 aa, synthetic construct; identical to SEQ ID NO: 2817

SEQ ID NO: 3054 - protein, 2096 aa, synthetic construct; identical to SEQ ID NO: 2851

SEQ ID NO: 3055 - protein, 2091 aa, synthetic construct
MPAAKRVKLDGGDKKYSIGLDIGTNSVGWAVITDEYKVPSKKFKVLGNTDRHSIKKNLIGALLFDSGETAEATRLKRTARRRYTRRKNRICYLQEIFSNEMAKVDDSFFHRLEESFLVEEDKKHERHPIFGNIVDEVAYHEKYPTIYHLRKKLVDSTDKADLRLIYLALAHMIKFRGHFLIEGDLNPDNSDVDKLFIQLVQTYNQLFEENPINASGVDAKAILSARLSKSRRLENLIAQLPGEKKNGLFGNLIALSLGLTPNFKSNFDLAEDAKLQLSKDTYDDDLDNLLAQIGDQYADLFLAAKNLSDAILLSDILRVNTEITKAPLSASMIKRYDEHHQDLTLLKALVRQQLPEKYKEIFFDQSKNGYAGYIDGGASQEEFYKFIKPILEKMDGTEELLVKLNREDLLRKQRTFDNGSIPHQIHLGELHAILRRQEDFYPFLKDNREKIEKILTFRIPYYVGPLARGNSRFAWMTRKSEETITPWNFEEVVDKGASAQSFIERMTNFDKNLPNEKVLPKHSLLYEYFTVYNELTKVKYVTEGMRKPAFLSGEQKKAIVDLLFKTNRKVTVKQLKEDYFKKIECFDSVEISGVEDRFNASLGTYHDLLKIIKDKDFLDNEENEDILEDIVLTLTLFEDREMIEERLKTYAHLFDDKVMKQLKRRRYTGWGRLSRKLINGIRDKQSGKTILDFLKSDGFANRNFMQLIHDDSLTFKEDIQKAQVSGQGDSLHEHIANLAGSPAIKKGILQTVKVVDELVKVMGRHKPENIVIEMARENQTTQKGQKNSRERMKRIEEGIKELGSQILKEHPVENTQLQNEKLYLYYLQNGRDMYVDQELDINRLSDYDVDHIVPQSFLKDDSIDNKVLTRSDKARGKSDNVPSEEVVKKMKNYWRQLLNAKLITQRKFDNLTKAERGGLSELDKAGFIKRQLVETRQITKHVAQILDSRMNTKYDENDKLIREVKVITLKSKLVSDFRKDFQFYKVREINNYHHAHDAYLNAVVGTALIKKYPKLESEFVYGDYKVYDVRKMIAKSEQEIGKATAKYFFYSNIMNFFKTEITLANGEIRKRPLIETNGETGEIVWDKGRDFATVRKVLSMPQVNIVKKTEVQTGGFSKESILPKRNSDKLIARKKDWDPKKYGGFDSPTVAYSVLVVAKVEKGKSKKLKSVKELLGITIMERSSFEKNPIDFLEAKGYKEVKKDLIIKLPKYSLFELENGRKRMLASAGELQKGNELALPSKYVNFLYLASHYEKLKGSPEDNEQKQLFVEQHKHYLDEIIEQISEFSKRVILADANLDKVLSAYNKHRDKPIREQAENIIHLFTLTNLGAPAAFKYFDTTIDRKRYTSTKEVLDATLIHQSITGLYETRIDLSQLGGDGGGSSPAPGGTLNIEDEHRLHETSKEPDVSLGSTWLSDFPQAWAETGGMGLAVRQAPLIIPLKATSTPVSIKQYPMSQEARLGIKPHIQRLLDQGILVPCQSPWNTPLLPVKKPGTNDYRPVQDLREVNKRVEDIHPTVPNPYNLLSGLPPSHQWYTVLDLKDAFFCLRLHPTSQPLFAFEWRDPEMGISGQLTWTRLPQGFKNSPTLFNEALHRDLADFRIQHPDLILLQYVDDLLLAATSELDCQQGTRALLQTLGNLGYRASAKKAQICQKQVKYLGYLLKEGQRWLTEARKETVMGQPTPKTPRQLREFLGKAGFCRLFIPGFAEMAAPLYPLTKPGTLFNWGPDQQKAYQEIKQALLTAPALGLPDLTKPFELFVDEKQGYAKGVLTQKLGPWRRPVAYLSKKLDPVAAGWPPCLRMVAAIAVLTKDAGKLTMGQPLVILAPHAVEALVKQPPDRWLSNARMTHYQALLLDTDRVQFGPVVALNPATLLPLPEEGLQHNCLDILAEAHGTRPDLTDQPLPDADHTWYTDGSSLLQEGQRKAGAAVTTETEVIWAKALPAGTSAQRAELIALTQALKMAEGKKLNVYTDSRYAFATAHIHGEIYRRRGWLTSEGKEIKNKDEILALLKALFLPKRLSIIHCPGHQKGHSAEARGNRMADQAARKAAITETPDTSTLLAGKRTADGSEFEKRTADGSEFESPKKKAKVE

SEQ ID NO: 3056 - protein, 2094 aa, synthetic construct
MPAAKRVKLDGGDKKYSIGLDIGTNSVGWAVITDEYKVPSKKFKVLGNTDRHSIKKNLIGALLFDSGETAEATRLKRTARRRYTRRKNRICYLQEIFSNEMAKVDDSFFHRLEESFLVEEDKKHERHPIFGNIVDEVAYHEKYPTIYHLRKKLVDSTDKADLRLIYLALAHMIKFRGHFLIEGDLNPDNSDVDKLFIQLVQTYNQLFEENPINASGVDAKAILSARLSKSRRLENLIAQLPGEKKNGLFGNLIALSLGLTPNFKSNFDLAEDAKLQLSKDTYDDDLDNLLAQIGDQYADLFLAAKNLSDAILLSDILRVNTEITKAPLSASMIKRYDEHHQDLTLLKALVRQQLPEKYKEIFFDQSKNGYAGYIDGGASQEEFYKFIKPILEKMDGTEELLVKLNREDLLRKQRTFDNGSIPHQIHLGELHAILRRQEDFYPFLKDNREKIEKILTFRIPYYVGPLARGNSRFAWMTRKSEETITPWNFEEVVDKGASAQSFIERMTNFDKNLPNEKVLPKHSLLYEYFTVYNELTKVKYVTEGMRKPAFLSGEQKKAIVDLLFKTNRKVTVKQLKEDYFKKIECFDSVEISGVEDRFNASLGTYHDLLKIIKDKDFLDNEENEDILEDIVLTLTLFEDREMIEERLKTYAHLFDDKVMKQLKRRRYTGWGRLSRKLINGIRDKQSGKTILDFLKSDGFANRNFMQLIHDDSLTFKEDIQKAQVSGQGDSLHEHIANLAGSPAIKKGILQTVKVVDELVKVMGRHKPENIVIEMARENQTTQKGQKNSRERMKRIEEGIKELGSQILKEHPVENTQLQNEKLYLYYLQNGRDMYVDQELDINRLSDYDVDHIVPQSFLKDDSIDNKVLTRSDKARGKSDNVPSEEVVKKMKNYWRQLLNAKLITQRKFDNLTKAERGGLSELDKAGFIKRQLVETRQITKHVAQILDSRMNTKYDENDKLIREVKVITLKSKLVSDFRKDFQFYKVREINNYHHAHDAYLNAVVGTALIKKYPKLESEFVYGDYKVYDVRKMIAKSEQEIGKATAKYFFYSNIMNFFKTEITLANGEIRKRPLIETNGETGEIVWDKGRDFATVRKVLSMPQVNIVKKTEVQTGGFSKESILPKRNSDKLIARKKDWDPKKYGGFDSPTVAYSVLVVAKVEKGKSKKLKSVKELLGITIMERSSFEKNPIDFLEAKGYKEVKKDLIIKLPKYSLFELENGRKRMLASAGELQKGNELALPSKYVNFLYLASHYEKLKGSPEDNEQKQLFVEQHKHYLDEIIEQISEFSKRVILADANLDKVLSAYNKHRDKPIREQAENIIHLFTLTNLGAPAAFKYFDTTIDRKRYTSTKEVLDATLIHQSITGLYETRIDLSQLGGDGGGSSGGGPAPGGTLNIEDEHRLHETSKEPDVSLGSTWLSDFPQAWAETGGMGLAVRQAPLIIPLKATSTPVSIKQYPMSQEARLGIKPHIQRLLDQGILVPCQSPWNTPLLPVKKPGTNDYRPVQDLREVNKRVEDIHPTVPNPYNLLSGLPPSHQWYTVLDLKDAFFCLRLHPTSQPLFAFEWRDPEMGISGQLTWTRLPQGFKNSPTLFNEALHRDLADFRIQHPDLILLQYVDDLLLAATSELDCQQGTRALLQTLGNLGYRASAKKAQICQKQVKYLGYLLKEGQRWLTEARKETVMGQPTPKTPRQLREFLGKAGFCRLFIPGFAEMAAPLYPLTKPGTLFNWGPDQQKAYQEIKQALLTAPALGLPDLTKPFELFVDEKQGYAKGVLTQKLGPWRRPVAYLSKKLDPVAAGWPPCLRMVAAIAVLTKDAGKLTMGQPLVILAPHAVEALVKQPPDRWLSNARMTHYQALLLDTDRVQFGPVVALNPATLLPLPEEGLQHNCLDILAEAHGTRPDLTDQPLPDADHTWYTDGSSLLQEGQRKAGAAVTTETEVIWAKALPAGTSAQRAELIALTQALKMAEGKKLNVYTDSRYAFATAHIHGEIYRRRGWLTSEGKEIKNKDEILALLKALFLPKRLSIIHCPGHQKGHSAEARGNRMADQAARKAAITETPDTSTLLAGKRTADGSEFEKRTADGSEFESPKKKAKVE

SEQ ID NO: 3057 - protein, 2096 aa, synthetic construct; identical to SEQ ID NO: 2810

SEQ ID NO: 3058 - protein, 2091 aa, synthetic construct
MPAAKRVKLDGGDKKYSIGLDIGTNSVGWAVITDEYKVPSKKFKVLGNTDRHSIKKNLIGALLFDSGETAEATRLKRTARRRYTRRKNRICYLQEIFSNEMAKVDDSFFHRLEESFLVEEDKKHERHPIFGNIVDEVAYHEKYPTIYHLRKKLVDSTDKADLRLIYLALAHMIKFRGHFLIEGDLNPDNSDVDKLFIQLVQTYNQLFEENPINASGVDAKAILSARLSKSRRLENLIAQLPGEKKNGLFGNLIALSLGLTPNFKSNFDLAEDAKLQLSKDTYDDDLDNLLAQIGDQYADLFLAAKNLSDAILLSDILRVNTEITKAPLSASMIKRYDEHHQDLTLLKALVRQQLPEKYKEIFFDQSKNGYAGYIDGGASQEEFYKFIKPILEKMDGTEELLVKLNREDLLRKQRTFDNGSIPHQIHLGELHAILRRQEDFYPFLKDNREKIEKILTFRIPYYVGPLARGNSRFAWMTRKSEETITPWNFEEVVDKGASAQSFIERMTNFDKNLPNEKVLPKHSLLYEYFTVYNELTKVKYVTEGMRKPAFLSGEQKKAIVDLLFKTNRKVTVKQLKEDYFKKIECFDSVEISGVEDRFNASLGTYHDLLKIIKDKDFLDNEENEDILEDIVLTLTLFEDREMIEERLKTYAHLFDDKVMKQLKRRRYTGWGRLSRKLINGIRDKQSGKTILDFLKSDGFANRNFMQLIHDDSLTFKEDIQKAQVSGQGDSLHEHIANLAGSPAIKKGILQTVKVVDELVKVMGRHKPENIVIEMARENQTTQKGQKNSRERMKRIEEGIKELGSQILKEHPVENTQLQNEKLYLYYLQNGRDMYVDQELDINRLSDYDVDHIVPQSFLKDDSIDNKVLTRSDKARGKSDNVPSEEVVKKMKNYWRQLLNAKLITQRKFDNLTKAERGGLSELDKAGFIKRQLVETRQITKHVAQILDSRMNTKYDENDKLIREVKVITLKSKLVSDFRKDFQFYKVREINNYHHAHDAYLNAVVGTALIKKYPKLESEFVYGDYKVYDVRKMIAKSEQEIGKATAKYFFYSNIMNFFKTEITLANGEIRKRPLIETNGETGEIVWDKGRDFATVRKVLSMPQVNIVKKTEVQTGGFSKESILPKRNSDKLIARKKDWDPKKYGGFDSPTVAYSVLVVAKVEKGKSKKLKSVKELLGITIMERSSFEKNPIDFLEAKGYKEVKKDLIIKLPKYSLFELENGRKRMLASAGELQKGNELALPSKYVNFLYLASHYEKLKGSPEDNEQKQLFVEQHKHYLDEIIEQISEFSKRVILADANLDKVLSAYNKHRDKPIREQAENIIHLFTLTNLGAPAAFKYFDTTIDRKRYTSTKEVLDATLIHQSITGLYETRIDLSQLGGDGGGSSGGGGGTLNIEDEHRLHETSKEPDVSLGSTWLSDFPQAWAETGGMGLAVRQAPLIIPLKATSTPVSIKQYPMSQEARLGIKPHIQRLLDQGILVPCQSPWNTPLLPVKKPGTNDYRPVQDLREVNKRVEDIHPTVPNPYNLLSGLPPSHQWYTVLDLKDAFFCLRLHPTSQPLFAFEWRDPEMGISGQLTWTRLPQGFKNSPTLFNEALHRDLADFRIQHPDLILLQYVDDLLLAATSELDCQQGTRALLQTLGNLGYRASAKKAQICQKQVKYLGYLLKEGQRWLTEARKETVMGQPTPKTPRQLREFLGKAGFCRLFIPGFAEMAAPLYPLTKPGTLFNWGPDQQKAYQEIKQALLTAPALGLPDLTKPFELFVDEKQGYAKGVLTQKLGPWRRPVAYLSKKLDPVAAGWPPCLRMVAAIAVLTKDAGKLTMGQPLVILAPHAVEALVKQPPDRWLSNARMTHYQALLLDTDRVQFGPVVALNPATLLPLPEEGLQHNCLDILAEAHGTRPDLTDQPLPDADHTWYTDGSSLLQEGQRKAGAAVTTETEVIWAKALPAGTSAQRAELIALTQALKMAEGKKLNVYTDSRYAFATAHIHGEIYRRRGWLTSEGKEIKNKDEILALLKALFLPKRLSIIHCPGHQKGHSAEARGNRMADQAARKAAITETPDTSTLLAGKRTADGSEFEKRTADGSEFESPKKKAKVE

SEQ ID NO: 3059 - protein, 2094 aa, synthetic construct; identical to SEQ ID NO: 2804

SEQ ID NO: 3060 - protein, 2091 aa, synthetic construct
MPAAKRVKLDGGDKKYSIGLDIGTNSVGWAVITDEYKVPSKKFKVLGNTDRHSIKKNLIGALLFDSGETAEATRLKRTARRRYTRRKNRICYLQEIFSNEMAKVDDSFFHRLEESFLVEEDKKHERHPIFGNIVDEVAYHEKYPTIYHLRKKLVDSTDKADLRLIYLALAHMIKFRGHFLIEGDLNPDNSDVDKLFIQLVQTYNQLFEENPINASGVDAKAILSARLSKSRRLENLIAQLPGEKKNGLFGNLIALSLGLTPNFKSNFDLAEDAKLQLSKDTYDDDLDNLLAQIGDQYADLFLAAKNLSDAILLSDILRVNTEITKAPLSASMIKRYDEHHQDLTLLKALVRQQLPEKYKEIFFDQSKNGYAGYIDGGASQEEFYKFIKPILEKMDGTEELLVKLNREDLLRKQRTFDNGSIPHQIHLGELHAILRRQEDFYPFLKDNREKIEKILTFRIPYYVGPLARGNSRFAWMTRKSEETITPWNFEEVVDKGASAQSFIERMTNFDKNLPNEKVLPKHSLLYEYFTVYNELTKVKYVTEGMRKPAFLSGEQKKAIVDLLFKTNRKVTVKQLKEDYFKKIECFDSVEISGVEDRFNASLGTYHDLLKIIKDKDFLDNEENEDILEDIVLTLTLFEDREMIEERLKTYAHLFDDKVMKQLKRRRYTGWGRLSRKLINGIRDKQSGKTILDFLKSDGFANRNFMQLIHDDSLTFKEDIQKAQVSGQGDSLHEHIANLAGSPAIKKGILQTVKVVDELVKVMGRHKPENIVIEMARENQTTQKGQKNSRERMKRIEEGIKELGSQILKEHPVENTQLQNEKLYLYYLQNGRDMYVDQELDINRLSDYDVDHIVPQSFLKDDSIDNKVLTRSDKARGKSDNVPSEEVVKKMKNYWRQLLNAKLITQRKFDNLTKAERGGLSELDKAGFIKRQLVETRQITKHVAQILDSRMNTKYDENDKLIREVKVITLKSKLVSDFRKDFQFYKVREINNYHHAHDAYLNAVVGTALIKKYPKLESEFVYGDYKVYDVRKMIAKSEQEIGKATAKYFFYSNIMNFFKTEITLANGEIRKRPLIETNGETGEIVWDKGRDFATVRKVLSMPQVNIVKKTEVQTGGFSKESILPKRNSDKLIARKKDWDPKKYGGFDSPTVAYSVLVVAKVEKGKSKKLKSVKELLGITIMERSSFEKNPIDFLEAKGYKEVKKDLIIKLPKYSLFELENGRKRMLASAGELQKGNELALPSKYVNFLYLASHYEKLKGSPEDNEQKQLFVEQHKHYLDEIIEQISEFSKRVILADANLDKVLSAYNKHRDKPIREQAENIIHLFTLTNLGAPAAFKYFDTTIDRKRYTSTKEVLDATLIHQSITGLYETRIDLSQLGGDGGPAPGGSGGTLNIEDEHRLHETSKEPDVSLGSTWLSDFPQAWAETGGMGLAVRQAPLIIPLKATSTPVSIKQYPMSQEARLGIKPHIQRLLDQGILVPCQSPWNTPLLPVKKPGTNDYRPVQDLREVNKRVEDIHPTVPNPYNLLSGLPPSHQWYTVLDLKDAFFCLRLHPTSQPLFAFEWRDPEMGISGQLTWTRLPQGFKNSPTLFNEALHRDLADFRIQHPDLILLQYVDDLLLAATSELDCQQGTRALLQTLGNLGYRASAKKAQICQKQVKYLGYLLKEGQRWLTEARKETVMGQPTPKTPRQLREFLGKAGFCRLFIPGFAEMAAPLYPLTKPGTLFNWGPDQQKAYQEIKQALLTAPALGLPDLTKPFELFVDEKQGYAKGVLTQKLGPWRRPVAYLSKKLDPVAAGWPPCLRMVAAIAVLTKDAGKLTMGQPLVILAPHAVEALVKQPPDRWLSNARMTHYQALLLDTDRVQFGPVVALNPATLLPLPEEGLQHNCLDILAEAHGTRPDLTDQPLPDADHTWYTDGSSLLQEGQRKAGAAVTTETEVIWAKALPAGTSAQRAELIALTQALKMAEGKKLNVYTDSRYAFATAHIHGEIYRRRGWLTSEGKEIKNKDEILALLKALFLPKRLSIIHCPGHQKGHSAEARGNRMADQAARKAAITETPDTSTLLAGKRTADGSEFEKRTADGSEFESPKKKAKVE

SEQ ID NO: 3061 - protein, 2093 aa, synthetic construct
MPAAKRVKLDGGDKKYSIGLDIGTNSVGWAVITDEYKVPSKKFKVLGNTDRHSIKKNLIGALLFDSGETAEATRLKRTARRRYTRRKNRICYLQEIFSNEMAKVDDSFFHRLEESFLVEEDKKHERHPIFGNIVDEVAYHEKYPTIYHLRKKLVDSTDKADLRLIYLALAHMIKFRGHFLIEGDLNPDNSDVDKLFIQLVQTYNQLFEENPINASGVDAKAILSARLSKSRRLENLIAQLPGEKKNGLFGNLIALSLGLTPNFKSNFDLAEDAKLQLSKDTYDDDLDNLLAQIGDQYADLFLAAKNLSDAILLSDILRVNTEITKAPLSASMIKRYDEHHQDLTLLKALVRQQLPEKYKEIFFDQSKNGYAGYIDGGASQEEFYKFIKPILEKMDGTEELLVKLNREDLLRKQRTFDNGSIPHQIHLGELHAILRRQEDFYPFLKDNREKIEKILTFRIPYYVGPLARGNSRFAWMTRKSEETITPWNFEEVVDKGASAQSFIERMTNFDKNLPNEKVLPKHSLLYEYFTVYNELTKVKYVTEGMRKPAFLSGEQKKAIVDLLFKTNRKVTVKQLKEDYFKKIECFDSVEISGVEDRFNASLGTYHDLLKIIKDKDFLDNEENEDILEDIVLTLTLFEDREMIEERLKTYAHLFDDKVMKQLKRRRYTGWGRLSRKLINGIRDKQSGKTILDFLKSDGFANRNFMQLIHDDSLTFKEDIQKAQVSGQGDSLHEHIANLAGSPAIKKGILQTVKVVDELVKVMGRHKPENIVIEMARENQTTQKGQKNSRERMKRIEEGIKELGSQILKEHPVENTQLQNEKLYLYYLQNGRDMYVDQELDINRLSDYDVDHIVPQSFLKDDSIDNKVLTRSDKARGKSDNVPSEEVVKKMKNYWRQLLNAKLITQRKFDNLTKAERGGLSELDKAGFIKRQLVETRQITKHVAQILDSRMNTKYDENDKLIREVKVITLKSKLVSDFRKDFQFYKVREINNYHHAHDAYLNAVVGTALIKKYPKLESEFVYGDYKVYDVRKMIAKSEQEIGKATAKYFFYSNIMNFFKTEITLANGEIRKRPLIETNGETGEIVWDKGRDFATVRKVLSMPQVNIVKKTEVQTGGFSKESILPKRNSDKLIARKKDWDPKKYGGFDSPTVAYSVLVVAKVEKGKSKKLKSVKELLGITIMERSSFEKNPIDFLEAKGYKEVKKDLIIKLPKYSLFELENGRKRMLASAGELQKGNELALPSKYVNFLYLASHYEKLKGSPEDNEQKQLFVEQHKHYLDEIIEQISEFSKRVILADANLDKVLSAYNKHRDKPIREQAENIIHLFTLTNLGAPAAFKYFDTTIDRKRYTSTKEVLDATLIHQSITGLYETRIDLSQLGGDGGPAPEAAAKGGTLNIEDEHRLHETSKEPDVSLGSTWLSDFPQAWAETGGMGLAVRQAPLIIPLKATSTPVSIKQYPMSQEARLGIKPHIQRLLDQGILVPCQSPWNTPLLPVKKPGTNDYRPVQDLREVNKRVEDIHPTVPNPYNLLSGLPPSHQWYTVLDLKDAFFCLRLHPTSQPLFAFEWRDPEMGISGQLTWTRLPQGFKNSPTLFNEALHRDLADFRIQHPDLILLQYVDDLLLAATSELDCQQGTRALLQTLGNLGYRASAKKAQICQKQVKYLGYLLKEGQRWLTEARKETVMGQPTPKTPRQLREFLGKAGFCRLFIPGFAEMAAPLYPLTKPGTLFNWGPDQQKAYQEIKQALLTAPALGLPDLTKPFELFVDEKQGYAKGVLTQKLGPWRRPVAYLSKKLDPVAAGWPPCLRMVAAIAVLTKDAGKLTMGQPLVILAPHAVEALVKQPPDRWLSNARMTHYQALLLDTDRVQFGPVVALNPATLLPLPEEGLQHNCLDILAEAHGTRPDLTDQPLPDADHTWYTDGSSLLQEGQRKAGAAVTTETEVIWAKALPAGTSAQRAELIALTQALKMAEGKKLNVYTDSRYAFATAHIHGEIYRRRGWLTSEGKEIKNKDEILALLKALFLPKRLSIIHCPGHQKGHSAEARGNRMADQAARKAAITETPDTSTLLAGKRTADGSEFEKRTADGSEFESPKKKAKVE

SEQ ID NO: 3062 - protein, 2093 aa, synthetic construct; identical to SEQ ID NO: 2828

SEQ ID NO: 3063 - protein, 2105 aa, synthetic construct
MPAAKRVKLDGGDKKYSIGLDIGTNSVGWAVITDEYKVPSKKFKVLGNTDRHSIKKNLIGALLFDSGETAEATRLKRTARRRYTRRKNRICYLQEIFSNEMAKVDDSFFHRLEESFLVEEDKKHERHPIFGNIVDEVAYHEKYPTIYHLRKKLVDSTDKADLRLIYLALAHMIKFRGHFLIEGDLNPDNSDVDKLFIQLVQTYNQLFEENPINASGVDAKAILSARLSKSRRLENLIAQLPGEKKNGLFGNLIALSLGLTPNFKSNFDLAEDAKLQLSKDTYDDDLDNLLAQIGDQYADLFLAAKNLSDAILLSDILRVNTEITKAPLSASMIKRYDEHHQDLTLLKALVRQQLPEKYKEIFFDQSKNGYAGYIDGGASQEEFYKFIKPILEKMDGTEELLVKLNREDLLRKQRTFDNGSIPHQIHLGELHAILRRQEDFYPFLKDNREKIEKILTFRIPYYVGPLARGNSRFAWMTRKSEETITPWNFEEVVDKGASAQSFIERMTNFDKNLPNEKVLPKHSLLYEYFTVYNELTKVKYVTEGMRKPAFLSGEQKKAIVDLLFKTNRKVTVKQLKEDYFKKIECFDSVEISGVEDRFNASLGTYHDLLKIIKDKDFLDNEENEDILEDIVLTLTLFEDREMIEERLKTYAHLFDDKVMKQLKRRRYTGWGRLSRKLINGIRDKQSGKTILDFLKSDGFANRNFMQLIHDDSLTFKEDIQKAQVSGQGDSLHEHIANLAGSPAIKKGILQTVKVVDELVKVMGRHKPENIVIEMARENQTTQKGQKNSRERMKRIEEGIKELGSQILKEHPVENTQLQNEKLYLYYLQNGRDMYVDQELDINRLSDYDVDHIVPQSFLKDDSIDNKVLTRSDKARGKSDNVPSEEVVKKMKNYWRQLLNAKLITQRKFDNLTKAERGGLSELDKAGFIKRQLVETRQITKHVAQILDSRMNTKYDENDKLIREVKVITLKSKLVSDFRKDFQFYKVREINNYHHAHDAYLNAVVGTALIKKYPKLESEFVYGDYKVYDVRKMIAKSEQEIGKATAKYFFYSNIMNFFKTEITLANGEIRKRPLIETNGETGEIVWDKGRDFATVRKVLSMPQVNIVKKTEVQTGGFSKESILPKRNSDKLIARKKDWDPKKYGGFDSPTVAYSVLVVAKVEKGKSKKLKSVKELLGITIMERSSFEKNPIDFLEAKGYKEVKKDLIIKLPKYSLFELENGRKRMLASAGELQKGNELALPSKYVNFLYLASHYEKLKGSPEDNEQKQLFVEQHKHYLDEIIEQISEFSKRVILADANLDKVLSAYNKHRDKPIREQAENIIHLFTLTNLGAPAAFKYFDTTIDRKRYTSTKEVLDATLIHQSITGLYETRIDLSQLGGDGGGGGGSGGGGSGGGGSGGGGSGGTLNIEDEHRLHETSKEPDVSLGSTWLSDFPQAWAETGGMGLAVRQAPLIIPLKATSTPVSIKQYPMSQEARLGIKPHIQRLLDQGILVPCQSPWNTPLLPVKKPGTNDYRPVQDLREVNKRVEDIHPTVPNPYNLLSGLPPSHQWYTVLDLKDAFFCLRLHPTSQPLFAFEWRDPEMGISGQLTWTRLPQGFKNSPTLFNEALHRDLADFRIQHPDLILLQYVDDLLLAATSELDCQQGTRALLQTLGNLGYRASAKKAQICQKQVKYLGYLLKEGQRWLTEARKETVMGQPTPKTPRQLREFLGKAGFCRLFIPGFAEMAAPLYPLTKPGTLFNWGPDQQKAYQEIKQALLTAPALGLPDLTKPFELFVDEKQGYAKGVLTQKLGPWRRPVAYLSKKLDPVAAGWPPCLRMVAAIAVLTKDAGKLTMGQPLVILAPHAVEALVKQPPDRWLSNARMTHYQALLLDTDRVQFGPVVALNPATLLPLPEEGLQHNCLDILAEAHGTRPDLTDQPLPDADHTWYTDGSSLLQEGQRKAGAAVTTETEVIWAKALPAGTSAQRAELIALTQALKMAEGKKLNVYTDSRYAFATAHIHGEIYRRRGWLTSEGKEIKNKDEILALLKALFLPKRLSIIHCPGHQKGHSAEARGNRMADQAARKAAITETPDTSTLLAGKRTADGSEFEKRTADGSEFESPKKKAKVE

SEQ ID NO: 3064 - protein, 2094 aa, synthetic construct
MPAAKRVKLDGGDKKYSIGLDIGTNSVGWAVITDEYKVPSKKFKVLGNTDRHSIKKNLIGALLFDSGETAEATRLKRTARRRYTRRKNRICYLQEIFSNEMAKVDDSFFHRLEESFLVEEDKKHERHPIFGNIVDEVAYHEKYPTIYHLRKKLVDSTDKADLRLIYLALAHMIKFRGHFLIEGDLNPDNSDVDKLFIQLVQTYNQLFEENPINASGVDAKAILSARLSKSRRLENLIAQLPGEKKNGLFGNLIALSLGLTPNFKSNFDLAEDAKLQLSKDTYDDDLDNLLAQIGDQYADLFLAAKNLSDAILLSDILRVNTEITKAPLSASMIKRYDEHHQDLTLLKALVRQQLPEKYKEIFFDQSKNGYAGYIDGGASQEEFYKFIKPILEKMDGTEELLVKLNREDLLRKQRTFDNGSIPHQIHLGELHAILRRQEDFYPFLKDNREKIEKILTFRIPYYVGPLARGNSRFAWMTRKSEETITPWNFEEVVDKGASAQSFIERMTNFDKNLPNEKVLPKHSLLYEYFTVYNELTKVKYVTEGMRKPAFLSGEQKKAIVDLLFKTNRKVTVKQLKEDYFKKIECFDSVEISGVEDRFNASLGTYHDLLKIIKDKDFLDNEENEDILEDIVLTLTLFEDREMIEERLKTYAHLFDDKVMKQLKRRRYTGWGRLSRKLINGIRDKQSGKTILDFLKSDGFANRNFMQLIHDDSLTFKEDIQKAQVSGQGDSLHEHIANLAGSPAIKKGILQTVKVVDELVKVMGRHKPENIVIEMARENQTTQKGQKNSRERMKRIEEGIKELGSQILKEHPVENTQLQNEKLYLYYLQNGRDMYVDQELDINRLSDYDVDHIVPQSFLKDDSIDNKVLTRSDKARGKSDNVPSEEVVKKMKNYWRQLLNAKLITQRKFDNLTKAERGGLSELDKAGFIKRQLVETRQITKHVAQILDSRMNTKYDENDKLIREVKVITLKSKLVSDFRKDFQFYKVREINNYHHAHDAYLNAVVGTALIKKYPKLESEFVYGDYKVYDVRKMIAKSEQEIGKATAKYFFYSNIMNFFKTEITLANGEIRKRPLIETNGETGEIVWDKGRDFATVRKVLSMPQVNIVKKTEVQTGGFSKESILPKRNSDKLIARKKDWDPKKYGGFDSPTVAYSVLVVAKVEKGKSKKLKSVKELLGITIMERSSFEKNPIDFLEAKGYKEVKKDLIIKLPKYSLFELENGRKRMLASAGELQKGNELALPSKYVNFLYLASHYEKLKGSPEDNEQKQLFVEQHKHYLDEIIEQISEFSKRVILADANLDKVLSAYNKHRDKPIREQAENIIHLFTLTNLGAPAAFKYFDTTIDRKRYTSTKEVLDATLIHQSITGLYETRIDLSQLGGDGGPAPGGSGSSGGTLNIEDEHRLHETSKEPDVSLGSTWLSDFPQAWAETGGMGLAVRQAPLIIPLKATSTPVSIKQYPMSQEARLGIKPHIQRLLDQGILVPCQSPWNTPLLPVKKPGTNDYRPVQDLREVNKRVEDIHPTVPNPYNLLSGLPPSHQWYTVLDLKDAFFCLRLHPTSQPLFAFEWRDPEMGISGQLTWTRLPQGFKNSPTLFNEALHRDLADFRIQHPDLILLQYVDDLLLAATSELDCQQGTRALLQTLGNLGYRASAKKAQICQKQVKYLGYLLKEGQRWLTEARKETVMGQPTPKTPRQLREFLGKAGFCRLFIPGFAEMAAPLYPLTKPGTLFNWGPDQQKAYQEIKQALLTAPALGLPDLTKPFELFVDEKQGYAKGVLTQKLGPWRRPVAYLSKKLDPVAAGWPPCLRMVAAIAVLTKDAGKLTMGQPLVILAPHAVEALVKQPPDRWLSNARMTHYQALLLDTDRVQFGPVVALNPATLLPLPEEGLQHNCLDILAEAHGTRPDLTDQPLPDADHTWYTDGSSLLQEGQRKAGAAVTTETEVIWAKALPAGTSAQRAELIALTQALKMAEGKKLNVYTDSRYAFATAHIHGEIYRRRGWLTSEGKEIKNKDEILALLKALFLPKRLSIIHCPGHQKGHSAEARGNRMADQAARKAAITETPDTSTLLAGKRTADGSEFEKRTADGSEFESPKKKAKVE

SEQ ID NO: 3065 - protein, 2090 aa, synthetic construct; identical to SEQ ID NO: 2825

SEQ ID NO: 3066 - protein, 2090 aa, synthetic construct
MPAAKRVKLDGGDKKYSIGLDIGTNSVGWAVITDEYKVPSKKFKVLGNTDRHSIKKNLIGALLFDSGETAEATRLKRTARRRYTRRKNRICYLQEIFSNEMAKVDDSFFHRLEESFLVEEDKKHERHPIFGNIVDEVAYHEKYPTIYHLRKKLVDSTDKADLRLIYLALAHMIKFRGHFLIEGDLNPDNSDVDKLFIQLVQTYNQLFEENPINASGVDAKAILSARLSKSRRLENLIAQLPGEKKNGLFGNLIALSLGLTPNFKSNFDLAEDAKLQLSKDTYDDDLDNLLAQIGDQYADLFLAAKNLSDAILLSDILRVNTEITKAPLSASMIKRYDEHHQDLTLLKALVRQQLPEKYKEIFFDQSKNGYAGYIDGGASQEEFYKFIKPILEKMDGTEELLVKLNREDLLRKQRTFDNGSIPHQIHLGELHAILRRQEDFYPFLKDNREKIEKILTFRIPYYVGPLARGNSRFAWMTRKSEETITPWNFEEVVDKGASAQSFIERMTNFDKNLPNEKVLPKHSLLYEYFTVYNELTKVKYVTEGMRKPAFLSGEQKKAIVDLLFKTNRKVTVKQLKEDYFKKIECFDSVEISGVEDRFNASLGTYHDLLKIIKDKDFLDNEENEDILEDIVLTLTLFEDREMIEERLKTYAHLFDDKVMKQLKRRRYTGWGRLSRKLINGIRDKQSGKTILDFLKSDGFANRNFMQLIHDDSLTFKEDIQKAQVSGQGDSLHEHIANLAGSPAIKKGILQTVKVVDELVKVMGRHKPENIVIEMARENQTTQKGQKNSRERMKRIEEGIKELGSQILKEHPVENTQLQNEKLYLYYLQNGRDMYVDQELDINRLSDYDVDHIVPQSFLKDDSIDNKVLTRSDKARGKSDNVPSEEVVKKMKNYWRQLLNAKLITQRKFDNLTKAERGGLSELDKAGFIKRQLVETRQITKHVAQILDSRMNTKYDENDKLIREVKVITLKSKLVSDFRKDFQFYKVREINNYHHAHDAYLNAVVGTALIKKYPKLESEFVYGDYKVYDVRKMIAKSEQEIGKATAKYFFYSNIMNFFKTEITLANGEIRKRPLIETNGETGEIVWDKGRDFATVRKVLSMPQVNIVKKTEVQTGGFSKESILPKRNSDKLIARKKDWDPKKYGGFDSPTVAYSVLVVAKVEKGKSKKLKSVKELLGITIMERSSFEKNPIDFLEAKGYKEVKKDLIIKLPKYSLFELENGRKRMLASAGELQKGNELALPSKYVNFLYLASHYEKLKGSPEDNEQKQLFVEQHKHYLDEIIEQISEFSKRVILADANLDKVLSAYNKHRDKPIREQAENIIHLFTLTNLGAPAAFKYFDTTIDRKRYTSTKEVLDATLIHQSITGLYETRIDLSQLGGDGGPAPAPGGTLNIEDEHRLHETSKEPDVSLGSTWLSDFPQAWAETGGMGLAVRQAPLIIPLKATSTPVSIKQYPMSQEARLGIKPHIQRLLDQGILVPCQSPWNTPLLPVKKPGTNDYRPVQDLREVNKRVEDIHPTVPNPYNLLSGLPPSHQWYTVLDLKDAFFCLRLHPTSQPLFAFEWRDPEMGISGQLTWTRLPQGFKNSPTLFNEALHRDLADFRIQHPDLILLQYVDDLLLAATSELDCQQGTRALLQTLGNLGYRASAKKAQICQKQVKYLGYLLKEGQRWLTEARKETVMGQPTPKTPRQLREFLGKAGFCRLFIPGFAEMAAPLYPLTKPGTLFNWGPDQQKAYQEIKQALLTAPALGLPDLTKPFELFVDEKQGYAKGVLTQKLGPWRRPVAYLSKKLDPVAAGWPPCLRMVAAIAVLTKDAGKLTMGQPLVILAPHAVEALVKQPPDRWLSNARMTHYQALLLDTDRVQFGPVVALNPATLLPLPEEGLQHNCLDILAEAHGTRPDLTDQPLPDADHTWYTDGSSLLQEGQRKAGAAVTTETEVIWAKALPAGTSAQRAELIALTQALKMAEGKKLNVYTDSRYAFATAHIHGEIYRRRGWLTSEGKEIKNKDEILALLKALFLPKRLSIIHCPGHQKGHSAEARGNRMADQAARKAAITETPDTSTLLAGKRTADGSEFEKRTADGSEFESPKKKAKVE

SEQ ID NO: 3067 - protein, 2096 aa, synthetic construct; identical to SEQ ID NO: 2787

SEQ ID NO: 3068 - protein, 2096 aa, synthetic construct
MPAAKRVKLDGGDKKYSIGLDIGTNSVGWAVITDEYKVPSKKFKVLGNTDRHSIKKNLIGALLFDSGETAEATRLKRTARRRYTRRKNRICYLQEIFSNEMAKVDDSFFHRLEESFLVEEDKKHERHPIFGNIVDEVAYHEKYPTIYHLRKKLVDSTDKADLRLIYLALAHMIKFRGHFLIEGDLNPDNSDVDKLFIQLVQTYNQLFEENPINASGVDAKAILSARLSKSRRLENLIAQLPGEKKNGLFGNLIALSLGLTPNFKSNFDLAEDAKLQLSKDTYDDDLDNLLAQIGDQYADLFLAAKNLSDAILLSDILRVNTEITKAPLSASMIKRYDEHHQDLTLLKALVRQQLPEKYKEIFFDQSKNGYAGYIDGGASQEEFYKFIKPILEKMDGTEELLVKLNREDLLRKQRTFDNGSIPHQIHLGELHAILRRQEDFYPFLKDNREKIEKILTFRIPYYVGPLARGNSRFAWMTRKSEETITPWNFEEVVDKGASAQSFIERMTNFDKNLPNEKVLPKHSLLYEYFTVYNELTKVKYVTEGMRKPAFLSGEQKKAIVDLLFKTNRKVTVKQLKEDYFKKIECFDSVEISGVEDRFNASLGTYHDLLKIIKDKDFLDNEENEDILEDIVLTLTLFEDREMIEERLKTYAHLFDDKVMKQLKRRRYTGWGRLSRKLINGIRDKQSGKTILDFLKSDGFANRNFMQLIHDDSLTFKEDIQKAQVSGQGDSLHEHIANLAGSPAIKKGILQTVKVVDELVKVMGRHKPENIVIEMARENQTTQKGQKNSRERMKRIEEGIKELGSQILKEHPVENTQLQNEKLYLYYLQNGRDMYVDQELDINRLSDYDVDHIVPQSFLKDDSIDNKVLTRSDKARGKSDNVPSEEVVKKMKNYWRQLLNAKLITQRKFDNLTKAERGGLSELDKAGFIKRQLVETRQITKHVAQILDSRMNTKYDENDKLIREVKVITLKSKLVSDFRKDFQFYKVREINNYHHAHDAYLNAVVGTALIKKYPKLESEFVYGDYKVYDVRKMIAKSEQEIGKATAKYFFYSNIMNFFKTEITLANGEIRKRPLIETNGETGEIVWDKGRDFATVRKVLSMPQVNIVKKTEVQTGGFSKESILPKRNSDKLIARKKDWDPKKYGGFDSPTVAYSVLVVAKVEKGKSKKLKSVKELLGITIMERSSFEKNPIDFLEAKGYKEVKKDLIIKLPKYSLFELENGRKRMLASAGELQKGNELALPSKYVNFLYLASHYEKLKGSPEDNEQKQLFVEQHKHYLDEIIEQISEFSKRVILADANLDKVLSAYNKHRDKPIREQAENIIHLFTLTNLGAPAAFKYFDTTIDRKRYTSTKEVLDATLIHQSITGLYETRIDLSQLGGDGGPAPEAAAKGGGGGTLNIEDEHRLHETSKEPDVSLGSTWLSDFPQAWAETGGMGLAVRQAPLIIPLKATSTPVSIKQYPMSQEARLGIKPHIQRLLDQGILVPCQSPWNTPLLPVKKPGTNDYRPVQDLREVNKRVEDIHPTVPNPYNLLSGLPPSHQWYTVLDLKDAFFCLRLHPTSQPLFAFEWRDPEMGISGQLTWTRLPQGFKNSPTLFNEALHRDLADFRIQHPDLILLQYVDDLLLAATSELDCQQGTRALLQTLGNLGYRASAKKAQICQKQVKYLGYLLKEGQRWLTEARKETVMGQPTPKTPRQLREFLGKAGFCRLFIPGFAEMAAPLYPLTKPGTLFNWGPDQQKAYQEIKQALLTAPALGLPDLTKPFELFVDEKQGYAKGVLTQKLGPWRRPVAYLSKKLDPVAAGWPPCLRMVAAIAVLTKDAGKLTMGQPLVILAPHAVEALVKQPPDRWLSNARMTHYQALLLDTDRVQFGPVVALNPATLLPLPEEGLQHNCLDILAEAHGTRPDLTDQPLPDADHTWYTDGSSLLQEGQRKAGAAVTTETEVIWAKALPAGTSAQRAELIALTQALKMAEGKKLNVYTDSRYAFATAHIHGEIYRRRGWLTSEGKEIKNKDEILALLKALFLPKRLSIIHCPGHQKGHSAEARGNRMADQAARKAAITETPDTSTLLAGKRTADGSEFEKRTADGSEFESPKKKAKVE

SEQ ID NO: 3069 - protein, 2088 aa, synthetic construct
MPAAKRVKLDGGDKKYSIGLDIGTNSVGWAVITDEYKVPSKKFKVLGNTDRHSIKKNLIGALLFDSGETAEATRLKRTARRRYTRRKNRICYLQEIFSNEMAKVDDSFFHRLEESFLVEEDKKHERHPIFGNIVDEVAYHEKYPTIYHLRKKLVDSTDKADLRLIYLALAHMIKFRGHFLIEGDLNPDNSDVDKLFIQLVQTYNQLFEENPINASGVDAKAILSARLSKSRRLENLIAQLPGEKKNGLFGNLIALSLGLTPNFKSNFDLAEDAKLQLSKDTYDDDLDNLLAQIGDQYADLFLAAKNLSDAILLSDILRVNTEITKAPLSASMIKRYDEHHQDLTLLKALVRQQLPEKYKEIFFDQSKNGYAGYIDGGASQEEFYKFIKPILEKMDGTEELLVKLNREDLLRKQRTFDNGSIPHQIHLGELHAILRRQEDFYPFLKDNREKIEKILTFRIPYYVGPLARGNSRFAWMTRKSEETITPWNFEEVVDKGASAQSFIERMTNFDKNLPNEKVLPKHSLLYEYFTVYNELTKVKYVTEGMRKPAFLSGEQKKAIVDLLFKTNRKVTVKQLKEDYFKKIECFDSVEISGVEDRFNASLGTYHDLLKIIKDKDFLDNEENEDILEDIVLTLTLFEDREMIEERLKTYAHLFDDKVMKQLKRRRYTGWGRLSRKLINGIRDKQSGKTILDFLKSDGFANRNFMQLIHDDSLTFKEDIQKAQVSGQGDSLHEHIANLAGSPAIKKGILQTVKVVDELVKVMGRHKPENIVIEMARENQTTQKGQKNSRERMKRIEEGIKELGSQILKEHPVENTQLQNEKLYLYYLQNGRDMYVDQELDINRLSDYDVDHIVPQSFLKDDSIDNKVLTRSDKARGKSDNVPSEEVVKKMKNYWRQLLNAKLITQRKFDNLTKAERGGLSELDKAGFIKRQLVETRQITKHVAQILDSRMNTKYDENDKLIREVKVITLKSKLVSDFRKDFQFYKVREINNYHHAHDAYLNAVVGTALIKKYPKLESEFVYGDYKVYDVRKMIAKSEQEIGKATAKYFFYSNIMNFFKTEITLANGEIRKRPLIETNGETGEIVWDKGRDFATVRKVLSMPQVNIVKKTEVQTGGFSKESILPKRNSDKLIARKKDWDPKKYGGFDSPTVAYSVLVVAKVEKGKSKKLKSVKELLGITIMERSSFEKNPIDFLEAKGYKEVKKDLIIKLPKYSLFELENGRKRMLASAGELQKGNELALPSKYVNFLYLASHYEKLKGSPEDNEQKQLFVEQHKHYLDEIIEQISEFSKRVILADANLDKVLSAYNKHRDKPIREQAENIIHLFTLTNLGAPAAFKYFDTTIDRKRYTSTKEVLDATLIHQSITGLYETRIDLSQLGGDGGGSSGGTLNIEDEHRLHETSKEPDVSLGSTWLSDFPQAWAETGGMGLAVRQAPLIIPLKATSTPVSIKQYPMSQEARLGIKPHIQRLLDQGILVPCQSPWNTPLLPVKKPGTNDYRPVQDLREVNKRVEDIHPTVPNPYNLLSGLPPSHQWYTVLDLKDAFFCLRLHPTSQPLFAFEWRDPEMGISGQLTWTRLPQGFKNSPTLFNEALHRDLADFRIQHPDLILLQYVDDLLLAATSELDCQQGTRALLQTLGNLGYRASAKKAQICQKQVKYLGYLLKEGQRWLTEARKETVMGQPTPKTPRQLREFLGKAGFCRLFIPGFAEMAAPLYPLTKPGTLFNWGPDQQKAYQEIKQALLTAPALGLPDLTKPFELFVDEKQGYAKGVLTQKLGPWRRPVAYLSKKLDPVAAGWPPCLRMVAAIAVLTKDAGKLTMGQPLVILAPHAVEALVKQPPDRWLSNARMTHYQALLLDTDRVQFGPVVALNPATLLPLPEEGLQHNCLDILAEAHGTRPDLTDQPLPDADHTWYTDGSSLLQEGQRKAGAAVTTETEVIWAKALPAGTSAQRAELIALTQALKMAEGKKLNVYTDSRYAFATAHIHGEIYRRRGWLTSEGKEIKNKDEILALLKALFLPKRLSIIHCPGHQKGHSAEARGNRMADQAARKAAITETPDTSTLLAGKRTADGSEFEKRTADGSEFESPKKKAKVE

SEQ ID NO: 3070 - protein, 2094 aa, synthetic construct; identical to SEQ ID NO: 2809

SEQ ID NO: 3071 - protein, 2097 aa, synthetic construct; identical to SEQ ID NO: 2806

SEQ ID NO: 3072 - protein, 2096 aa, synthetic construct
MPAAKRVKLDGGDKKYSIGLDIGTNSVGWAVITDEYKVPSKKFKVLGNTDRHSIKKNLIGALLFDSGETAEATRLKRTARRRYTRRKNRICYLQEIFSNEMAKVDDSFFHRLEESFLVEEDKKHERHPIFGNIVDEVAYHEKYPTIYHLRKKLVDSTDKADLRLIYLALAHMIKFRGHFLIEGDLNPDNSDVDKLFIQLVQTYNQLFEENPINASGVDAKAILSARLSKSRRLENLIAQLPGEKKNGLFGNLIALSLGLTPNFKSNFDLAEDAKLQLSKDTYDDDLDNLLAQIGDQYADLFLAAKNLSDAILLSDILRVNTEITKAPLSASMIKRYDEHHQDLTLLKALVRQQLPEKYKEIFFDQSKNGYAGYIDGGASQEEFYKFIKPILEKMDGTEELLVKLNREDLLRKQRTFDNGSIPHQIHLGELHAILRRQEDFYPFLKDNREKIEKILTFRIPYYVGPLARGNSRFAWMTRKSEETITPWNFEEVVDKGASAQSFIERMTNFDKNLPNEKVLPKHSLLYEYFTVYNELTKVKYVTEGMRKPAFLSGEQKKAIVDLLFKTNRKVTVKQLKEDYFKKIECFDSVEISGVEDRFNASLGTYHDLLKIIKDKDFLDNEENEDILEDIVLTLTLFEDREMIEERLKTYAHLFDDKVMKQLKRRRYTGWGRLSRKLINGIRDKQSGKTILDFLKSDGFANRNFMQLIHDDSLTFKEDIQKAQVSGQGDSLHEHIANLAGSPAIKKGILQTVKVVDELVKVMGRHKPENIVIEMARENQTTQKGQKNSRERMKRIEEGIKELGSQILKEHPVENTQLQNEKLYLYYLQNGRDMYVDQELDINRLSDYDVDHIVPQSFLKDDSIDNKVLTRSDKARGKSDNVPSEEVVKKMKNYWRQLLNAKLITQRKFDNLTKAERGGLSELDKAGFIKRQLVETRQITKHVAQILDSRMNTKYDENDKLIREVKVITLKSKLVSDFRKDFQFYKVREINNYHHAHDAYLNAVVGTALIKKYPKLESEFVYGDYKVYDVRKMIAKSEQEIGKATAKYFFYSNIMNFFKTEITLANGEIRKRPLIETNGETGEIVWDKGRDFATVRKVLSMPQVNIVKKTEVQTGGFSKESILPKRNSDKLIARKKDWDPKKYGGFDSPTVAYSVLVVAKVEKGKSKKLKSVKELLGITIMERSSFEKNPIDFLEAKGYKEVKKDLIIKLPKYSLFELENGRKRMLASAGELQKGNELALPSKYVNFLYLASHYEKLKGSPEDNEQKQLFVEQHKHYLDEIIEQISEFSKRVILADANLDKVLSAYNKHRDKPIREQAENIIHLFTLTNLGAPAAFKYFDTTIDRKRYTSTKEVLDATLIHQSITGLYETRIDLSQLGGDGGGSSEAAAKGGGGGTLNIEDEHRLHETSKEPDVSLGSTWLSDFPQAWAETGGMGLAVRQAPLIIPLKATSTPVSIKQYPMSQEARLGIKPHIQRLLDQGILVPCQSPWNTPLLPVKKPGTNDYRPVQDLREVNKRVEDIHPTVPNPYNLLSGLPPSHQWYTVLDLKDAFFCLRLHPTSQPLFAFEWRDPEMGISGQLTWTRLPQGFKNSPTLFNEALHRDLADFRIQHPDLILLQYVDDLLLAATSELDCQQGTRALLQTLGNLGYRASAKKAQICQKQVKYLGYLLKEGQRWLTEARKETVMGQPTPKTPRQLREFLGKAGFCRLFIPGFAEMAAPLYPLTKPGTLFNWGPDQQKAYQEIKQALLTAPALGLPDLTKPFELFVDEKQGYAKGVLTQKLGPWRRPVAYLSKKLDPVAAGWPPCLRMVAAIAVLTKDAGKLTMGQPLVILAPHAVEALVKQPPDRWLSNARMTHYQALLLDTDRVQFGPVVALNPATLLPLPEEGLQHNCLDILAEAHGTRPDLTDQPLPDADHTWYTDGSSLLQEGQRKAGAAVTTETEVIWAKALPAGTSAQRAELIALTQALKMAEGKKLNVYTDSRYAFATAHIHGEIYRRRGWLTSEGKEIKNKDEILALLKALFLPKRLSIIHCPGHQKGHSAEARGNRMADQAARKAAITETPDTSTLLAGKRTADGSEFEKRTADGSEFESPKKKAKVE

SEQ ID NO: 3073 - protein, 2091 aa, synthetic construct
MPAAKRVKLDGGDKKYSIGLDIGTNSVGWAVITDEYKVPSKKFKVLGNTDRHSIKKNLIGALLFDSGETAEATRLKRTARRRYTRRKNRICYLQEIFSNEMAKVDDSFFHRLEESFLVEEDKKHERHPIFGNIVDEVAYHEKYPTIYHLRKKLVDSTDKADLRLIYLALAHMIKFRGHFLIEGDLNPDNSDVDKLFIQLVQTYNQLFEENPINASGVDAKAILSARLSKSRRLENLIAQLPGEKKNGLFGNLIALSLGLTPNFKSNFDLAEDAKLQLSKDTYDDDLDNLLAQIGDQYADLFLAAKNLSDAILLSDILRVNTEITKAPLSASMIKRYDEHHQDLTLLKALVRQQLPEKYKEIFFDQSKNGYAGYIDGGASQEEFYKFIKPILEKMDGTEELLVKLNREDLLRKQRTFDNGSIPHQIHLGELHAILRRQEDFYPFLKDNREKIEKILTFRIPYYVGPLARGNSRFAWMTRKSEETITPWNFEEVVDKGASAQSFIERMTNFDKNLPNEKVLPKHSLLYEYFTVYNELTKVKYVTEGMRKPAFLSGEQKKAIVDLLFKTNRKVTVKQLKEDYFKKIECFDSVEISGVEDRFNASLGTYHDLLKIIKDKDFLDNEENEDILEDIVLTLTLFEDREMIEERLKTYAHLFDDKVMKQLKRRRYTGWGRLSRKLINGIRDKQSGKTILDFLKSDGFANRNFMQLIHDDSLTFKEDIQKAQVSGQGDSLHEHIANLAGSPAIKKGILQTVKVVDELVKVMGRHKPENIVIEMARENQTTQKGQKNSRERMKRIEEGIKELGSQILKEHPVENTQLQNEKLYLYYLQNGRDMYVDQELDINRLSDYDVDHIVPQSFLKDDSIDNKVLTRSDKARGKSDNVPSEEVVKKMKNYWRQLLNAKLITQRKFDNLTKAERGGLSELDKAGFIKRQLVETRQITKHVAQILDSRMNTKYDENDKLIREVKVITLKSKLVSDFRKDFQFYKVREINNYHHAHDAYLNAVVGTALIKKYPKLESEFVYGDYKVYDVRKMIAKSEQEIGKATAKYFFYSNIMNFFKTEITLANGEIRKRPLIETNGETGEIVWDKGRDFATVRKVLSMPQVNIVKKTEVQTGGFSKESILPKRNSDKLIARKKDWDPKKYGGFDSPTVAYSVLVVAKVEKGKSKKLKSVKELLGITIMERSSFEKNPIDFLEAKGYKEVKKDLIIKLPKYSLFELENGRKRMLASAGELQKGNELALPSKYVNFLYLASHYEKLKGSPEDNEQKQLFVEQHKHYLDEIIEQISEFSKRVILADANLDKVLSAYNKHRDKPIREQAENIIHLFTLTNLGAPAAFKYFDTTIDRKRYTSTKEVLDATLIHQSITGLYETRIDLSQLGGDGGGGGPAPGGTLNIEDEHRLHETSKEPDVSLGSTWLSDFPQAWAETGGMGLAVRQAPLIIPLKATSTPVSIKQYPMSQEARLGIKPHIQRLLDQGILVPCQSPWNTPLLPVKKPGTNDYRPVQDLREVNKRVEDIHPTVPNPYNLLSGLPPSHQWYTVLDLKDAFFCLRLHPTSQPLFAFEWRDPEMGISGQLTWTRLPQGFKNSPTLFNEALHRDLADFRIQHPDLILLQYVDDLLLAATSELDCQQGTRALLQTLGNLGYRASAKKAQICQKQVKYLGYLLKEGQRWLTEARKETVMGQPTPKTPRQLREFLGKAGFCRLFIPGFAEMAAPLYPLTKPGTLFNWGPDQQKAYQEIKQALLTAPALGLPDLTKPFELFVDEKQGYAKGVLTQKLGPWRRPVAYLSKKLDPVAAGWPPCLRMVAAIAVLTKDAGKLTMGQPLVILAPHAVEALVKQPPDRWLSNARMTHYQALLLDTDRVQFGPVVALNPATLLPLPEEGLQHNCLDILAEAHGTRPDLTDQPLPDADHTWYTDGSSLLQEGQRKAGAAVTTETEVIWAKALPAGTSAQRAELIALTQALKMAEGKKLNVYTDSRYAFATAHIHGEIYRRRGWLTSEGKEIKNKDEILALLKALFLPKRLSIIHCPGHQKGHSAEARGNRMADQAARKAAITETPDTSTLLAGKRTADGSEFEKRTADGSEFESPKKKAKVE

SEQ ID NO: 3074 - protein, 2091 aa, synthetic construct; identical to SEQ ID NO: 2853

SEQ ID NO: 3075 - protein, 2094 aa, synthetic construct
MPAAKRVKLDGGDKKYSIGLDIGTNSVGWAVITDEYKVPSKKFKVLGNTDRHSIKKNLIGALLFDSGETAEATRLKRTARRRYTRRKNRICYLQEIFSNEMAKVDDSFFHRLEESFLVEEDKKHERHPIFGNIVDEVAYHEKYPTIYHLRKKLVDSTDKADLRLIYLALAHMIKFRGHFLIEGDLNPDNSDVDKLFIQLVQTYNQLFEENPINASGVDAKAILSARLSKSRRLENLIAQLPGEKKNGLFGNLIALSLGLTPNFKSNFDLAEDAKLQLSKDTYDDDLDNLLAQIGDQYADLFLAAKNLSDAILLSDILRVNTEITKAPLSASMIKRYDEHHQDLTLLKALVRQQLPEKYKEIFFDQSKNGYAGYIDGGASQEEFYKFIKPILEKMDGTEELLVKLNREDLLRKQRTFDNGSIPHQIHLGELHAILRRQEDFYPFLKDNREKIEKILTFRIPYYVGPLARGNSRFAWMTRKSEETITPWNFEEVVDKGASAQSFIERMTNFDKNLPNEKVLPKHSLLYEYFTVYNELTKVKYVTEGMRKPAFLSGEQKKAIVDLLFKTNRKVTVKQLKEDYFKKIECFDSVEISGVEDRFNASLGTYHDLLKIIKDKDFLDNEENEDILEDIVLTLTLFEDREMIEERLKTYAHLFDDKVMKQLKRRRYTGWGRLSRKLINGIRDKQSGKTILDFLKSDGFANRNFMQLIHDDSLTFKEDIQKAQVSGQGDSLHEHIANLAGSPAIKKGILQTVKVVDELVKVMGRHKPENIVIEMARENQTTQKGQKNSRERMKRIEEGIKELGSQILKEHPVENTQLQNEKLYLYYLQNGRDMYVDQELDINRLSDYDVDHIVPQSFLKDDSIDNKVLTRSDKARGKSDNVPSEEVVKKMKNYWRQLLNAKLITQRKFDNLTKAERGGLSELDKAGFIKRQLVETRQITKHVAQILDSRMNTKYDENDKLIREVKVITLKSKLVSDFRKDFQFYKVREINNYHHAHDAYLNAVVGTALIKKYPKLESEFVYGDYKVYDVRKMIAKSEQEIGKATAKYFFYSNIMNFFKTEITLANGEIRKRPLIETNGETGEIVWDKGRDFATVRKVLSMPQVNIVKKTEVQTGGFSKESILPKRNSDKLIARKKDWDPKKYGGFDSPTVAYSVLVVAKVEKGKSKKLKSVKELLGITIMERSSFEKNPIDFLEAKGYKEVKKDLIIKLPKYSLFELENGRKRMLASAGELQKGNELALPSKYVNFLYLASHYEKLKGSPEDNEQKQLFVEQHKHYLDEIIEQISEFSKRVILADANLDKVLSAYNKHRDKPIREQAENIIHLFTLTNLGAPAAFKYFDTTIDRKRYTSTKEVLDATLIHQSITGLYETRIDLSQLGGDGGGSSGGSPAPGGTLNIEDEHRLHETSKEPDVSLGSTWLSDFPQAWAETGGMGLAVRQAPLIIPLKATSTPVSIKQYPMSQEARLGIKPHIQRLLDQGILVPCQSPWNTPLLPVKKPGTNDYRPVQDLREVNKRVEDIHPTVPNPYNLLSGLPPSHQWYTVLDLKDAFFCLRLHPTSQPLFAFEWRDPEMGISGQLTWTRLPQGFKNSPTLFNEALHRDLADFRIQHPDLILLQYVDDLLLAATSELDCQQGTRALLQTLGNLGYRASAKKAQICQKQVKYLGYLLKEGQRWLTEARKETVMGQPTPKTPRQLREFLGKAGFCRLFIPGFAEMAAPLYPLTKPGTLFNWGPDQQKAYQEIKQALLTAPALGLPDLTKPFELFVDEKQGYAKGVLTQKLGPWRRPVAYLSKKLDPVAAGWPPCLRMVAAIAVLTKDAGKLTMGQPLVILAPHAVEALVKQPPDRWLSNARMTHYQALLLDTDRVQFGPVVALNPATLLPLPEEGLQHNCLDILAEAHGTRPDLTDQPLPDADHTWYTDGSSLLQEGQRKAGAAVTTETEVIWAKALPAGTSAQRAELIALTQALKMAEGKKLNVYTDSRYAFATAHIHGEIYRRRGWLTSEGKEIKNKDEILALLKALFLPKRLSIIHCPGHQKGHSAEARGNRMADQAARKAAITETPDTSTLLAGKRTADGSEFEKRTADGSEFESPKKKAKVE

SEQ ID NO: 3076 - protein, 2091 aa, synthetic construct; identical to SEQ ID NO: 2780

SEQ ID NO: 3077 - protein, 2101 aa, synthetic construct; identical to SEQ ID NO: 2858

SEQ ID NO: 3078 - protein, 2093 aa, synthetic construct; identical to SEQ ID NO: 2821

SEQ ID NO: 3079 - protein, 2100 aa, synthetic construct; identical to SEQ ID NO: 2788

SEQ ID NO: 3080 - protein, 2096 aa, synthetic construct
MPAAKRVKLDGGDKKYSIGLDIGTNSVGWAVITDEYKVPSKKFKVLGNTDRHSIKKNLIGALLFDSGETAEATRLKRTARRRYTRRKNRICYLQEIFSNEMAKVDDSFFHRLEESFLVEEDKKHERHPIFGNIVDEVAYHEKYPTIYHLRKKLVDSTDKADLRLIYLALAHMIKFRGHFLIEGDLNPDNSDVDKLFIQLVQTYNQLFEENPINASGVDAKAILSARLSKSRRLENLIAQLPGEKKNGLFGNLIALSLGLTPNFKSNFDLAEDAKLQLSKDTYDDDLDNLLAQIGDQYADLFLAAKNLSDAILLSDILRVNTEITKAPLSASMIKRYDEHHQDLTLLKALVRQQLPEKYKEIFFDQSKNGYAGYIDGGASQEEFYKFIKPILEKMDGTEELLVKLNREDLLRKQRTFDNGSIPHQIHLGELHAILRRQEDFYPFLKDNREKIEKILTFRIPYYVGPLARGNSRFAWMTRKSEETITPWNFEEVVDKGASAQSFIERMTNFDKNLPNEKVLPKHSLLYEYFTVYNELTKVKYVTEGMRKPAFLSGEQKKAIVDLLFKTNRKVTVKQLKEDYFKKIECFDSVEISGVEDRFNASLGTYHDLLKIIKDKDFLDNEENEDILEDIVLTLTLFEDREMIEERLKTYAHLFDDKVMKQLKRRRYTGWGRLSRKLINGIRDKQSGKTILDFLKSDGFANRNFMQLIHDDSLTFKEDIQKAQVSGQGDSLHEHIANLAGSPAIKKGILQTVKVVDELVKVMGRHKPENIVIEMARENQTTQKGQKNSRERMKRIEEGIKELGSQILKEHPVENTQLQNEKLYLYYLQNGRDMYVDQELDINRLSDYDVDHIVPQSFLKDDSIDNKVLTRSDKARGKSDNVPSEEVVKKMKNYWRQLLNAKLITQRKFDNLTKAERGGLSELDKAGFIKRQLVETRQITKHVAQILDSRMNTKYDENDKLIREVKVITLKSKLVSDFRKDFQFYKVREINNYHHAHDAYLNAVVGTALIKKYPKLESEFVYGDYKVYDVRKMIAKSEQEIGKATAKYFFYSNIMNFFKTEITLANGEIRKRPLIETNGETGEIVWDKGRDFATVRKVLSMPQVNIVKKTEVQTGGFSKESILPKRNSDKLIARKKDWDPKKYGGFDSPTVAYSVLVVAKVEKGKSKKLKSVKELLGITIMERSSFEKNPIDFLEAKGYKEVKKDLIIKLPKYSLFELENGRKRMLASAGELQKGNELALPSKYVNFLYLASHYEKLKGSPEDNEQKQLFVEQHKHYLDEIIEQISEFSKRVILADANLDKVLSAYNKHRDKPIREQAENIIHLFTLTNLGAPAAFKYFDTTIDRKRYTSTKEVLDATLIHQSITGLYETRIDLSQLGGDGGEAAAKPAPGGSGGTLNIEDEHRLHETSKEPDVSLGSTWLSDFPQAWAETGGMGLAVRQAPLIIPLKATSTPVSIKQYPMSQEARLGIKPHIQRLLDQGILVPCQSPWNTPLLPVKKPGTNDYRPVQDLREVNKRVEDIHPTVPNPYNLLSGLPPSHQWYTVLDLKDAFFCLRLHPTSQPLFAFEWRDPEMGISGQLTWTRLPQGFKNSPTLFNEALHRDLADFRIQHPDLILLQYVDDLLLAATSELDCQQGTRALLQTLGNLGYRASAKKAQICQKQVKYLGYLLKEGQRWLTEARKETVMGQPTPKTPRQLREFLGKAGFCRLFIPGFAEMAAPLYPLTKPGTLFNWGPDQQKAYQEIKQALLTAPALGLPDLTKPFELFVDEKQGYAKGVLTQKLGPWRRPVAYLSKKLDPVAAGWPPCLRMVAAIAVLTKDAGKLTMGQPLVILAPHAVEALVKQPPDRWLSNARMTHYQALLLDTDRVQFGPVVALNPATLLPLPEEGLQHNCLDILAEAHGTRPDLTDQPLPDADHTWYTDGSSLLQEGQRKAGAAVTTETEVIWAKALPAGTSAQRAELIALTQALKMAEGKKLNVYTDSRYAFATAHIHGEIYRRRGWLTSEGKEIKNKDEILALLKALFLPKRLSIIHCPGHQKGHSAEARGNRMADQAARKAAITETPDTSTLLAGKRTADGSEFEKRTADGSEFESPKKKAKVE

SEQ ID NO: 3081 - protein, 2115 aa, synthetic construct; identical to SEQ ID NO: 2827

SEQ ID NO: 3082 - protein, 2093 aa, synthetic construct; identical to SEQ ID NO: 2856

SEQ ID NO: 3083 - protein, 2096 aa, synthetic construct; identical to SEQ ID NO: 2786

SEQ ID NO: 3084 - protein, 2098 aa, synthetic construct; identical to SEQ ID NO: 2797

SEQ ID NO: 3085 - protein, 2096 aa, synthetic construct; identical to SEQ ID NO: 2830

SEQ ID NO: 3086 - protein, 2094 aa, synthetic construct
MPAAKRVKLDGGDKKYSIGLDIGTNSVGWAVITDEYKVPSKKFKVLGNTDRHSIKKNLIGALLFDSGETAEATRLKRTARRRYTRRKNRICYLQEIFSNEMAKVDDSFFHRLEESFLVEEDKKHERHPIFGNIVDEVAYHEKYPTIYHLRKKLVDSTDKADLRLIYLALAHMIKFRGHFLIEGDLNPDNSDVDKLFIQLVQTYNQLFEENPINASGVDAKAILSARLSKSRRLENLIAQLPGEKKNGLFGNLIALSLGLTPNFKSNFDLAEDAKLQLSKDTYDDDLDNLLAQIGDQYADLFLAAKNLSDAILLSDILRVNTEITKAPLSASMIKRYDEHHQDLTLLKALVRQQLPEKYKEIFFDQSKNGYAGYIDGGASQEEFYKFIKPILEKMDGTEELLVKLNREDLLRKQRTFDNGSIPHQIHLGELHAILRRQEDFYPFLKDNREKIEKILTFRIPYYVGPLARGNSRFAWMTRKSEETITPWNFEEVVDKGASAQSFIERMTNFDKNLPNEKVLPKHSLLYEYFTVYNELTKVKYVTEGMRKPAFLSGEQKKAIVDLLFKTNRKVTVKQLKEDYFKKIECFDSVEISGVEDRFNASLGTYHDLLKIIKDKDFLDNEENEDILEDIVLTLTLFEDREMIEERLKTYAHLFDDKVMKQLKRRRYTGWGRLSRKLINGIRDKQSGKTILDFLKSDGFANRNFMQLIHDDSLTFKEDIQKAQVSGQGDSLHEHIANLAGSPAIKKGILQTVKVVDELVKVMGRHKPENIVIEMARENQTTQKGQKNSRERMKRIEEGIKELGSQILKEHPVENTQLQNEKLYLYYLQNGRDMYVDQELDINRLSDYDVDHIVPQSFLKDDSIDNKVLTRSDKARGKSDNVPSEEVVKKMKNYWRQLLNAKLITQRKFDNLTKAERGGLSELDKAGFIKRQLVETRQITKHVAQILDSRMNTKYDENDKLIREVKVITLKSKLVSDFRKDFQFYKVREINNYHHAHDAYLNAVVGTALIKKYPKLESEFVYGDYKVYDVRKMIAKSEQEIGKATAKYFFYSNIMNFFKTEITLANGEIRKRPLIETNGETGEIVWDKGRDFATVRKVLSMPQVNIVKKTEVQTGGFSKESILPKRNSDKLIARKKDWDPKKYGGFDSPTVAYSVLVVAKVEKGKSKKLKSVKELLGITIMERSSFEKNPIDFLEAKGYKEVKKDLIIKLPKYSLFELENGRKRMLASAGELQKGNELALPSKYVNFLYLASHYEKLKGSPEDNEQKQLFVEQHKHYLDEIIEQISEFSKRVILADANLDKVLSAYNKHRDKPIREQAENIIHLFTLTNLGAPAAFKYFDTTIDRKRYTSTKEVLDATLIHQSITGLYETRIDLSQLGGDGGPAPAPAPAPGGTLNIEDEHRLHETSKEPDVSLGSTWLSDFPQAWAETGGMGLAVRQAPLIIPLKATSTPVSIKQYPMSQEARLGIKPHIQRLLDQGILVPCQSPWNTPLLPVKKPGTNDYRPVQDLREVNKRVEDIHPTVPNPYNLLSGLPPSHQWYTVLDLKDAFFCLRLHPTSQPLFAFEWRDPEMGISGQLTWTRLPQGFKNSPTLFNEALHRDLADFRIQHPDLILLQYVDDLLLAATSELDCQQGTRALLQTLGNLGYRASAKKAQICQKQVKYLGYLLKEGQRWLTEARKETVMGQPTPKTPRQLREFLGKAGFCRLFIPGFAEMAAPLYPLTKPGTLFNWGPDQQKAYQEIKQALLTAPALGLPDLTKPFELFVDEKQGYAKGVLTQKLGPWRRPVAYLSKKLDPVAAGWPPCLRMVAAIAVLTKDAGKLTMGQPLVILAPHAVEALVKQPPDRWLSNARMTHYQALLLDTDRVQFGPVVALNPATLLPLPEEGLQHNCLDILAEAHGTRPDLTDQPLPDADHTWYTDGSSLLQEGQRKAGAAVTTETEVIWAKALPAGTSAQRAELIALTQALKMAEGKKLNVYTDSRYAFATAHIHGEIYRRRGWLTSEGKEIKNKDEILALLKALFLPKRLSIIHCPGHQKGHSAEARGNRMADQAARKAAITETPDTSTLLAGKRTADGSEFEKRTADGSEFESPKKKAKVE

SEQ ID NO: 3087 - protein, 2091 aa, synthetic construct; identical to SEQ ID NO: 2808

SEQ ID NO: 3088 - protein, 2096 aa, synthetic construct; identical to SEQ ID NO: 2857

SEQ ID NO: 3089 - protein, 2091 aa, synthetic construct; identical to SEQ ID NO: 2855

SEQ ID NO: 3090 - protein, 2094 aa, synthetic construct; identical to SEQ ID NO: 2847

SEQ ID NO: 3091 - protein, 2096 aa, synthetic construct; identical to SEQ ID NO: 2798

SEQ ID NO: 3092 - protein, 2100 aa, synthetic construct; identical to SEQ ID NO: 2819

SEQ ID NO: 3093 - protein, 2094 aa, synthetic construct; identical to SEQ ID NO: 2835

SEQ ID NO: 3094 - protein, 2089 aa, synthetic construct
MPAAKRVKLDGGDKKYSIGLDIGTNSVGWAVITDEYKVPSKKFKVLGNTDRHSIKKNLIGALLFDSGETAEATRLKRTARRRYTRRKNRICYLQEIFSNEMAKVDDSFFHRLEESFLVEEDKKHERHPIFGNIVDEVAYHEKYPTIYHLRKKLVDSTDKADLRLIYLALAHMIKFRGHFLIEGDLNPDNSDVDKLFIQLVQTYNQLFEENPINASGVDAKAILSARLSKSRRLENLIAQLPGEKKNGLFGNLIALSLGLTPNFKSNFDLAEDAKLQLSKDTYDDDLDNLLAQIGDQYADLFLAAKNLSDAILLSDILRVNTEITKAPLSASMIKRYDEHHQDLTLLKALVRQQLPEKYKEIFFDQSKNGYAGYIDGGASQEEFYKFIKPILEKMDGTEELLVKLNREDLLRKQRTFDNGSIPHQIHLGELHAILRRQEDFYPFLKDNREKIEKILTFRIPYYVGPLARGNSRFAWMTRKSEETITPWNFEEVVDKGASAQSFIERMTNFDKNLPNEKVLPKHSLLYEYFTVYNELTKVKYVTEGMRKPAFLSGEQKKAIVDLLFKTNRKVTVKQLKEDYFKKIECFDSVEISGVEDRFNASLGTYHDLLKIIKDKDFLDNEENEDILEDIVLTLTLFEDREMIEERLKTYAHLFDDKVMKQLKRRRYTGWGRLSRKLINGIRDKQSGKTILDFLKSDGFANRNFMQLIHDDSLTFKEDIQKAQVSGQGDSLHEHIANLAGSPAIKKGILQTVKVVDELVKVMGRHKPENIVIEMARENQTTQKGQKNSRERMKRIEEGIKELGSQILKEHPVENTQLQNEKLYLYYLQNGRDMYVDQELDINRLSDYDVDHIVPQSFLKDDSIDNKVLTRSDKARGKSDNVPSEEVVKKMKNYWRQLLNAKLITQRKFDNLTKAERGGLSELDKAGFIKRQLVETRQITKHVAQILDSRMNTKYDENDKLIREVKVITLKSKLVSDFRKDFQFYKVREINNYHHAHDAYLNAVVGTALIKKYPKLESEFVYGDYKVYDVRKMIAKSEQEIGKATAKYFFYSNIMNFFKTEITLANGEIRKRPLIETNGETGEIVWDKGRDFATVRKVLSMPQVNIVKKTEVQTGGFSKESILPKRNSDKLIARKKDWDPKKYGGFDSPTVAYSVLVVAKVEKGKSKKLKSVKELLGITIMERSSFEKNPIDFLEAKGYKEVKKDLIIKLPKYSLFELENGRKRMLASAGELQKGNELALPSKYVNFLYLASHYEKLKGSPEDNEQKQLFVEQHKHYLDEIIEQISEFSKRVILADANLDKVLSAYNKHRDKPIREQAENIIHLFTLTNLGAPAAFKYFDTTIDRKRYTSTKEVLDATLIHQSITGLYETRIDLSQLGGDGGGGGGGGTLNIEDEHRLHETSKEPDVSLGSTWLSDFPQAWAETGGMGLAVRQAPLIIPLKATSTPVSIKQYPMSQEARLGIKPHIQRLLDQGILVPCQSPWNTPLLPVKKPGTNDYRPVQDLREVNKRVEDIHPTVPNPYNLLSGLPPSHQWYTVLDLKDAFFCLRLHPTSQPLFAFEWRDPEMGISGQLTWTRLPQGFKNSPTLFNEALHRDLADFRIQHPDLILLQYVDDLLLAATSELDCQQGTRALLQTLGNLGYRASAKKAQICQKQVKYLGYLLKEGQRWLTEARKETVMGQPTPKTPRQLREFLGKAGFCRLFIPGFAEMAAPLYPLTKPGTLFNWGPDQQKAYQEIKQALLTAPALGLPDLTKPFELFVDEKQGYAKGVLTQKLGPWRRPVAYLSKKLDPVAAGWPPCLRMVAAIAVLTKDAGKLTMGQPLVILAPHAVEALVKQPPDRWLSNARMTHYQALLLDTDRVQFGPVVALNPATLLPLPEEGLQHNCLDILAEAHGTRPDLTDQPLPDADHTWYTDGSSLLQEGQRKAGAAVTTETEVIWAKALPAGTSAQRAELIALTQALKMAEGKKLNVYTDSRYAFATAHIHGEIYRRRGWLTSEGKEIKNKDEILALLKALFLPKRLSIIHCPGHQKGHSAEARGNRMADQAARKAAITETPDTSTLLAGKRTADGSEFEKRTADGSEFESPKKKAKVE

SEQ ID NO: 3095 - protein, 2088 aa, synthetic construct
MPAAKRVKLDGGDKKYSIGLDIGTNSVGWAVITDEYKVPSKKFKVLGNTDRHSIKKNLIGALLFDSGETAEATRLKRTARRRYTRRKNRICYLQEIFSNEMAKVDDSFFHRLEESFLVEEDKKHERHPIFGNIVDEVAYHEKYPTIYHLRKKLVDSTDKADLRLIYLALAHMIKFRGHFLIEGDLNPDNSDVDKLFIQLVQTYNQLFEENPINASGVDAKAILSARLSKSRRLENLIAQLPGEKKNGLFGNLIALSLGLTPNFKSNFDLAEDAKLQLSKDTYDDDLDNLLAQIGDQYADLFLAAKNLSDAILLSDILRVNTEITKAPLSASMIKRYDEHHQDLTLLKALVRQQLPEKYKEIFFDQSKNGYAGYIDGGASQEEFYKFIKPILEKMDGTEELLVKLNREDLLRKQRTFDNGSIPHQIHLGELHAILRRQEDFYPFLKDNREKIEKILTFRIPYYVGPLARGNSRFAWMTRKSEETITPWNFEEVVDKGASAQSFIERMTNFDKNLPNEKVLPKHSLLYEYFTVYNELTKVKYVTEGMRKPAFLSGEQKKAIVDLLFKTNRKVTVKQLKEDYFKKIECFDSVEISGVEDRFNASLGTYHDLLKIIKDKDFLDNEENEDILEDIVLTLTLFEDREMIEERLKTYAHLFDDKVMKQLKRRRYTGWGRLSRKLINGIRDKQSGKTILDFLKSDGFANRNFMQLIHDDSLTFKEDIQKAQVSGQGDSLHEHIANLAGSPAIKKGILQTVKVVDELVKVMGRHKPENIVIEMARENQTTQKGQKNSRERMKRIEEGIKELGSQILKEHPVENTQLQNEKLYLYYLQNGRDMYVDQELDINRLSDYDVDHIVPQSFLKDDSIDNKVLTRSDKARGKSDNVPSEEVVKKMKNYWRQLLNAKLITQRKFDNLTKAERGGLSELDKAGFIKRQLVETRQITKHVAQILDSRMNTKYDENDKLIREVKVITLKSKLVSDFRKDFQFYKVREINNYHHAHDAYLNAVVGTALIKKYPKLESEFVYGDYKVYDVRKMIAKSEQEIGKATAKYFFYSNIMNFFKTEITLANGEIRKRPLIETNGETGEIVWDKGRDFATVRKVLSMPQVNIVKKTEVQTGGFSKESILPKRNSDKLIARKKDWDPKKYGGFDSPTVAYSVLVVAKVEKGKSKKLKSVKELLGITIMERSSFEKNPIDFLEAKGYKEVKKDLIIKLPKYSLFELENGRKRMLASAGELQKGNELALPSKYVNFLYLASHYEKLKGSPEDNEQKQLFVEQHKHYLDEIIEQISEFSKRVILADANLDKVLSAYNKHRDKPIREQAENIIHLFTLTNLGAPAAFKYFDTTIDRKRYTSTKEVLDATLIHQSITGLYETRIDLSQLGGDGGGGSGGTLNIEDEHRLHETSKEPDVSLGSTWLSDFPQAWAETGGMGLAVRQAPLIIPLKATSTPVSIKQYPMSQEARLGIKPHIQRLLDQGILVPCQSPWNTPLLPVKKPGTNDYRPVQDLREVNKRVEDIHPTVPNPYNLLSGLPPSHQWYTVLDLKDAFFCLRLHPTSQPLFAFEWRDPEMGISGQLTWTRLPQGFKNSPTLFNEALHRDLADFRIQHPDLILLQYVDDLLLAATSELDCQQGTRALLQTLGNLGYRASAKKAQICQKQVKYLGYLLKEGQRWLTEARKETVMGQPTPKTPRQLREFLGKAGFCRLFIPGFAEMAAPLYPLTKPGTLFNWGPDQQKAYQEIKQALLTAPALGLPDLTKPFELFVDEKQGYAKGVLTQKLGPWRRPVAYLSKKLDPVAAGWPPCLRMVAAIAVLTKDAGKLTMGQPLVILAPHAVEALVKQPPDRWLSNARMTHYQALLLDTDRVQFGPVVALNPATLLPLPEEGLQHNCLDILAEAHGTRPDLTDQPLPDADHTWYTDGSSLLQEGQRKAGAAVTTETEVIWAKALPAGTSAQRAELIALTQALKMAEGKKLNVYTDSRYAFATAHIHGEIYRRRGWLTSEGKEIKNKDEILALLKALFLPKRLSIIHCPGHQKGHSAEARGNRMADQAARKAAITETPDTSTLLAGKRTADGSEFEKRTADGSEFESPKKKAKVE

SEQ ID NO: 3096 - protein, 2092 aa, synthetic construct; identical to SEQ ID NO: 2790

SEQ ID NO: 3097 - protein, 2093 aa, synthetic construct; identical to SEQ ID NO: 2849

SEQ ID NO: 3098 - protein, 2094 aa, synthetic construct; identical to SEQ ID NO: 2793

SEQ ID NO: 3099 - protein, 2100 aa, synthetic construct; identical to SEQ ID NO: 2836

SEQ ID NO: 3100 - protein, 2092 aa, synthetic construct
MPAAKRVKLDGGDKKYSIGLDIGTNSVGWAVITDEYKVPSKKFKVLGNTDRHSIKKNLIGALLFDSGETAEATRLKRTARRRYTRRKNRICYLQEIFSNEMAKVDDSFFHRLEESFLVEEDKKHERHPIFGNIVDEVAYHEKYPTIYHLRKKLVDSTDKADLRLIYLALAHMIKFRGHFLIEGDLNPDNSDVDKLFIQLVQTYNQLFEENPINASGVDAKAILSARLSKSRRLENLIAQLPGEKKNGLFGNLIALSLGLTPNFKSNFDLAEDAKLQLSKDTYDDDLDNLLAQIGDQYADLFLAAKNLSDAILLSDILRVNTEITKAPLSASMIKRYDEHHQDLTLLKALVRQQLPEKYKEIFFDQSKNGYAGYIDGGASQEEFYKFIKPILEKMDGTEELLVKLNREDLLRKQRTFDNGSIPHQIHLGELHAILRRQEDFYPFLKDNREKIEKILTFRIPYYVGPLARGNSRFAWMTRKSEETITPWNFEEVVDKGASAQSFIERMTNFDKNLPNEKVLPKHSLLYEYFTVYNELTKVKYVTEGMRKPAFLSGEQKKAIVDLLFKTNRKVTVKQLKEDYFKKIECFDSVEISGVEDRFNASLGTYHDLLKIIKDKDFLDNEENEDILEDIVLTLTLFEDREMIEERLKTYAHLFDDKVMKQLKRRRYTGWGRLSRKLINGIRDKQSGKTILDFLKSDGFANRNFMQLIHDDSLTFKEDIQKAQVSGQGDSLHEHIANLAGSPAIKKGILQTVKVVDELVKVMGRHKPENIVIEMARENQTTQKGQKNSRERMKRIEEGIKELGSQILKEHPVENTQLQNEKLYLYYLQNGRDMYVDQELDINRLSDYDVDHIVPQSFLKDDSIDNKVLTRSDKARGKSDNVPSEEVVKKMKNYWRQLLNAKLITQRKFDNLTKAERGGLSELDKAGFIKRQLVETRQITKHVAQILDSRMNTKYDENDKLIREVKVITLKSKLVSDFRKDFQFYKVREINNYHHAHDAYLNAVVGTALIKKYPKLESEFVYGDYKVYDVRKMIAKSEQEIGKATAKYFFYSNIMNFFKTEITLANGEIRKRPLIETNGETGEIVWDKGRDFATVRKVLSMPQVNIVKKTEVQTGGFSKESILPKRNSDKLIARKKDWDPKKYGGFDSPTVAYSVLVVAKVEKGKSKKLKSVKELLGITIMERSSFEKNPIDFLEAKGYKEVKKDLIIKLPKYSLFELENGRKRMLASAGELQKGNELALPSKYVNFLYLASHYEKLKGSPEDNEQKQLFVEQHKHYLDEIIEQISEFSKRVILADANLDKVLSAYNKHRDKPIREQAENIIHLFTLTNLGAPAAFKYFDTTIDRKRYTSTKEVLDATLIHQSITGLYETRIDLSQLGGDGGPAPAPAPGGTLNIEDEHRLHETSKEPDVSLGSTWLSDFPQAWAETGGMGLAVRQAPLIIPLKATSTPVSIKQYPMSQEARLGIKPHIQRLLDQGILVPCQSPWNTPLLPVKKPGTNDYRPVQDLREVNKRVEDIHPTVPNPYNLLSGLPPSHQWYTVLDLKDAFFCLRLHPTSQPLFAFEWRDPEMGISGQLTWTRLPQGFKNSPTLFNEALHRDLADFRIQHPDLILLQYVDDLLLAATSELDCQQGTRALLQTLGNLGYRASAKKAQICQKQVKYLGYLLKEGQRWLTEARKETVMGQPTPKTPRQLREFLGKAGFCRLFIPGFAEMAAPLYPLTKPGTLFNWGPDQQKAYQEIKQALLTAPALGLPDLTKPFELFVDEKQGYAKGVLTQKLGPWRRPVAYLSKKLDPVAAGWPPCLRMVAAIAVLTKDAGKLTMGQPLVILAPHAVEALVKQPPDRWLSNARMTHYQALLLDTDRVQFGPVVALNPATLLPLPEEGLQHNCLDILAEAHGTRPDLTDQPLPDADHTWYTDGSSLLQEGQRKAGAAVTTETEVIWAKALPAGTSAQRAELIALTQALKMAEGKKLNVYTDSRYAFATAHIHGEIYRRRGWLTSEGKEIKNKDEILALLKALFLPKRLSIIHCPGHQKGHSAEARGNRMADQAARKAAITETPDTSTLLAGKRTADGSEFEKRTADGSEFESPKKKAKVE

SEQ ID NO: 3101 - protein, 2094 aa, synthetic construct; identical to SEQ ID NO: 2846

SEQ ID NO: 3102 - protein, 2096 aa, synthetic construct; identical to SEQ ID NO: 2842

SEQ ID NO: 3103 - protein, 2096 aa, synthetic construct; identical to SEQ ID NO: 2815

SEQ ID NO: 3104 - protein, 2096 aa, synthetic construct
MPAAKRVKLDGGDKKYSIGLDIGTNSVGWAVITDEYKVPSKKFKVLGNTDRHSIKKNLIGALLFDSGETAEATRLKRTARRRYTRRKNRICYLQEIFSNEMAKVDDSFFHRLEESFLVEEDKKHERHPIFGNIVDEVAYHEKYPTIYHLRKKLVDSTDKADLRLIYLALAHMIKFRGHFLIEGDLNPDNSDVDKLFIQLVQTYNQLFEENPINASGVDAKAILSARLSKSRRLENLIAQLPGEKKNGLFGNLIALSLGLTPNFKSNFDLAEDAKLQLSKDTYDDDLDNLLAQIGDQYADLFLAAKNLSDAILLSDILRVNTEITKAPLSASMIKRYDEHHQDLTLLKALVRQQLPEKYKEIFFDQSKNGYAGYIDGGASQEEFYKFIKPILEKMDGTEELLVKLNREDLLRKQRTFDNGSIPHQIHLGELHAILRRQEDFYPFLKDNREKIEKILTFRIPYYVGPLARGNSRFAWMTRKSEETITPWNFEEVVDKGASAQSFIERMTNFDKNLPNEKVLPKHSLLYEYFTVYNELTKVKYVTEGMRKPAFLSGEQKKAIVDLLFKTNRKVTVKQLKEDYFKKIECFDSVEISGVEDRFNASLGTYHDLLKIIKDKDFLDNEENEDILEDIVLTLTLFEDREMIEERLKTYAHLFDDKVMKQLKRRRYTGWGRLSRKLINGIRDKQSGKTILDFLKSDGFANRNFMQLIHDDSLTFKEDIQKAQVSGQGDSLHEHIANLAGSPAIKKGILQTVKVVDELVKVMGRHKPENIVIEMARENQTTQKGQKNSRERMKRIEEGIKELGSQILKEHPVENTQLQNEKLYLYYLQNGRDMYVDQELDINRLSDYDVDHIVPQSFLKDDSIDNKVLTRSDKARGKSDNVPSEEVVKKMKNYWRQLLNAKLITQRKFDNLTKAERGGLSELDKAGFIKRQLVETRQITKHVAQILDSRMNTKYDENDKLIREVKVITLKSKLVSDFRKDFQFYKVREINNYHHAHDAYLNAVVGTALIKKYPKLESEFVYGDYKVYDVRKMIAKSEQEIGKATAKYFFYSNIMNFFKTEITLANGEIRKRPLIETNGETGEIVWDKGRDFATVRKVLSMPQVNIVKKTEVQTGGFSKESILPKRNSDKLIARKKDWDPKKYGGFDSPTVAYSVLVVAKVEKGKSKKLKSVKELLGITIMERSSFEKNPIDFLEAKGYKEVKKDLIIKLPKYSLFELENGRKRMLASAGELQKGNELALPSKYVNFLYLASHYEKLKGSPEDNEQKQLFVEQHKHYLDEIIEQISEFSKRVILADANLDKVLSAYNKHRDKPIREQAENIIHLFTLTNLGAPAAFKYFDTTIDRKRYTSTKEVLDATLIHQSITGLYETRIDLSQLGGDGGPAPEAAAKGSSGGTLNIEDEHRLHETSKEPDVSLGSTWLSDFPQAWAETGGMGLAVRQAPLIIPLKATSTPVSIKQYPMSQEARLGIKPHIQRLLDQGILVPCQSPWNTPLLPVKKPGTNDYRPVQDLREVNKRVEDIHPTVPNPYNLLSGLPPSHQWYTVLDLKDAFFCLRLHPTSQPLFAFEWRDPEMGISGQLTWTRLPQGFKNSPTLFNEALHRDLADFRIQHPDLILLQYVDDLLLAATSELDCQQGTRALLQTLGNLGYRASAKKAQICQKQVKYLGYLLKEGQRWLTEARKETVMGQPTPKTPRQLREFLGKAGFCRLFIPGFAEMAAPLYPLTKPGTLFNWGPDQQKAYQEIKQALLTAPALGLPDLTKPFELFVDEKQGYAKGVLTQKLGPWRRPVAYLSKKLDPVAAGWPPCLRMVAAIAVLTKDAGKLTMGQPLVILAPHAVEALVKQPPDRWLSNARMTHYQALLLDTDRVQFGPVVALNPATLLPLPEEGLQHNCLDILAEAHGTRPDLTDQPLPDADHTWYTDGSSLLQEGQRKAGAAVTTETEVIWAKALPAGTSAQRAELIALTQALKMAEGKKLNVYTDSRYAFATAHIHGEIYRRRGWLTSEGKEIKNKDEILALLKALFLPKRLSIIHCPGHQKGHSAEARGNRMADQAARKAAITETPDTSTLLAGKRTADGSEFEKRTADGSEFESPKKKAKVE

SEQ ID NO: 3105 - protein, 2096 aa, synthetic construct
MPAAKRVKLDGGDKKYSIGLDIGTNSVGWAVITDEYKVPSKKFKVLGNTDRHSIKKNLIGALLFDSGETAEATRLKRTARRRYTRRKNRICYLQEIFSNEMAKVDDSFFHRLEESFLVEEDKKHERHPIFGNIVDEVAYHEKYPTIYHLRKKLVDSTDKADLRLIYLALAHMIKFRGHFLIEGDLNPDNSDVDKLFIQLVQTYNQLFEENPINASGVDAKAILSARLSKSRRLENLIAQLPGEKKNGLFGNLIALSLGLTPNFKSNFDLAEDAKLQLSKDTYDDDLDNLLAQIGDQYADLFLAAKNLSDAILLSDILRVNTEITKAPLSASMIKRYDEHHQDLTLLKALVRQQLPEKYKEIFFDQSKNGYAGYIDGGASQEEFYKFIKPILEKMDGTEELLVKLNREDLLRKQRTFDNGSIPHQIHLGELHAILRRQEDFYPFLKDNREKIEKILTFRIPYYVGPLARGNSRFAWMTRKSEETITPWNFEEVVDKGASAQSFIERMTNFDKNLPNEKVLPKHSLLYEYFTVYNELTKVKYVTEGMRKPAFLSGEQKKAIVDLLFKTNRKVTVKQLKEDYFKKIECFDSVEISGVEDRFNASLGTYHDLLKIIKDKDFLDNEENEDILEDIVLTLTLFEDREMIEERLKTYAHLFDDKVMKQLKRRRYTGWGRLSRKLINGIRDKQSGKTILDFLKSDGFANRNFMQLIHDDSLTFKEDIQKAQVSGQGDSLHEHIANLAGSPAIKKGILQTVKVVDELVKVMGRHKPENIVIEMARENQTTQKGQKNSRERMKRIEEGIKELGSQILKEHPVENTQLQNEKLYLYYLQNGRDMYVDQELDINRLSDYDVDHIVPQSFLKDDSIDNKVLTRSDKARGKSDNVPSEEVVKKMKNYWRQLLNAKLITQRKFDNLTKAERGGLSELDKAGFIKRQLVETRQITKHVAQILDSRMNTKYDENDKLIREVKVITLKSKLVSDFRKDFQFYKVREINNYHHAHDAYLNAVVGTALIKKYPKLESEFVYGDYKVYDVRKMIAKSEQEIGKATAKYFFYSNIMNFFKTEITLANGEIRKRPLIETNGETGEIVWDKGRDFATVRKVLSMPQVNIVKKTEVQTGGFSKESILPKRNSDKLIARKKDWDPKKYGGFDSPTVAYSVLVVAKVEKGKSKKLKSVKELLGITIMERSSFEKNPIDFLEAKGYKEVKKDLIIKLPKYSLFELENGRKRMLASAGELQKGNELALPSKYVNFLYLASHYEKLKGSPEDNEQKQLFVEQHKHYLDEIIEQISEFSKRVILADANLDKVLSAYNKHRDKPIREQAENIIHLFTLTNLGAPAAFKYFDTTIDRKRYTSTKEVLDATLIHQSITGLYETRIDLSQLGGDGGGSSEAAAKPAPGGTLNIEDEHRLHETSKEPDVSLGSTWLSDFPQAWAETGGMGLAVRQAPLIIPLKATSTPVSIKQYPMSQEARLGIKPHIQRLLDQGILVPCQSPWNTPLLPVKKPGTNDYRPVQDLREVNKRVEDIHPTVPNPYNLLSGLPPSHQWYTVLDLKDAFFCLRLHPTSQPLFAFEWRDPEMGISGQLTWTRLPQGFKNSPTLFNEALHRDLADFRIQHPDLILLQYVDDLLLAATSELDCQQGTRALLQTLGNLGYRASAKKAQICQKQVKYLGYLLKEGQRWLTEARKETVMGQPTPKTPRQLREFLGKAGFCRLFIPGFAEMAAPLYPLTKPGTLFNWGPDQQKAYQEIKQALLTAPALGLPDLTKPFELFVDEKQGYAKGVLTQKLGPWRRPVAYLSKKLDPVAAGWPPCLRMVAAIAVLTKDAGKLTMGQPLVILAPHAVEALVKQPPDRWLSNARMTHYQALLLDTDRVQFGPVVALNPATLLPLPEEGLQHNCLDILAEAHGTRPDLTDQPLPDADHTWYTDGSSLLQEGQRKAGAAVTTETEVIWAKALPAGTSAQRAELIALTQALKMAEGKKLNVYTDSRYAFATAHIHGEIYRRRGWLTSEGKEIKNKDEILALLKALFLPKRLSIIHCPGHQKGHSAEARGNRMADQAARKAAITETPDTSTLLAGKRTADGSEFEKRTADGSEFESPKKKAKVE

SEQ ID NO: 3106 - protein, 2094 aa, synthetic construct
MPAAKRVKLDGGDKKYSIGLDIGTNSVGWAVITDEYKVPSKKFKVLGNTDRHSIKKNLIGALLFDSGETAEATRLKRTARRRYTRRKNRICYLQEIFSNEMAKVDDSFFHRLEESFLVEEDKKHERHPIFGNIVDEVAYHEKYPTIYHLRKKLVDSTDKADLRLIYLALAHMIKFRGHFLIEGDLNPDNSDVDKLFIQLVQTYNQLFEENPINASGVDAKAILSARLSKSRRLENLIAQLPGEKKNGLFGNLIALSLGLTPNFKSNFDLAEDAKLQLSKDTYDDDLDNLLAQIGDQYADLFLAAKNLSDAILLSDILRVNTEITKAPLSASMIKRYDEHHQDLTLLKALVRQQLPEKYKEIFFDQSKNGYAGYIDGGASQEEFYKFIKPILEKMDGTEELLVKLNREDLLRKQRTFDNGSIPHQIHLGELHAILRRQEDFYPFLKDNREKIEKILTFRIPYYVGPLARGNSRFAWMTRKSEETITPWNFEEVVDKGASAQSFIERMTNFDKNLPNEKVLPKHSLLYEYFTVYNELTKVKYVTEGMRKPAFLSGEQKKAIVDLLFKTNRKVTVKQLKEDYFKKIECFDSVEISGVEDRFNASLGTYHDLLKIIKDKDFLDNEENEDILEDIVLTLTLFEDREMIEERLKTYAHLFDDKVMKQLKRRRYTGWGRLSRKLINGIRDKQSGKTILDFLKSDGFANRNFMQLIHDDSLTFKEDIQKAQVSGQGDSLHEHIANLAGSPAIKKGILQTVKVVDELVKVMGRHKPENIVIEMARENQTTQKGQKNSRERMKRIEEGIKELGSQILKEHPVENTQLQNEKLYLYYLQNGRDMYVDQELDINRLSDYDVDHIVPQSFLKDDSIDNKVLTRSDKARGKSDNVPSEEVVKKMKNYWRQLLNAKLITQRKFDNLTKAERGGLSELDKAGFIKRQLVETRQITKHVAQILDSRMNTKYDENDKLIREVKVITLKSKLVSDFRKDFQFYKVREINNYHHAHDAYLNAVVGTALIKKYPKLESEFVYGDYKVYDVRKMIAKSEQEIGKATAKYFFYSNIMNFFKTEITLANGEIRKRPLIETNGETGEIVWDKGRDFATVRKVLSMPQVNIVKKTEVQTGGFSKESILPKRNSDKLIARKKDWDPKKYGGFDSPTVAYSVLVVAKVEKGKSKKLKSVKELLGITIMERSSFEKNPIDFLEAKGYKEVKKDLIIKLPKYSLFELENGRKRMLASAGELQKGNELALPSKYVNFLYLASHYEKLKGSPEDNEQKQLFVEQHKHYLDEIIEQISEFSKRVILADANLDKVLSAYNKHRDKPIREQAENIIHLFTLTNLGAPAAFKYFDTTIDRKRYTSTKEVLDATLIHQSITGLYETRIDLSQLGGDGGPAPGSSGGSGGTLNIEDEHRLHETSKEPDVSLGSTWLSDFPQAWAETGGMGLAVRQAPLIIPLKATSTPVSIKQYPMSQEARLGIKPHIQRLLDQGILVPCQSPWNTPLLPVKKPGTNDYRPVQDLREVNKRVEDIHPTVPNPYNLLSGLPPSHQWYTVLDLKDAFFCLRLHPTSQPLFAFEWRDPEMGISGQLTWTRLPQGFKNSPTLFNEALHRDLADFRIQHPDLILLQYVDDLLLAATSELDCQQGTRALLQTLGNLGYRASAKKAQICQKQVKYLGYLLKEGQRWLTEARKETVMGQPTPKTPRQLREFLGKAGFCRLFIPGFAEMAAPLYPLTKPGTLFNWGPDQQKAYQEIKQALLTAPALGLPDLTKPFELFVDEKQGYAKGVLTQKLGPWRRPVAYLSKKLDPVAAGWPPCLRMVAAIAVLTKDAGKLTMGQPLVILAPHAVEALVKQPPDRWLSNARMTHYQALLLDTDRVQFGPVVALNPATLLPLPEEGLQHNCLDILAEAHGTRPDLTDQPLPDADHTWYTDGSSLLQEGQRKAGAAVTTETEVIWAKALPAGTSAQRAELIALTQALKMAEGKKLNVYTDSRYAFATAHIHGEIYRRRGWLTSEGKEIKNKDEILALLKALFLPKRLSIIHCPGHQKGHSAEARGNRMADQAARKAAITETPDTSTLLAGKRTADGSEFEKRTADGSEFESPKKKAKVE

SEQ ID NO: 3107 - protein, 2091 aa, synthetic construct; identical to SEQ ID NO: 2820

SEQ ID NO: 3108 - protein, 2096 aa, synthetic construct; identical to SEQ ID NO: 2782

SEQ ID NO: 3109 - protein, 2096 aa, synthetic construct; identical to SEQ ID NO: 2860

SEQ ID NO: 3110 - protein, 2095 aa, synthetic construct
MPAAKRVKLDGGDKKYSIGLDIGTNSVGWAVITDEYKVPSKKFKVLGNTDRHSIKKNLIGALLFDSGETAEATRLKRTARRRYTRRKNRICYLQEIFSNEMAKVDDSFFHRLEESFLVEEDKKHERHPIFGNIVDEVAYHEKYPTIYHLRKKLVDSTDKADLRLIYLALAHMIKFRGHFLIEGDLNPDNSDVDKLFIQLVQTYNQLFEENPINASGVDAKAILSARLSKSRRLENLIAQLPGEKKNGLFGNLIALSLGLTPNFKSNFDLAEDAKLQLSKDTYDDDLDNLLAQIGDQYADLFLAAKNLSDAILLSDILRVNTEITKAPLSASMIKRYDEHHQDLTLLKALVRQQLPEKYKEIFFDQSKNGYAGYIDGGASQEEFYKFIKPILEKMDGTEELLVKLNREDLLRKQRTFDNGSIPHQIHLGELHAILRRQEDFYPFLKDNREKIEKILTFRIPYYVGPLARGNSRFAWMTRKSEETITPWNFEEVVDKGASAQSFIERMTNFDKNLPNEKVLPKHSLLYEYFTVYNELTKVKYVTEGMRKPAFLSGEQKKAIVDLLFKTNRKVTVKQLKEDYFKKIECFDSVEISGVEDRFNASLGTYHDLLKIIKDKDFLDNEENEDILEDIVLTLTLFEDREMIEERLKTYAHLFDDKVMKQLKRRRYTGWGRLSRKLINGIRDKQSGKTILDFLKSDGFANRNFMQLIHDDSLTFKEDIQKAQVSGQGDSLHEHIANLAGSPAIKKGILQTVKVVDELVKVMGRHKPENIVIEMARENQTTQKGQKNSRERMKRIEEGIKELGSQILKEHPVENTQLQNEKLYLYYLQNGRDMYVDQELDINRLSDYDVDHIVPQSFLKDDSIDNKVLTRSDKARGKSDNVPSEEVVKKMKNYWRQLLNAKLITQRKFDNLTKAERGGLSELDKAGFIKRQLVETRQITKHVAQILDSRMNTKYDENDKLIREVKVITLKSKLVSDFRKDFQFYKVREINNYHHAHDAYLNAVVGTALIKKYPKLESEFVYGDYKVYDVRKMIAKSEQEIGKATAKYFFYSNIMNFFKTEITLANGEIRKRPLIETNGETGEIVWDKGRDFATVRKVLSMPQVNIVKKTEVQTGGFSKESILPKRNSDKLIARKKDWDPKKYGGFDSPTVAYSVLVVAKVEKGKSKKLKSVKELLGITIMERSSFEKNPIDFLEAKGYKEVKKDLIIKLPKYSLFELENGRKRMLASAGELQKGNELALPSKYVNFLYLASHYEKLKGSPEDNEQKQLFVEQHKHYLDEIIEQISEFSKRVILADANLDKVLSAYNKHRDKPIREQAENIIHLFTLTNLGAPAAFKYFDTTIDRKRYTSTKEVLDATLIHQSITGLYETRIDLSQLGGDGGGGGGSGGGGSGGTLNIEDEHRLHETSKEPDVSLGSTWLSDFPQAWAETGGMGLAVRQAPLIIPLKATSTPVSIKQYPMSQEARLGIKPHIQRLLDQGILVPCQSPWNTPLLPVKKPGTNDYRPVQDLREVNKRVEDIHPTVPNPYNLLSGLPPSHQWYTVLDLKDAFFCLRLHPTSQPLFAFEWRDPEMGISGQLTWTRLPQGFKNSPTLFNEALHRDLADFRIQHPDLILLQYVDDLLLAATSELDCQQGTRALLQTLGNLGYRASAKKAQICQKQVKYLGYLLKEGQRWLTEARKETVMGQPTPKTPRQLREFLGKAGFCRLFIPGFAEMAAPLYPLTKPGTLFNWGPDQQKAYQEIKQALLTAPALGLPDLTKPFELFVDEKQGYAKGVLTQKLGPWRRPVAYLSKKLDPVAAGWPPCLRMVAAIAVLTKDAGKLTMGQPLVILAPHAVEALVKQPPDRWLSNARMTHYQALLLDTDRVQFGPVVALNPATLLPLPEEGLQHNCLDILAEAHGTRPDLTDQPLPDADHTWYTDGSSLLQEGQRKAGAAVTTETEVIWAKALPAGTSAQRAELIALTQALKMAEGKKLNVYTDSRYAFATAHIHGEIYRRRGWLTSEGKEIKNKDEILALLKALFLPKRLSIIHCPGHQKGHSAEARGNRMADQAARKAAITETPDTSTLLAGKRTADGSEFEKRTADGSEFESPKKKAKVE

SEQ ID NO: 3111 - protein, 2094 aa, synthetic construct; identical to SEQ ID NO: 2800

SEQ ID NO: 3112 - protein, 2096 aa, synthetic construct; identical to SEQ ID NO: 2792

SEQ ID NO: 3113 - protein, 2091 aa, synthetic construct
MPAAKRVKLDGGDKKYSIGLDIGTNSVGWAVITDEYKVPSKKFKVLGNTDRHSIKKNLIGALLFDSGETAEATRLKRTARRRYTRRKNRICYLQEIFSNEMAKVDDSFFHRLEESFLVEEDKKHERHPIFGNIVDEVAYHEKYPTIYHLRKKLVDSTDKADLRLIYLALAHMIKFRGHFLIEGDLNPDNSDVDKLFIQLVQTYNQLFEENPINASGVDAKAILSARLSKSRRLENLIAQLPGEKKNGLFGNLIALSLGLTPNFKSNFDLAEDAKLQLSKDTYDDDLDNLLAQIGDQYADLFLAAKNLSDAILLSDILRVNTEITKAPLSASMIKRYDEHHQDLTLLKALVRQQLPEKYKEIFFDQSKNGYAGYIDGGASQEEFYKFIKPILEKMDGTEELLVKLNREDLLRKQRTFDNGSIPHQIHLGELHAILRRQEDFYPFLKDNREKIEKILTFRIPYYVGPLARGNSRFAWMTRKSEETITPWNFEEVVDKGASAQSFIERMTNFDKNLPNEKVLPKHSLLYEYFTVYNELTKVKYVTEGMRKPAFLSGEQKKAIVDLLFKTNRKVTVKQLKEDYFKKIECFDSVEISGVEDRFNASLGTYHDLLKIIKDKDFLDNEENEDILEDIVLTLTLFEDREMIEERLKTYAHLFDDKVMKQLKRRRYTGWGRLSRKLINGIRDKQSGKTILDFLKSDGFANRNFMQLIHDDSLTFKEDIQKAQVSGQGDSLHEHIANLAGSPAIKKGILQTVKVVDELVKVMGRHKPENIVIEMARENQTTQKGQKNSRERMKRIEEGIKELGSQILKEHPVENTQLQNEKLYLYYLQNGRDMYVDQELDINRLSDYDVDHIVPQSFLKDDSIDNKVLTRSDKARGKSDNVPSEEVVKKMKNYWRQLLNAKLITQRKFDNLTKAERGGLSELDKAGFIKRQLVETRQITKHVAQILDSRMNTKYDENDKLIREVKVITLKSKLVSDFRKDFQFYKVREINNYHHAHDAYLNAVVGTALIKKYPKLESEFVYGDYKVYDVRKMIAKSEQEIGKATAKYFFYSNIMNFFKTEITLANGEIRKRPLIETNGETGEIVWDKGRDFATVRKVLSMPQVNIVKKTEVQTGGFSKESILPKRNSDKLIARKKDWDPKKYGGFDSPTVAYSVLVVAKVEKGKSKKLKSVKELLGITIMERSSFEKNPIDFLEAKGYKEVKKDLIIKLPKYSLFELENGRKRMLASAGELQKGNELALPSKYVNFLYLASHYEKLKGSPEDNEQKQLFVEQHKHYLDEIIEQISEFSKRVILADANLDKVLSAYNKHRDKPIREQAENIIHLFTLTNLGAPAAFKYFDTTIDRKRYTSTKEVLDATLIHQSITGLYETRIDLSQLGGDGGGGSGSSGGTLNIEDEHRLHETSKEPDVSLGSTWLSDFPQAWAETGGMGLAVRQAPLIIPLKATSTPVSIKQYPMSQEARLGIKPHIQRLLDQGILVPCQSPWNTPLLPVKKPGTNDYRPVQDLREVNKRVEDIHPTVPNPYNLLSGLPPSHQWYTVLDLKDAFFCLRLHPTSQPLFAFEWRDPEMGISGQLTWTRLPQGFKNSPTLFNEALHRDLADFRIQHPDLILLQYVDDLLLAATSELDCQQGTRALLQTLGNLGYRASAKKAQICQKQVKYLGYLLKEGQRWLTEARKETVMGQPTPKTPRQLREFLGKAGFCRLFIPGFAEMAAPLYPLTKPGTLFNWGPDQQKAYQEIKQALLTAPALGLPDLTKPFELFVDEKQGYAKGVLTQKLGPWRRPVAYLSKKLDPVAAGWPPCLRMVAAIAVLTKDAGKLTMGQPLVILAPHAVEALVKQPPDRWLSNARMTHYQALLLDTDRVQFGPVVALNPATLLPLPEEGLQHNCLDILAEAHGTRPDLTDQPLPDADHTWYTDGSSLLQEGQRKAGAAVTTETEVIWAKALPAGTSAQRAELIALTQALKMAEGKKLNVYTDSRYAFATAHIHGEIYRRRGWLTSEGKEIKNKDEILALLKALFLPKRLSIIHCPGHQKGHSAEARGNRMADQAARKAAITETPDTSTLLAGKRTADGSEFEKRTADGSEFESPKKKAKVE

SEQ ID NO: 3114 - protein, 2090 aa, synthetic construct; identical to SEQ ID NO: 2834

SEQ ID NO: 3115 - protein, 2096 aa, synthetic construct
MPAAKRVKLDGGDKKYSIGLDIGTNSVGWAVITDEYKVPSKKFKVLGNTDRHSIKKNLIGALLFDSGETAEATRLKRTARRRYTRRKNRICYLQEIFSNEMAKVDDSFFHRLEESFLVEEDKKHERHPIFGNIVDEVAYHEKYPTIYHLRKKLVDSTDKADLRLIYLALAHMIKFRGHFLIEGDLNPDNSDVDKLFIQLVQTYNQLFEENPINASGVDAKAILSARLSKSRRLENLIAQLPGEKKNGLFGNLIALSLGLTPNFKSNFDLAEDAKLQLSKDTYDDDLDNLLAQIGDQYADLFLAAKNLSDAILLSDILRVNTEITKAPLSASMIKRYDEHHQDLTLLKALVRQQLPEKYKEIFFDQSKNGYAGYIDGGASQEEFYKFIKPILEKMDGTEELLVKLNREDLLRKQRTFDNGSIPHQIHLGELHAILRRQEDFYPFLKDNREKIEKILTFRIPYYVGPLARGNSRFAWMTRKSEETITPWNFEEVVDKGASAQSFIERMTNFDKNLPNEKVLPKHSLLYEYFTVYNELTKVKYVTEGMRKPAFLSGEQKKAIVDLLFKTNRKVTVKQLKEDYFKKIECFDSVEISGVEDRFNASLGTYHDLLKIIKDKDFLDNEENEDILEDIVLTLTLFEDREMIEERLKTYAHLFDDKVMKQLKRRRYTGWGRLSRKLINGIRDKQSGKTILDFLKSDGFANRNFMQLIHDDSLTFKEDIQKAQVSGQGDSLHEHIANLAGSPAIKKGILQTVKVVDELVKVMGRHKPENIVIEMARENQTTQKGQKNSRERMKRIEEGIKELGSQILKEHPVENTQLQNEKLYLYYLQNGRDMYVDQELDINRLSDYDVDHIVPQSFLKDDSIDNKVLTRSDKARGKSDNVPSEEVVKKMKNYWRQLLNAKLITQRKFDNLTKAERGGLSELDKAGFIKRQLVETRQITKHVAQILDSRMNTKYDENDKLIREVKVITLKSKLVSDFRKDFQFYKVREINNYHHAHDAYLNAVVGTALIKKYPKLESEFVYGDYKVYDVRKMIAKSEQEIGKATAKYFFYSNIMNFFKTEITLANGEIRKRPLIETNGETGEIVWDKGRDFATVRKVLSMPQVNIVKKTEVQTGGFSKESILPKRNSDKLIARKKDWDPKKYGGFDSPTVAYSVLVVAKVEKGKSKKLKSVKELLGITIMERSSFEKNPIDFLEAKGYKEVKKDLIIKLPKYSLFELENGRKRMLASAGELQKGNELALPSKYVNFLYLASHYEKLKGSPEDNEQKQLFVEQHKHYLDEIIEQISEFSKRVILADANLDKVLSAYNKHRDKPIREQAENIIHLFTLTNLGAPAAFKYFDTTIDRKRYTSTKEVLDATLIHQSITGLYETRIDLSQLGGDGGGGGGGSEAAAKGGTLNIEDEHRLHETSKEPDVSLGSTWLSDFPQAWAETGGMGLAVRQAPLIIPLKATSTPVSIKQYPMSQEARLGIKPHIQRLLDQGILVPCQSPWNTPLLPVKKPGTNDYRPVQDLREVNKRVEDIHPTVPNPYNLLSGLPPSHQWYTVLDLKDAFFCLRLHPTSQPLFAFEWRDPEMGISGQLTWTRLPQGFKNSPTLFNEALHRDLADFRIQHPDLILLQYVDDLLLAATSELDCQQGTRALLQTLGNLGYRASAKKAQICQKQVKYLGYLLKEGQRWLTEARKETVMGQPTPKTPRQLREFLGKAGFCRLFIPGFAEMAAPLYPLTKPGTLFNWGPDQQKAYQEIKQALLTAPALGLPDLTKPFELFVDEKQGYAKGVLTQKLGPWRRPVAYLSKKLDPVAAGWPPCLRMVAAIAVLTKDAGKLTMGQPLVILAPHAVEALVKQPPDRWLSNARMTHYQALLLDTDRVQFGPVVALNPATLLPLPEEGLQHNCLDILAEAHGTRPDLTDQPLPDADHTWYTDGSSLLQEGQRKAGAAVTTETEVIWAKALPAGTSAQRAELIALTQALKMAEGKKLNVYTDSRYAFATAHIHGEIYRRRGWLTSEGKEIKNKDEILALLKALFLPKRLSIIHCPGHQKGHSAEARGNRMADQAARKAAITETPDTSTLLAGKRTADGSEFEKRTADGSEFESPKKKAKVE

SEQ ID NO: 3116 - protein, 2096 aa, synthetic construct; identical to SEQ ID NO: 2789

SEQ ID NO: 3117 - protein, 2094 aa, synthetic construct; identical to SEQ ID NO: 2848

SEQ ID NO: 3118 - protein, 2096 aa, synthetic construct; identical to SEQ ID NO: 2805

SEQ ID NO: 3119 - protein, 2091 aa, synthetic construct; identical to SEQ ID NO: 2861

SEQ ID NO: 3120 - protein, 2115 aa, synthetic construct; identical to SEQ ID NO: 2813

SEQ ID NO: 3121 - protein, 2094 aa, synthetic construct
MPAAKRVKLDGGDKKYSIGLDIGTNSVGWAVITDEYKVPSKKFKVLGNTDRHSIKKNLIGALLFDSGETAEATRLKRTARRRYTRRKNRICYLQEIFSNEMAKVDDSFFHRLEESFLVEEDKKHERHPIFGNIVDEVAYHEKYPTIYHLRKKLVDSTDKADLRLIYLALAHMIKFRGHFLIEGDLNPDNSDVDKLFIQLVQTYNQLFEENPINASGVDAKAILSARLSKSRRLENLIAQLPGEKKNGLFGNLIALSLGLTPNFKSNFDLAEDAKLQLSKDTYDDDLDNLLAQIGDQYADLFLAAKNLSDAILLSDILRVNTEITKAPLSASMIKRYDEHHQDLTLLKALVRQQLPEKYKEIFFDQSKNGYAGYIDGGASQEEFYKFIKPILEKMDGTEELLVKLNREDLLRKQRTFDNGSIPHQIHLGELHAILRRQEDFYPFLKDNREKIEKILTFRIPYYVGPLARGNSRFAWMTRKSEETITPWNFEEVVDKGASAQSFIERMTNFDKNLPNEKVLPKHSLLYEYFTVYNELTKVKYVTEGMRKPAFLSGEQKKAIVDLLFKTNRKVTVKQLKEDYFKKIECFDSVEISGVEDRFNASLGTYHDLLKIIKDKDFLDNEENEDILEDIVLTLTLFEDREMIEERLKTYAHLFDDKVMKQLKRRRYTGWGRLSRKLINGIRDKQSGKTILDFLKSDGFANRNFMQLIHDDSLTFKEDIQKAQVSGQGDSLHEHIANLAGSPAIKKGILQTVKVVDELVKVMGRHKPENIVIEMARENQTTQKGQKNSRERMKRIEEGIKELGSQILKEHPVENTQLQNEKLYLYYLQNGRDMYVDQELDINRLSDYDVDHIVPQSFLKDDSIDNKVLTRSDKARGKSDNVPSEEVVKKMKNYWRQLLNAKLITQRKFDNLTKAERGGLSELDKAGFIKRQLVETRQITKHVAQILDSRMNTKYDENDKLIREVKVITLKSKLVSDFRKDFQFYKVREINNYHHAHDAYLNAVVGTALIKKYPKLESEFVYGDYKVYDVRKMIAKSEQEIGKATAKYFFYSNIMNFFKTEITLANGEIRKRPLIETNGETGEIVWDKGRDFATVRKVLSMPQVNIVKKTEVQTGGFSKESILPKRNSDKLIARKKDWDPKKYGGFDSPTVAYSVLVVAKVEKGKSKKLKSVKELLGITIMERSSFEKNPIDFLEAKGYKEVKKDLIIKLPKYSLFELENGRKRMLASAGELQKGNELALPSKYVNFLYLASHYEKLKGSPEDNEQKQLFVEQHKHYLDEIIEQISEFSKRVILADANLDKVLSAYNKHRDKPIREQAENIIHLFTLTNLGAPAAFKYFDTTIDRKRYTSTKEVLDATLIHQSITGLYETRIDLSQLGGDGGGGSGGGGSSGGTLNIEDEHRLHETSKEPDVSLGSTWLSDFPQAWAETGGMGLAVRQAPLIIPLKATSTPVSIKQYPMSQEARLGIKPHIQRLLDQGILVPCQSPWNTPLLPVKKPGTNDYRPVQDLREVNKRVEDIHPTVPNPYNLLSGLPPSHQWYTVLDLKDAFFCLRLHPTSQPLFAFEWRDPEMGISGQLTWTRLPQGFKNSPTLFNEALHRDLADFRIQHPDLILLQYVDDLLLAATSELDCQQGTRALLQTLGNLGYRASAKKAQICQKQVKYLGYLLKEGQRWLTEARKETVMGQPTPKTPRQLREFLGKAGFCRLFIPGFAEMAAPLYPLTKPGTLFNWGPDQQKAYQEIKQALLTAPALGLPDLTKPFELFVDEKQGYAKGVLTQKLGPWRRPVAYLSKKLDPVAAGWPPCLRMVAAIAVLTKDAGKLTMGQPLVILAPHAVEALVKQPPDRWLSNARMTHYQALLLDTDRVQFGPVVALNPATLLPLPEEGLQHNCLDILAEAHGTRPDLTDQPLPDADHTWYTDGSSLLQEGQRKAGAAVTTETEVIWAKALPAGTSAQRAELIALTQALKMAEGKKLNVYTDSRYAFATAHIHGEIYRRRGWLTSEGKEIKNKDEILALLKALFLPKRLSIIHCPGHQKGHSAEARGNRMADQAARKAAITETPDTSTLLAGKRTADGSEFEKRTADGSEFESPKKKAKVE

SEQ ID NO: 3122 - protein, 2094 aa, synthetic construct
MPAAKRVKLDGGDKKYSIGLDIGTNSVGWAVITDEYKVPSKKFKVLGNTDRHSIKKNLIGALLFDSGETAEATRLKRTARRRYTRRKNRICYLQEIFSNEMAKVDDSFFHRLEESFLVEEDKKHERHPIFGNIVDEVAYHEKYPTIYHLRKKLVDSTDKADLRLIYLALAHMIKFRGHFLIEGDLNPDNSDVDKLFIQLVQTYNQLFEENPINASGVDAKAILSARLSKSRRLENLIAQLPGEKKNGLFGNLIALSLGLTPNFKSNFDLAEDAKLQLSKDTYDDDLDNLLAQIGDQYADLFLAAKNLSDAILLSDILRVNTEITKAPLSASMIKRYDEHHQDLTLLKALVRQQLPEKYKEIFFDQSKNGYAGYIDGGASQEEFYKFIKPILEKMDGTEELLVKLNREDLLRKQRTFDNGSIPHQIHLGELHAILRRQEDFYPFLKDNREKIEKILTFRIPYYVGPLARGNSRFAWMTRKSEETITPWNFEEVVDKGASAQSFIERMTNFDKNLPNEKVLPKHSLLYEYFTVYNELTKVKYVTEGMRKPAFLSGEQKKAIVDLLFKTNRKVTVKQLKEDYFKKIECFDSVEISGVEDRFNASLGTYHDLLKIIKDKDFLDNEENEDILEDIVLTLTLFEDREMIEERLKTYAHLFDDKVMKQLKRRRYTGWGRLSRKLINGIRDKQSGKTILDFLKSDGFANRNFMQLIHDDSLTFKEDIQKAQVSGQGDSLHEHIANLAGSPAIKKGILQTVKVVDELVKVMGRHKPENIVIEMARENQTTQKGQKNSRERMKRIEEGIKELGSQILKEHPVENTQLQNEKLYLYYLQNGRDMYVDQELDINRLSDYDVDHIVPQSFLKDDSIDNKVLTRSDKARGKSDNVPSEEVVKKMKNYWRQLLNAKLITQRKFDNLTKAERGGLSELDKAGFIKRQLVETRQITKHVAQILDSRMNTKYDENDKLIREVKVITLKSKLVSDFRKDFQFYKVREINNYHHAHDAYLNAVVGTALIKKYPKLESEFVYGDYKVYDVRKMIAKSEQEIGKATAKYFFYSNIMNFFKTEITLANGEIRKRPLIETNGETGEIVWDKGRDFATVRKVLSMPQVNIVKKTEVQTGGFSKESILPKRNSDKLIARKKDWDPKKYGGFDSPTVAYSVLVVAKVEKGKSKKLKSVKELLGITIMERSSFEKNPIDFLEAKGYKEVKKDLIIKLPKYSLFELENGRKRMLASAGELQKGNELALPSKYVNFLYLASHYEKLKGSPEDNEQKQLFVEQHKHYLDEIIEQISEFSKRVILADANLDKVLSAYNKHRDKPIREQAENIIHLFTLTNLGAPAAFKYFDTTIDRKRYTSTKEVLDATLIHQSITGLYETRIDLSQLGGDGGGGSGSSPAPGGTLNIEDEHRLHETSKEPDVSLGSTWLSDFPQAWAETGGMGLAVRQAPLIIPLKATSTPVSIKQYPMSQEARLGIKPHIQRLLDQGILVPCQSPWNTPLLPVKKPGTNDYRPVQDLREVNKRVEDIHPTVPNPYNLLSGLPPSHQWYTVLDLKDAFFCLRLHPTSQPLFAFEWRDPEMGISGQLTWTRLPQGFKNSPTLFNEALHRDLADFRIQHPDLILLQYVDDLLLAATSELDCQQGTRALLQTLGNLGYRASAKKAQICQKQVKYLGYLLKEGQRWLTEARKETVMGQPTPKTPRQLREFLGKAGFCRLFIPGFAEMAAPLYPLTKPGTLFNWGPDQQKAYQEIKQALLTAPALGLPDLTKPFELFVDEKQGYAKGVLTQKLGPWRRPVAYLSKKLDPVAAGWPPCLRMVAAIAVLTKDAGKLTMGQPLVILAPHAVEALVKQPPDRWLSNARMTHYQALLLDTDRVQFGPVVALNPATLLPLPEEGLQHNCLDILAEAHGTRPDLTDQPLPDADHTWYTDGSSLLQEGQRKAGAAVTTETEVIWAKALPAGTSAQRAELIALTQALKMAEGKKLNVYTDSRYAFATAHIHGEIYRRRGWLTSEGKEIKNKDEILALLKALFLPKRLSIIHCPGHQKGHSAEARGNRMADQAARKAAITETPDTSTLLAGKRTADGSEFEKRTADGSEFESPKKKAKVE

SEQ ID NO: 3123 - protein, 2090 aa, synthetic construct; identical to SEQ ID NO: 2823

SEQ ID NO: 3124 - protein, 2094 aa, synthetic construct; identical to SEQ ID NO: 2833

SEQ ID NO: 3125 - protein, 2096 aa, synthetic construct; identical to SEQ ID NO: 2794

SEQ ID NO: 3126 - protein, 2100 aa, synthetic construct; identical to SEQ ID NO: 2802

SEQ ID NO: 3127 - protein, 2096 aa, synthetic construct; identical to SEQ ID NO: 2839

SEQ ID NO: 3128 - protein, 2094 aa, synthetic construct; identical to SEQ ID NO: 2841

SEQ ID NO: 3129 - protein, 2096 aa, synthetic construct
MPAAKRVKLDGGDKKYSIGLDIGTNSVGWAVITDEYKVPSKKFKVLGNTDRHSIKKNLIGALLFDSGETAEATRLKRTARRRYTRRKNRICYLQEIFSNEMAKVDDSFFHRLEESFLVEEDKKHERHPIFGNIVDEVAYHEKYPTIYHLRKKLVDSTDKADLRLIYLALAHMIKFRGHFLIEGDLNPDNSDVDKLFIQLVQTYNQLFEENPINASGVDAKAILSARLSKSRRLENLIAQLPGEKKNGLFGNLIALSLGLTPNFKSNFDLAEDAKLQLSKDTYDDDLDNLLAQIGDQYADLFLAAKNLSDAILLSDILRVNTEITKAPLSASMIKRYDEHHQDLTLLKALVRQQLPEKYKEIFFDQSKNGYAGYIDGGASQEEFYKFIKPILEKMDGTEELLVKLNREDLLRKQRTFDNGSIPHQIHLGELHAILRRQEDFYPFLKDNREKIEKILTFRIPYYVGPLARGNSRFAWMTRKSEETITPWNFEEVVDKGASAQSFIERMTNFDKNLPNEKVLPKHSLLYEYFTVYNELTKVKYVTEGMRKPAFLSGEQKKAIVDLLFKTNRKVTVKQLKEDYFKKIECFDSVEISGVEDRFNASLGTYHDLLKIIKDKDFLDNEENEDILEDIVLTLTLFEDREMIEERLKTYAHLFDDKVMKQLKRRRYTGWGRLSRKLINGIRDKQSGKTILDFLKSDGFANRNFMQLIHDDSLTFKEDIQKAQVSGQGDSLHEHIANLAGSPAIKKGILQTVKVVDELVKVMGRHKPENIVIEMARENQTTQKGQKNSRERMKRIEEGIKELGSQILKEHPVENTQLQNEKLYLYYLQNGRDMYVDQELDINRLSDYDVDHIVPQSFLKDDSIDNKVLTRSDKARGKSDNVPSEEVVKKMKNYWRQLLNAKLITQRKFDNLTKAERGGLSELDKAGFIKRQLVETRQITKHVAQILDSRMNTKYDENDKLIREVKVITLKSKLVSDFRKDFQFYKVREINNYHHAHDAYLNAVVGTALIKKYPKLESEFVYGDYKVYDVRKMIAKSEQEIGKATAKYFFYSNIMNFFKTEITLANGEIRKRPLIETNGETGEIVWDKGRDFATVRKVLSMPQVNIVKKTEVQTGGFSKESILPKRNSDKLIARKKDWDPKKYGGFDSPTVAYSVLVVAKVEKGKSKKLKSVKELLGITIMERSSFEKNPIDFLEAKGYKEVKKDLIIKLPKYSLFELENGRKRMLASAGELQKGNELALPSKYVNFLYLASHYEKLKGSPEDNEQKQLFVEQHKHYLDEIIEQISEFSKRVILADANLDKVLSAYNKHRDKPIREQAENIIHLFTLTNLGAPAAFKYFDTTIDRKRYTSTKEVLDATLIHQSITGLYETRIDLSQLGGDGGGGSGGGEAAAKGGTLNIEDEHRLHETSKEPDVSLGSTWLSDFPQAWAETGGMGLAVRQAPLIIPLKATSTPVSIKQYPMSQEARLGIKPHIQRLLDQGILVPCQSPWNTPLLPVKKPGTNDYRPVQDLREVNKRVEDIHPTVPNPYNLLSGLPPSHQWYTVLDLKDAFFCLRLHPTSQPLFAFEWRDPEMGISGQLTWTRLPQGFKNSPTLFNEALHRDLADFRIQHPDLILLQYVDDLLLAATSELDCQQGTRALLQTLGNLGYRASAKKAQICQKQVKYLGYLLKEGQRWLTEARKETVMGQPTPKTPRQLREFLGKAGFCRLFIPGFAEMAAPLYPLTKPGTLFNWGPDQQKAYQEIKQALLTAPALGLPDLTKPFELFVDEKQGYAKGVLTQKLGPWRRPVAYLSKKLDPVAAGWPPCLRMVAAIAVLTKDAGKLTMGQPLVILAPHAVEALVKQPPDRWLSNARMTHYQALLLDTDRVQFGPVVALNPATLLPLPEEGLQHNCLDILAEAHGTRPDLTDQPLPDADHTWYTDGSSLLQEGQRKAGAAVTTETEVIWAKALPAGTSAQRAELIALTQALKMAEGKKLNVYTDSRYAFATAHIHGEIYRRRGWLTSEGKEIKNKDEILALLKALFLPKRLSIIHCPGHQKGHSAEARGNRMADQAARKAAITETPDTSTLLAGKRTADGSEFEKRTADGSEFESPKKKAKVE

SEQ ID NO: 3130 - protein, 2094 aa, synthetic construct; identical to SEQ ID NO: 2801

SEQ ID NO: 3131 - protein, 2096 aa, synthetic construct
MPAAKRVKLDGGDKKYSIGLDIGTNSVGWAVITDEYKVPSKKFKVLGNTDRHSIKKNLIGALLFDSGETAEATRLKRTARRRYTRRKNRICYLQEIFSNEMAKVDDSFFHRLEESFLVEEDKKHERHPIFGNIVDEVAYHEKYPTIYHLRKKLVDSTDKADLRLIYLALAHMIKFRGHFLIEGDLNPDNSDVDKLFIQLVQTYNQLFEENPINASGVDAKAILSARLSKSRRLENLIAQLPGEKKNGLFGNLIALSLGLTPNFKSNFDLAEDAKLQLSKDTYDDDLDNLLAQIGDQYADLFLAAKNLSDAILLSDILRVNTEITKAPLSASMIKRYDEHHQDLTLLKALVRQQLPEKYKEIFFDQSKNGYAGYIDGGASQEEFYKFIKPILEKMDGTEELLVKLNREDLLRKQRTFDNGSIPHQIHLGELHAILRRQEDFYPFLKDNREKIEKILTFRIPYYVGPLARGNSRFAWMTRKSEETITPWNFEEVVDKGASAQSFIERMTNFDKNLPNEKVLPKHSLLYEYFTVYNELTKVKYVTEGMRKPAFLSGEQKKAIVDLLFKTNRKVTVKQLKEDYFKKIECFDSVEISGVEDRFNASLGTYHDLLKIIKDKDFLDNEENEDILEDIVLTLTLFEDREMIEERLKTYAHLFDDKVMKQLKRRRYTGWGRLSRKLINGIRDKQSGKTILDFLKSDGFANRNFMQLIHDDSLTFKEDIQKAQVSGQGDSLHEHIANLAGSPAIKKGILQTVKVVDELVKVMGRHKPENIVIEMARENQTTQKGQKNSRERMKRIEEGIKELGSQILKEHPVENTQLQNEKLYLYYLQNGRDMYVDQELDINRLSDYDVDHIVPQSFLKDDSIDNKVLTRSDKARGKSDNVPSEEVVKKMKNYWRQLLNAKLITQRKFDNLTKAERGGLSELDKAGFIKRQLVETRQITKHVAQILDSRMNTKYDENDKLIREVKVITLKSKLVSDFRKDFQFYKVREINNYHHAHDAYLNAVVGTALIKKYPKLESEFVYGDYKVYDVRKMIAKSEQEIGKATAKYFFYSNIMNFFKTEITLANGEIRKRPLIETNGETGEIVWDKGRDFATVRKVLSMPQVNIVKKTEVQTGGFSKESILPKRNSDKLIARKKDWDPKKYGGFDSPTVAYSVLVVAKVEKGKSKKLKSVKELLGITIMERSSFEKNPIDFLEAKGYKEVKKDLIIKLPKYSLFELENGRKRMLASAGELQKGNELALPSKYVNFLYLASHYEKLKGSPEDNEQKQLFVEQHKHYLDEIIEQISEFSKRVILADANLDKVLSAYNKHRDKPIREQAENIIHLFTLTNLGAPAAFKYFDTTIDRKRYTSTKEVLDATLIHQSITGLYETRIDLSQLGGDGGGSSEAAAKGGSGGTLNIEDEHRLHETSKEPDVSLGSTWLSDFPQAWAETGGMGLAVRQAPLIIPLKATSTPVSIKQYPMSQEARLGIKPHIQRLLDQGILVPCQSPWNTPLLPVKKPGTNDYRPVQDLREVNKRVEDIHPTVPNPYNLLSGLPPSHQWYTVLDLKDAFFCLRLHPTSQPLFAFEWRDPEMGISGQLTWTRLPQGFKNSPTLFNEALHRDLADFRIQHPDLILLQYVDDLLLAATSELDCQQGTRALLQTLGNLGYRASAKKAQICQKQVKYLGYLLKEGQRWLTEARKETVMGQPTPKTPRQLREFLGKAGFCRLFIPGFAEMAAPLYPLTKPGTLFNWGPDQQKAYQEIKQALLTAPALGLPDLTKPFELFVDEKQGYAKGVLTQKLGPWRRPVAYLSKKLDPVAAGWPPCLRMVAAIAVLTKDAGKLTMGQPLVILAPHAVEALVKQPPDRWLSNARMTHYQALLLDTDRVQFGPVVALNPATLLPLPEEGLQHNCLDILAEAHGTRPDLTDQPLPDADHTWYTDGSSLLQEGQRKAGAAVTTETEVIWAKALPAGTSAQRAELIALTQALKMAEGKKLNVYTDSRYAFATAHIHGEIYRRRGWLTSEGKEIKNKDEILALLKALFLPKRLSIIHCPGHQKGHSAEARGNRMADQAARKAAITETPDTSTLLAGKRTADGSEFEKRTADGSEFESPKKKAKVE

SEQ ID NO: 3132 - protein, 2118 aa, synthetic construct
MPAAKRVKLDGGDKKYSIGLDIGTNSVGWAVITDEYKVPSKKFKVLGNTDRHSIKKNLIGALLFDSGETAEATRLKRTARRRYTRRKNRICYLQEIFSNEMAKVDDSFFHRLEESFLVEEDKKHERHPIFGNIVDEVAYHEKYPTIYHLRKKLVDSTDKADLRLIYLALAHMIKFRGHFLIEGDLNPDNSDVDKLFIQLVQTYNQLFEENPINASGVDAKAILSARLSKSRRLENLIAQLPGEKKNGLFGNLIALSLGLTPNFKSNFDLAEDAKLQLSKDTYDDDLDNLLAQIGDQYADLFLAAKNLSDAILLSDILRVNTEITKAPLSASMIKRYDEHHQDLTLLKALVRQQLPEKYKEIFFDQSKNGYAGYIDGGASQEEFYKFIKPILEKMDGTEELLVKLNREDLLRKQRTFDNGSIPHQIHLGELHAILRRQEDFYPFLKDNREKIEKILTFRIPYYVGPLARGNSRFAWMTRKSEETITPWNFEEVVDKGASAQSFIERMTNFDKNLPNEKVLPKHSLLYEYFTVYNELTKVKYVTEGMRKPAFLSGEQKKAIVDLLFKTNRKVTVKQLKEDYFKKIECFDSVEISGVEDRFNASLGTYHDLLKIIKDKDFLDNEENEDILEDIVLTLTLFEDREMIEERLKTYAHLFDDKVMKQLKRRRYTGWGRLSRKLINGIRDKQSGKTILDFLKSDGFANRNFMQLIHDDSLTFKEDIQKAQVSGQGDSLHEHIANLAGSPAIKKGILQTVKVVDELVKVMGRHKPENIVIEMARENQTTQKGQKNSRERMKRIEEGIKELGSQILKEHPVENTQLQNEKLYLYYLQNGRDMYVDQELDINRLSDYDVDHIVPQSFLKDDSIDNKVLTRSDKARGKSDNVPSEEVVKKMKNYWRQLLNAKLITQRKFDNLTKAERGGLSELDKAGFIKRQLVETRQITKHVAQILDSRMNTKYDENDKLIREVKVITLKSKLVSDFRKDFQFYKVREINNYHHAHDAYLNAVVGTALIKKYPKLESEFVYGDYKVYDVRKMIAKSEQEIGKATAKYFFYSNIMNFFKTEITLANGEIRKRPLIETNGETGEIVWDKGRDFATVRKVLSMPQVNIVKKTEVQTGGFSKESILPKRNSDKLIARKKDWDPKKYGGFDSPTVAYSVLVVAKVEKGKSKKLKSVKELLGITIMERSSFEKNPIDFLEAKGYKEVKKDLIIKLPKYSLFELENGRKRMLASAGELQKGNELALPSKYVNFLYLASHYEKLKGSPEDNEQKQLFVEQHKHYLDEIIEQISEFSKRVILADANLDKVLSAYNKHRDKPIREQAENIIHLFTLTNLGAPAAFKYFDTTIDRKRYTSTKEVLDATLIHQSITGLYETRIDLSQLGGDGGSGGSSGGSSGSETPGTSESATPESSGGSSGGSSGGTLNIEDEHRLHETSKEPDVSLGSTWLSDFPQAWAETGGMGLAVRQAPLIIPLKATSTPVSIKQYPMSQEARLGIKPHIQRLLDQGILVPCQSPWNTPLLPVKKPGTNDYRPVQDLREVNKRVEDIHPTVPNPYNLLSGLPPSHQWYTVLDLKDAFFCLRLHPTSQPLFAFEWRDPEMGISGQLTWTRLPQGFKNSPTLFNEALHRDLADFRIQHPDLILLQYVDDLLLAATSELDCQQGTRALLQTLGNLGYRASAKKAQICQKQVKYLGYLLKEGQRWLTEARKETVMGQPTPKTPRQLREFLGKAGFCRLFIPGFAEMAAPLYPLTKPGTLFNWGPDQQKAYQEIKQALLTAPALGLPDLTKPFELFVDEKQGYAKGVLTQKLGPWRRPVAYLSKKLDPVAAGWPPCLRMVAAIAVLTKDAGKLTMGQPLVILAPHAVEALVKQPPDRWLSNARMTHYQALLLDTDRVQFGPVVALNPATLLPLPEEGLQHNCLDILAEAHGTRPDLTDQPLPDADHTWYTDGSSLLQEGQRKAGAAVTTETEVIWAKALPAGTSAQRAELIALTQALKMAEGKKLNVYTDSRYAFATAHIHGEIYRRRGWLTSEGKEIKNKDEILALLKALFLPKRLSIIHCPGHQKGHSAEARGNRMADQAARKAAITETPDTSTLLAGKRTADGSEFEKRTADGSEFESPKKKAKVE

SEQ ID NO: 3133 - protein, 2094 aa, synthetic construct; identical to SEQ ID NO: 2859

SEQ ID NO: 3134 - protein, 2094 aa, synthetic construct; identical to SEQ ID NO: 2854

SEQ ID NO: 3135 - protein, 2091 aa, synthetic construct; identical to SEQ ID NO: 2832

SEQ ID NO: 3136 - protein, 2096 aa, synthetic construct
MPAAKRVKLDGGDKKYSIGLDIGTNSVGWAVITDEYKVPSKKFKVLGNTDRHSIKKNLIGALLFDSGETAEATRLKRTARRRYTRRKNRICYLQEIFSNEMAKVDDSFFHRLEESFLVEEDKKHERHPIFGNIVDEVAYHEKYPTIYHLRKKLVDSTDKADLRLIYLALAHMIKFRGHFLIEGDLNPDNSDVDKLFIQLVQTYNQLFEENPINASGVDAKAILSARLSKSRRLENLIAQLPGEKKNGLFGNLIALSLGLTPNFKSNFDLAEDAKLQLSKDTYDDDLDNLLAQIGDQYADLFLAAKNLSDAILLSDILRVNTEITKAPLSASMIKRYDEHHQDLTLLKALVRQQLPEKYKEIFFDQSKNGYAGYIDGGASQEEFYKFIKPILEKMDGTEELLVKLNREDLLRKQRTFDNGSIPHQIHLGELHAILRRQEDFYPFLKDNREKIEKILTFRIPYYVGPLARGNSRFAWMTRKSEETITPWNFEEVVDKGASAQSFIERMTNFDKNLPNEKVLPKHSLLYEYFTVYNELTKVKYVTEGMRKPAFLSGEQKKAIVDLLFKTNRKVTVKQLKEDYFKKIECFDSVEISGVEDRFNASLGTYHDLLKIIKDKDFLDNEENEDILEDIVLTLTLFEDREMIEERLKTYAHLFDDKVMKQLKRRRYTGWGRLSRKLINGIRDKQSGKTILDFLKSDGFANRNFMQLIHDDSLTFKEDIQKAQVSGQGDSLHEHIANLAGSPAIKKGILQTVKVVDELVKVMGRHKPENIVIEMARENQTTQKGQKNSRERMKRIEEGIKELGSQILKEHPVENTQLQNEKLYLYYLQNGRDMYVDQELDINRLSDYDVDHIVPQSFLKDDSIDNKVLTRSDKARGKSDNVPSEEVVKKMKNYWRQLLNAKLITQRKFDNLTKAERGGLSELDKAGFIKRQLVETRQITKHVAQILDSRMNTKYDENDKLIREVKVITLKSKLVSDFRKDFQFYKVREINNYHHAHDAYLNAVVGTALIKKYPKLESEFVYGDYKVYDVRKMIAKSEQEIGKATAKYFFYSNIMNFFKTEITLANGEIRKRPLIETNGETGEIVWDKGRDFATVRKVLSMPQVNIVKKTEVQTGGFSKESILPKRNSDKLIARKKDWDPKKYGGFDSPTVAYSVLVVAKVEKGKSKKLKSVKELLGITIMERSSFEKNPIDFLEAKGYKEVKKDLIIKLPKYSLFELENGRKRMLASAGELQKGNELALPSKYVNFLYLASHYEKLKGSPEDNEQKQLFVEQHKHYLDEIIEQISEFSKRVILADANLDKVLSAYNKHRDKPIREQAENIIHLFTLTNLGAPAAFKYFDTTIDRKRYTSTKEVLDATLIHQSITGLYETRIDLSQLGGDGGGGGPAPEAAAKGGTLNIEDEHRLHETSKEPDVSLGSTWLSDFPQAWAETGGMGLAVRQAPLIIPLKATSTPVSIKQYPMSQEARLGIKPHIQRLLDQGILVPCQSPWNTPLLPVKKPGTNDYRPVQDLREVNKRVEDIHPTVPNPYNLLSGLPPSHQWYTVLDLKDAFFCLRLHPTSQPLFAFEWRDPEMGISGQLTWTRLPQGFKNSPTLFNEALHRDLADFRIQHPDLILLQYVDDLLLAATSELDCQQGTRALLQTLGNLGYRASAKKAQICQKQVKYLGYLLKEGQRWLTEARKETVMGQPTPKTPRQLREFLGKAGFCRLFIPGFAEMAAPLYPLTKPGTLFNWGPDQQKAYQEIKQALLTAPALGLPDLTKPFELFVDEKQGYAKGVLTQKLGPWRRPVAYLSKKLDPVAAGWPPCLRMVAAIAVLTKDAGKLTMGQPLVILAPHAVEALVKQPPDRWLSNARMTHYQALLLDTDRVQFGPVVALNPATLLPLPEEGLQHNCLDILAEAHGTRPDLTDQPLPDADHTWYTDGSSLLQEGQRKAGAAVTTETEVIWAKALPAGTSAQRAELIALTQALKMAEGKKLNVYTDSRYAFATAHIHGEIYRRRGWLTSEGKEIKNKDEILALLKALFLPKRLSIIHCPGHQKGHSAEARGNRMADQAARKAAITETPDTSTLLAGKRTADGSEFEKRTADGSEFESPKKKAKVE

SEQ ID NO: 3137 - protein, 2091 aa, synthetic construct
MPAAKRVKLDGGDKKYSIGLDIGTNSVGWAVITDEYKVPSKKFKVLGNTDRHSIKKNLIGALLFDSGETAEATRLKRTARRRYTRRKNRICYLQEIFSNEMAKVDDSFFHRLEESFLVEEDKKHERHPIFGNIVDEVAYHEKYPTIYHLRKKLVDSTDKADLRLIYLALAHMIKFRGHFLIEGDLNPDNSDVDKLFIQLVQTYNQLFEENPINASGVDAKAILSARLSKSRRLENLIAQLPGEKKNGLFGNLIALSLGLTPNFKSNFDLAEDAKLQLSKDTYDDDLDNLLAQIGDQYADLFLAAKNLSDAILLSDILRVNTEITKAPLSASMIKRYDEHHQDLTLLKALVRQQLPEKYKEIFFDQSKNGYAGYIDGGASQEEFYKFIKPILEKMDGTEELLVKLNREDLLRKQRTFDNGSIPHQIHLGELHAILRRQEDFYPFLKDNREKIEKILTFRIPYYVGPLARGNSRFAWMTRKSEETITPWNFEEVVDKGASAQSFIERMTNFDKNLPNEKVLPKHSLLYEYFTVYNELTKVKYVTEGMRKPAFLSGEQKKAIVDLLFKTNRKVTVKQLKEDYFKKIECFDSVEISGVEDRFNASLGTYHDLLKIIKDKDFLDNEENEDILEDIVLTLTLFEDREMIEERLKTYAHLFDDKVMKQLKRRRYTGWGRLSRKLINGIRDKQSGKTILDFLKSDGFANRNFMQLIHDDSLTFKEDIQKAQVSGQGDSLHEHIANLAGSPAIKKGILQTVKVVDELVKVMGRHKPENIVIEMARENQTTQKGQKNSRERMKRIEEGIKELGSQILKEHPVENTQLQNEKLYLYYLQNGRDMYVDQELDINRLSDYDVDHIVPQSFLKDDSIDNKVLTRSDKARGKSDNVPSEEVVKKMKNYWRQLLNAKLITQRKFDNLTKAERGGLSELDKAGFIKRQLVETRQITKHVAQILDSRMNTKYDENDKLIREVKVITLKSKLVSDFRKDFQFYKVREINNYHHAHDAYLNAVVGTALIKKYPKLESEFVYGDYKVYDVRKMIAKSEQEIGKATAKYFFYSNIMNFFKTEITLANGEIRKRPLIETNGETGEIVWDKGRDFATVRKVLSMPQVNIVKKTEVQTGGFSKESILPKRNSDKLIARKKDWDPKKYGGFDSPTVAYSVLVVAKVEKGKSKKLKSVKELLGITIMERSSFEKNPIDFLEAKGYKEVKKDLIIKLPKYSLFELENGRKRMLASAGELQKGNELALPSKYVNFLYLASHYEKLKGSPEDNEQKQLFVEQHKHYLDEIIEQISEFSKRVILADANLDKVLSAYNKHRDKPIREQAENIIHLFTLTNLGAPAAFKYFDTTIDRKRYTSTKEVLDATLIHQSITGLYETRIDLSQLGGDGGPAPGGGGGTLNIEDEYRLHEISTEPDVSPGSTWLSDFPQAWAETGGMGLAVRQAPLIIPLKATSTPVSIKQYPMSQEAKLGIKPHIQRLLDQGILVPCQSPWNTPLLPVKKPGTNDYRPVQGLREVNKRVEDIHPTVPNPYNLLSGLPTSHRWYTVLDLKDAFFCLRLHPTSQPLFASEWRDPGMGISGQLTWTRLPQGFKNSPTLFDEALHRGLADFRIQHPDLILLQYVDDLLLAATSELDCQQGTRALLKTLGNLGYRASAKKAQICQKQVKYLGYLLREGQRWLTEARKETVMGQPTPKTPRQLREFLGTAGFCRLWIPRFAEMAAPLYPLTKTGTLFNWGPDQQKAYHEIKQALLTAPALGLPDLTKPFELFVDEKQGYAKGVLTQKLGPWRRPVAYLSKKLDPVAAGWPPCLRMVAAIAVLTKDAGKLTMGQPLVILAPHAVEALVKQPPDRWLSNARMTHYQAMLLDTDRVQFGPVVALNPATLLPLPEEGAPHDCLEILAETHGTEPDLTDQPIPDADHTWYTDGSSFLQEGQRKAGAAVTTETEVIWARALPAGTSAQRAELIALTQALKMAEGKRLNVYTDSRYAFATAHIHGEIYKRRGLLTSEGREIKNKSEILALLKALFLPKRLSIIHCLGHQKGDSAEARGNRLADQAAREAAIKTPPDTSTLLAGKRTADGSEFEKRTADGSEFESPKKKAKVE

SEQ ID NO: 3138 - protein, 2088 aa, synthetic construct
MPAAKRVKLDGGDKKYSIGLDIGTNSVGWAVITDEYKVPSKKFKVLGNTDRHSIKKNLIGALLFDSGETAEATRLKRTARRRYTRRKNRICYLQEIFSNEMAKVDDSFFHRLEESFLVEEDKKHERHPIFGNIVDEVAYHEKYPTIYHLRKKLVDSTDKADLRLIYLALAHMIKFRGHFLIEGDLNPDNSDVDKLFIQLVQTYNQLFEENPINASGVDAKAILSARLSKSRRLENLIAQLPGEKKNGLFGNLIALSLGLTPNFKSNFDLAEDAKLQLSKDTYDDDLDNLLAQIGDQYADLFLAAKNLSDAILLSDILRVNTEITKAPLSASMIKRYDEHHQDLTLLKALVRQQLPEKYKEIFFDQSKNGYAGYIDGGASQEEFYKFIKPILEKMDGTEELLVKLNREDLLRKQRTFDNGSIPHQIHLGELHAILRRQEDFYPFLKDNREKIEKILTFRIPYYVGPLARGNSRFAWMTRKSEETITPWNFEEVVDKGASAQSFIERMTNFDKNLPNEKVLPKHSLLYEYFTVYNELTKVKYVTEGMRKPAFLSGEQKKAIVDLLFKTNRKVTVKQLKEDYFKKIECFDSVEISGVEDRFNASLGTYHDLLKIIKDKDFLDNEENEDILEDIVLTLTLFEDREMIEERLKTYAHLFDDKVMKQLKRRRYTGWGRLSRKLINGIRDKQSGKTILDFLKSDGFANRNFMQLIHDDSLTFKEDIQKAQVSGQGDSLHEHIANLAGSPAIKKGILQTVKVVDELVKVMGRHKPENIVIEMARENQTTQKGQKNSRERMKRIEEGIKELGSQILKEHPVENTQLQNEKLYLYYLQNGRDMYVDQELDINRLSDYDVDHIVPQSFLKDDSIDNKVLTRSDKARGKSDNVPSEEVVKKMKNYWRQLLNAKLITQRKFDNLTKAERGGLSELDKAGFIKRQLVETRQITKHVAQILDSRMNTKYDENDKLIREVKVITLKSKLVSDFRKDFQFYKVREINNYHHAHDAYLNAVVGTALIKKYPKLESEFVYGDYKVYDVRKMIAKSEQEIGKATAKYFFYSNIMNFFKTEITLANGEIRKRPLIETNGETGEIVWDKGRDFATVRKVLSMPQVNIVKKTEVQTGGFSKESILPKRNSDKLIARKKDWDPKKYGGFDSPTVAYSVLVVAKVEKGKSKKLKSVKELLGITIMERSSFEKNPIDFLEAKGYKEVKKDLIIKLPKYSLFELENGRKRMLASAGELQKGNELALPSKYVNFLYLASHYEKLKGSPEDNEQKQLFVEQHKHYLDEIIEQISEFSKRVILADANLDKVLSAYNKHRDKPIREQAENIIHLFTLTNLGAPAAFKYFDTTIDRKRYTSTKEVLDATLIHQSITGLYETRIDLSQLGGDGGGGSGGTLNIEDEYRLHEISTEPDVSPGSTWLSDFPQAWAETGGMGLAVRQAPLIIPLKATSTPVSIKQYPMSQEAKLGIKPHIQRLLDQGILVPCQSPWNTPLLPVKKPGTNDYRPVQGLREVNKRVEDIHPTVPNPYNLLSGLPTSHRWYTVLDLKDAFFCLRLHPTSQPLFASEWRDPGMGISGQLTWTRLPQGFKNSPTLFNEALHRGLADFRIQHPDLILLQYVDDLLLAATSELDCQQGTRALLKTLGNLGYRASAKKAQICQKQVKYLGYLLREGQRWLTEARKETVMGQPTPKTPRQLREFLGTAGFCRLWIPRFAEMAAPLYPLTKPGTLFNWGPDQQKAYHEIKQALLTAPALGLPDLTKPFELFVDEKQGYAKGVLTQKLGPWRRPVAYLSKKLDPVAAGWPPCLRMVAAIAVLTKDAGKLTMGQPLVILAPHAVEALVKQPPDRWLSNARMTHYQAMLLDTDRVQFGPVVALNPATLLPLPEEGAPHDCLEILAETHGTEPDLTDQPIPDADHTWYTDGSSFLQEGQRKAGAAVTTETEVIWARALPAGTSAQRAELIALTQALKMAEGKRLNVYTDSRYAFATAHIHGEIYKRRGWLTSEGREIKNKSEILALLKALFLPKRLSIIHCLGHQKGDSAEARGNRLADQAAREAAIKTPPDTSTLLAGKRTADGSEFEKRTADGSEFESPKKKAKVE

SEQ ID NO: 3139 - protein, 2091 aa, synthetic construct
MPAAKRVKLDGGDKKYSIGLDIGTNSVGWAVITDEYKVPSKKFKVLGNTDRHSIKKNLIGALLFDSGETAEATRLKRTARRRYTRRKNRICYLQEIFSNEMAKVDDSFFHRLEESFLVEEDKKHERHPIFGNIVDEVAYHEKYPTIYHLRKKLVDSTDKADLRLIYLALAHMIKFRGHFLIEGDLNPDNSDVDKLFIQLVQTYNQLFEENPINASGVDAKAILSARLSKSRRLENLIAQLPGEKKNGLFGNLIALSLGLTPNFKSNFDLAEDAKLQLSKDTYDDDLDNLLAQIGDQYADLFLAAKNLSDAILLSDILRVNTEITKAPLSASMIKRYDEHHQDLTLLKALVRQQLPEKYKEIFFDQSKNGYAGYIDGGASQEEFYKFIKPILEKMDGTEELLVKLNREDLLRKQRTFDNGSIPHQIHLGELHAILRRQEDFYPFLKDNREKIEKILTFRIPYYVGPLARGNSRFAWMTRKSEETITPWNFEEVVDKGASAQSFIERMTNFDKNLPNEKVLPKHSLLYEYFTVYNELTKVKYVTEGMRKPAFLSGEQKKAIVDLLFKTNRKVTVKQLKEDYFKKIECFDSVEISGVEDRFNASLGTYHDLLKIIKDKDFLDNEENEDILEDIVLTLTLFEDREMIEERLKTYAHLFDDKVMKQLKRRRYTGWGRLSRKLINGIRDKQSGKTILDFLKSDGFANRNFMQLIHDDSLTFKEDIQKAQVSGQGDSLHEHIANLAGSPAIKKGILQTVKVVDELVKVMGRHKPENIVIEMARENQTTQKGQKNSRERMKRIEEGIKELGSQILKEHPVENTQLQNEKLYLYYLQNGRDMYVDQELDINRLSDYDVDHIVPQSFLKDDSIDNKVLTRSDKARGKSDNVPSEEVVKKMKNYWRQLLNAKLITQRKFDNLTKAERGGLSELDKAGFIKRQLVETRQITKHVAQILDSRMNTKYDENDKLIREVKVITLKSKLVSDFRKDFQFYKVREINNYHHAHDAYLNAVVGTALIKKYPKLESEFVYGDYKVYDVRKMIAKSEQEIGKATAKYFFYSNIMNFFKTEITLANGEIRKRPLIETNGETGEIVWDKGRDFATVRKVLSMPQVNIVKKTEVQTGGFSKESILPKRNSDKLIARKKDWDPKKYGGFDSPTVAYSVLVVAKVEKGKSKKLKSVKELLGITIMERSSFEKNPIDFLEAKGYKEVKKDLIIKLPKYSLFELENGRKRMLASAGELQKGNELALPSKYVNFLYLASHYEKLKGSPEDNEQKQLFVEQHKHYLDEIIEQISEFSKRVILADANLDKVLSAYNKHRDKPIREQAENIIHLFTLTNLGAPAAFKYFDTTIDRKRYTSTKEVLDATLIHQSITGLYETRIDLSQLGGDGGPAPGGSGGTLNIEDEYRLHEISTEPDVSPGSTWLSDFPQAWAETGGMGLAVRQAPLIIPLKATSTPVSIKQYPMSQEAKLGIKPHIQRLLDQGILVPCQSPWNTPLLPVKKPGTNDYRPVQGLREVNKRVEDIHPTVPNPYNLLSGLPTSHRWYTVLDLKDAFFCLRLHPTSQPLFASEWRDPGMGISGQLTWTRLPQGFKNSPTLFNEALHRGLADFRIQHPDLILLQYVDDLLLAATSELDCQQGTRALLKTLGNLGYRASAKKAQICQKQVKYLGYLLREGQRWLTEARKETVMGQPTPKTPRQLREFLGTAGFCRLWIPRFAEMAAPLYPLTKPGTLFNWGPDQQKAYHEIKQALLTAPALGLPDLTKPFELFVDEKQGYAKGVLTQKLGPWRRPVAYLSKKLDPVAAGWPPCLRMVAAIAVLTKDAGKLTMGQPLVILAPHAVEALVKQPPDRWLSNARMTHYQAMLLDTDRVQFGPVVALNPATLLPLPEEGAPHDCLEILAETHGTEPDLTDQPIPDADHTWYTDGSSFLQEGQRKAGAAVTTETEVIWARALPAGTSAQRAELIALTQALKMAEGKRLNVYTDSRYAFATAHIHGEIYKRRGWLTSEGREIKNKSEILALLKALFLPKRLSIIHCLGHQKGDSAEARGNRLADQAAREAAIKTPPDTSTLLAGKRTADGSEFEKRTADGSEFESPKKKAKVE

SEQ ID NO: 3140 - protein, 2105 aa, synthetic construct
MPAAKRVKLDGGDKKYSIGLDIGTNSVGWAVITDEYKVPSKKFKVLGNTDRHSIKKNLIGALLFDSGETAEATRLKRTARRRYTRRKNRICYLQEIFSNEMAKVDDSFFHRLEESFLVEEDKKHERHPIFGNIVDEVAYHEKYPTIYHLRKKLVDSTDKADLRLIYLALAHMIKFRGHFLIEGDLNPDNSDVDKLFIQLVQTYNQLFEENPINASGVDAKAILSARLSKSRRLENLIAQLPGEKKNGLFGNLIALSLGLTPNFKSNFDLAEDAKLQLSKDTYDDDLDNLLAQIGDQYADLFLAAKNLSDAILLSDILRVNTEITKAPLSASMIKRYDEHHQDLTLLKALVRQQLPEKYKEIFFDQSKNGYAGYIDGGASQEEFYKFIKPILEKMDGTEELLVKLNREDLLRKQRTFDNGSIPHQIHLGELHAILRRQEDFYPFLKDNREKIEKILTFRIPYYVGPLARGNSRFAWMTRKSEETITPWNFEEVVDKGASAQSFIERMTNFDKNLPNEKVLPKHSLLYEYFTVYNELTKVKYVTEGMRKPAFLSGEQKKAIVDLLFKTNRKVTVKQLKEDYFKKIECFDSVEISGVEDRFNASLGTYHDLLKIIKDKDFLDNEENEDILEDIVLTLTLFEDREMIEERLKTYAHLFDDKVMKQLKRRRYTGWGRLSRKLINGIRDKQSGKTILDFLKSDGFANRNFMQLIHDDSLTFKEDIQKAQVSGQGDSLHEHIANLAGSPAIKKGILQTVKVVDELVKVMGRHKPENIVIEMARENQTTQKGQKNSRERMKRIEEGIKELGSQILKEHPVENTQLQNEKLYLYYLQNGRDMYVDQELDINRLSDYDVDHIVPQSFLKDDSIDNKVLTRSDKARGKSDNVPSEEVVKKMKNYWRQLLNAKLITQRKFDNLTKAERGGLSELDKAGFIKRQLVETRQITKHVAQILDSRMNTKYDENDKLIREVKVITLKSKLVSDFRKDFQFYKVREINNYHHAHDAYLNAVVGTALIKKYPKLESEFVYGDYKVYDVRKMIAKSEQEIGKATAKYFFYSNIMNFFKTEITLANGEIRKRPLIETNGETGEIVWDKGRDFATVRKVLSMPQVNIVKKTEVQTGGFSKESILPKRNSDKLIARKKDWDPKKYGGFDSPTVAYSVLVVAKVEKGKSKKLKSVKELLGITIMERSSFEKNPIDFLEAKGYKEVKKDLIIKLPKYSLFELENGRKRMLASAGELQKGNELALPSKYVNFLYLASHYEKLKGSPEDNEQKQLFVEQHKHYLDEIIEQISEFSKRVILADANLDKVLSAYNKHRDKPIREQAENIIHLFTLTNLGAPAAFKYFDTTIDRKRYTSTKEVLDATLIHQSITGLYETRIDLSQLGGDGGEAAAKEAAAKEAAAKEAAAKGGTLNIEDEYRLHEISTEPDVSPGSTWLSDFPQAWAETGGMGLAVRQAPLIIPLKATSTPVSIKQYPMSQEAKLGIKPHIQRLLDQGILVPCQSPWNTPLLPVKKPGTNDYRPVQGLREVNKRVEDIHPTVPNPYNLLSGLPTSHRWYTVLDLKDAFFCLRLHPTSQPLFASEWRDPGMGISGQLTWTRLPQGFKNSPTLFNEALHRGLADFRIQHPDLILLQYVDDLLLAATSELDCQQGTRALLKTLGNLGYRASAKKAQICQKQVKYLGYLLREGQRWLTEARKETVMGQPTPKTPRQLREFLGTAGFCRLWIPRFAEMAAPLYPLTKPGTLFNWGPDQQKAYHEIKQALLTAPALGLPDLTKPFELFVDEKQGYAKGVLTQKLGPWRRPVAYLSKKLDPVAAGWPPCLRMVAAIAVLTKDAGKLTMGQPLVILAPHAVEALVKQPPDRWLSNARMTHYQAMLLDTDRVQFGPVVALNPATLLPLPEEGAPHDCLEILAETHGTEPDLTDQPIPDADHTWYTDGSSFLQEGQRKAGAAVTTETEVIWARALPAGTSAQRAELIALTQALKMAEGKRLNVYTDSRYAFATAHIHGEIYKRRGWLTSEGREIKNKSEILALLKALFLPKRLSIIHCLGHQKGDSAEARGNRLADQAAREAAIKTPPDTSTLLAGKRTADGSEFEKRTADGSEFESPKKKAKVE

SEQ ID NO: 3141 - protein, 2151 aa, synthetic construct
MPAAKRVKLDGGDKKYSIGLDIGTNSVGWAVITDEYKVPSKKFKVLGNTDRHSIKKNLIGALLFDSGETAEATRLKRTARRRYTRRKNRICYLQEIFSNEMAKVDDSFFHRLEESFLVEEDKKHERHPIFGNIVDEVAYHEKYPTIYHLRKKLVDSTDKADLRLIYLALAHMIKFRGHFLIEGDLNPDNSDVDKLFIQLVQTYNQLFEENPINASGVDAKAILSARLSKSRRLENLIAQLPGEKKNGLFGNLIALSLGLTPNFKSNFDLAEDAKLQLSKDTYDDDLDNLLAQIGDQYADLFLAAKNLSDAILLSDILRVNTEITKAPLSASMIKRYDEHHQDLTLLKALVRQQLPEKYKEIFFDQSKNGYAGYIDGGASQEEFYKFIKPILEKMDGTEELLVKLNREDLLRKQRTFDNGSIPHQIHLGELHAILRRQEDFYPFLKDNREKIEKILTFRIPYYVGPLARGNSRFAWMTRKSEETITPWNFEEVVDKGASAQSFIERMTNFDKNLPNEKVLPKHSLLYEYFTVYNELTKVKYVTEGMRKPAFLSGEQKKAIVDLLFKTNRKVTVKQLKEDYFKKIECFDSVEISGVEDRFNASLGTYHDLLKIIKDKDFLDNEENEDILEDIVLTLTLFEDREMIEERLKTYAHLFDDKVMKQLKRRRYTGWGRLSRKLINGIRDKQSGKTILDFLKSDGFANRNFMQLIHDDSLTFKEDIQKAQVSGQGDSLHEHIANLAGSPAIKKGILQTVKVVDELVKVMGRHKPENIVIEMARENQTTQKGQKNSRERMKRIEEGIKELGSQILKEHPVENTQLQNEKLYLYYLQNGRDMYVDQELDINRLSDYDVDHIVPQSFLKDDSIDNKVLTRSDKARGKSDNVPSEEVVKKMKNYWRQLLNAKLITQRKFDNLTKAERGGLSELDKAGFIKRQLVETRQITKHVAQILDSRMNTKYDENDKLIREVKVITLKSKLVSDFRKDFQFYKVREINNYHHAHDAYLNAVVGTALIKKYPKLESEFVYGDYKVYDVRKMIAKSEQEIGKATAKYFFYSNIMNFFKTEITLANGEIRKRPLIETNGETGEIVWDKGRDFATVRKVLSMPQVNIVKKTEVQTGGFSKESILPKRNSDKLIARKKDWDPKKYGGFDSPTVAYSVLVVAKVEKGKSKKLKSVKELLGITIMERSSFEKNPIDFLEAKGYKEVKKDLIIKLPKYSLFELENGRKRMLASAGELQKGNELALPSKYVNFLYLASHYEKLKGSPEDNEQKQLFVEQHKHYLDEIIEQISEFSKRVILADANLDKVLSAYNKHRDKPIREQAENIIHLFTLTNLGAPAAFKYFDTTIDRKRYTSTKEVLDATLIHQSITGLYETRIDLSQLGGDGGAEAAAKEAAAKEAAAKEAAAKALEAEAAAKEAAAKEAAAKEAAAKAGGVQEISDSRPMLHIYLNGRRFLGLLDTGADKTCIAGRDWPANWPIHQTESSLQGLGMACGVARSSQPLRWQHEDKSGIIHPFVIPTLPFTLWGRDIMKDIKVRLMTDSPDDSQDLMIGAIESNLFADQISWKSDQPVWLNQWPLKQEKLQALQQLVTEQLQLGHLEESNSPWNTPVFVIKKKSGKWRLLQDLRAVNATMHDMGALQPGLPSPVAVPKGWEIIIIDLQDCFFNIKLHPEDCKRFAFSVPSPNFKRPYQRFQWKVLPQGMKNSPTLCQKFVDKAILTVRDKYQDSYIVHYMDDILLAHPSRSIVDEILTSMIQALNKHGLVVSTEKIQKYDNLKYLGTHIQGDSVSYQKLQIRTDKLRTLNDFQKLLGNINWIRPFLKLTTGELKPLFEILNGDSNPISTRKLTPEACKALQLMNERLSTARVKRLDLSQPWSLCILKTEYTPTACLWQDGVVEWIHLPHISPKVITPYDIFCTQLIIKGRHRSKELFSKDPDYIVVPYTKVQFDLLLQEKEDWPISLLGFLGEVHFHLPKDPLLTFTLQTAIIFPHMTSTTPLEKGIVIFTDGSANGRSVTYIQGREPIIKENTQNTAQQAEIVAVITAFEEVSQPFNLYTDSKYVTGLFPEIETATLSPRTKIYTELKHLQRLIHKRQEKFYIGHIRGHTGLPGPLAQGNAYADSLTRILTAAGKRTADGSEFEKRTADGSEFESPKKKAKVE

SEQ ID NO: 3142 - protein, 2130 aa, synthetic construct
MPAAKRVKLDGGDKKYSIGLDIGTNSVGWAVITDEYKVPSKKFKVLGNTDRHSIKKNLIGALLFDSGETAEATRLKRTARRRYTRRKNRICYLQEIFSNEMAKVDDSFFHRLEESFLVEEDKKHERHPIFGNIVDEVAYHEKYPTIYHLRKKLVDSTDKADLRLIYLALAHMIKFRGHFLIEGDLNPDNSDVDKLFIQLVQTYNQLFEENPINASGVDAKAILSARLSKSRRLENLIAQLPGEKKNGLFGNLIALSLGLTPNFKSNFDLAEDAKLQLSKDTYDDDLDNLLAQIGDQYADLFLAAKNLSDAILLSDILRVNTEITKAPLSASMIKRYDEHHQDLTLLKALVRQQLPEKYKEIFFDQSKNGYAGYIDGGASQEEFYKFIKPILEKMDGTEELLVKLNREDLLRKQRTFDNGSIPHQIHLGELHAILRRQEDFYPFLKDNREKIEKILTFRIPYYVGPLARGNSRFAWMTRKSEETITPWNFEEVVDKGASAQSFIERMTNFDKNLPNEKVLPKHSLLYEYFTVYNELTKVKYVTEGMRKPAFLSGEQKKAIVDLLFKTNRKVTVKQLKEDYFKKIECFDSVEISGVEDRFNASLGTYHDLLKIIKDKDFLDNEENEDILEDIVLTLTLFEDREMIEERLKTYAHLFDDKVMKQLKRRRYTGWGRLSRKLINGIRDKQSGKTILDFLKSDGFANRNFMQLIHDDSLTFKEDIQKAQVSGQGDSLHEHIANLAGSPAIKKGILQTVKVVDELVKVMGRHKPENIVIEMARENQTTQKGQKNSRERMKRIEEGIKELGSQILKEHPVENTQLQNEKLYLYYLQNGRDMYVDQELDINRLSDYDVDHIVPQSFLKDDSIDNKVLTRSDKARGKSDNVPSEEVVKKMKNYWRQLLNAKLITQRKFDNLTKAERGGLSELDKAGFIKRQLVETRQITKHVAQILDSRMNTKYDENDKLIREVKVITLKSKLVSDFRKDFQFYKVREINNYHHAHDAYLNAVVGTALIKKYPKLESEFVYGDYKVYDVRKMIAKSEQEIGKATAKYFFYSNIMNFFKTEITLANGEIRKRPLIETNGETGEIVWDKGRDFATVRKVLSMPQVNIVKKTEVQTGGFSKESILPKRNSDKLIARKKDWDPKKYGGFDSPTVAYSVLVVAKVEKGKSKKLKSVKELLGITIMERSSFEKNPIDFLEAKGYKEVKKDLIIKLPKYSLFELENGRKRMLASAGELQKGNELALPSKYVNFLYLASHYEKLKGSPEDNEQKQLFVEQHKHYLDEIIEQISEFSKRVILADANLDKVLSAYNKHRDKPIREQAENIIHLFTLTNLGAPAAFKYFDTTIDRKRYTSTKEVLDATLIHQSITGLYETRIDLSQLGGDGGEAAAKEAAAKEAAAKEAAAKEAAAKGGVQEISDSRPMLHIYLNGRRFLGLLDTGADKTCIAGRDWPANWPIHQTESSLQGLGMACGVARSSQPLRWQHEDKSGIIHPFVIPTLPFTLWGRDIMKDIKVRLMTDSPDDSQDLMIGAIESNLFADQISWKSDQPVWLNQWPLKQEKLQALQQLVTEQLQLGHLEESNSPWNTPVFVIKKKSGKWRLLQDLRAVNATMHDMGALQPGLPSPVAVPKGWEIIIIDLQDCFFNIKLHPEDCKRFAFSVPSPNFKRPYQRFQWKVLPQGMKNSPTLCQKFVDKAILTVRDKYQDSYIVHYMDDILLAHPSRSIVDEILTSMIQALNKHGLVVSTEKIQKYDNLKYLGTHIQGDSVSYQKLQIRTDKLRTLNDFQKLLGNINWIRPFLKLTTGELKPLFEILNGDSNPISTRKLTPEACKALQLMNERLSTARVKRLDLSQPWSLCILKTEYTPTACLWQDGVVEWIHLPHISPKVITPYDIFCTQLIIKGRHRSKELFSKDPDYIVVPYTKVQFDLLLQEKEDWPISLLGFLGEVHFHLPKDPLLTFTLQTAIIFPHMTSTTPLEKGIVIFTDGSANGRSVTYIQGREPIIKENTQNTAQQAEIVAVITAFEEVSQPFNLYTDSKYVTGLFPEIETATLSPRTKIYTELKHLQRLIHKRQEKFYIGHIRGHTGLPGPLAQGNAYADSLTRILTAAGKRTADGSEFEKRTADGSEFESPKKKAKVE

SEQ ID NO: 3143 - protein, 2138 aa, synthetic construct
MPAAKRVKLDGGDKKYSIGLDIGTNSVGWAVITDEYKVPSKKFKVLGNTDRHSIKKNLIGALLFDSGETAEATRLKRTARRRYTRRKNRICYLQEIFSNEMAKVDDSFFHRLEESFLVEEDKKHERHPIFGNIVDEVAYHEKYPTIYHLRKKLVDSTDKADLRLIYLALAHMIKFRGHFLIEGDLNPDNSDVDKLFIQLVQTYNQLFEENPINASGVDAKAILSARLSKSRRLENLIAQLPGEKKNGLFGNLIALSLGLTPNFKSNFDLAEDAKLQLSKDTYDDDLDNLLAQIGDQYADLFLAAKNLSDAILLSDILRVNTEITKAPLSASMIKRYDEHHQDLTLLKALVRQQLPEKYKEIFFDQSKNGYAGYIDGGASQEEFYKFIKPILEKMDGTEELLVKLNREDLLRKQRTFDNGSIPHQIHLGELHAILRRQEDFYPFLKDNREKIEKILTFRIPYYVGPLARGNSRFAWMTRKSEETITPWNFEEVVDKGASAQSFIERMTNFDKNLPNEKVLPKHSLLYEYFTVYNELTKVKYVTEGMRKPAFLSGEQKKAIVDLLFKTNRKVTVKQLKEDYFKKIECFDSVEISGVEDRFNASLGTYHDLLKIIKDKDFLDNEENEDILEDIVLTLTLFEDREMIEERLKTYAHLFDDKVMKQLKRRRYTGWGRLSRKLINGIRDKQSGKTILDFLKSDGFANRNFMQLIHDDSLTFKEDIQKAQVSGQGDSLHEHIANLAGSPAIKKGILQTVKVVDELVKVMGRHKPENIVIEMARENQTTQKGQKNSRERMKRIEEGIKELGSQILKEHPVENTQLQNEKLYLYYLQNGRDMYVDQELDINRLSDYDVDHIVPQSFLKDDSIDNKVLTRSDKARGKSDNVPSEEVVKKMKNYWRQLLNAKLITQRKFDNLTKAERGGLSELDKAGFIKRQLVETRQITKHVAQILDSRMNTKYDENDKLIREVKVITLKSKLVSDFRKDFQFYKVREINNYHHAHDAYLNAVVGTALIKKYPKLESEFVYGDYKVYDVRKMIAKSEQEIGKATAKYFFYSNIMNFFKTEITLANGEIRKRPLIETNGETGEIVWDKGRDFATVRKVLSMPQVNIVKKTEVQTGGFSKESILPKRNSDKLIARKKDWDPKKYGGFDSPTVAYSVLVVAKVEKGKSKKLKSVKELLGITIMERSSFEKNPIDFLEAKGYKEVKKDLIIKLPKYSLFELENGRKRMLASAGELQKGNELALPSKYVNFLYLASHYEKLKGSPEDNEQKQLFVEQHKHYLDEIIEQISEFSKRVILADANLDKVLSAYNKHRDKPIREQAENIIHLFTLTNLGAPAAFKYFDTTIDRKRYTSTKEVLDATLIHQSITGLYETRIDLSQLGGDGGSGGSSGGSSGSETPGTSESATPESSGGSSGGSSGGVQEISDSRPMLHIYLNGRRFLGLLDTGADKTCIAGRDWPANWPIHQTESSLQGLGMACGVARSSQPLRWQHEDKSGIIHPFVIPTLPFTLWGRDIMKDIKVRLMTDSPDDSQDLMIGAIESNLFADQISWKSDQPVWLNQWPLKQEKLQALQQLVTEQLQLGHLEESNSPWNTPVFVIKKKSGKWRLLQDLRAVNATMHDMGALQPGLPSPVAVPKGWEIIIIDLQDCFFNIKLHPEDCKRFAFSVPSPNFKRPYQRFQWKVLPQGMKNSPTLCQKFVDKAILTVRDKYQDSYIVHYMDDILLAHPSRSIVDEILTSMIQALNKHGLVVSTEKIQKYDNLKYLGTHIQGDSVSYQKLQIRTDKLRTLNDFQKLLGNINWIRPFLKLTTGELKPLFEILNGDSNPISTRKLTPEACKALQLMNERLSTARVKRLDLSQPWSLCILKTEYTPTACLWQDGVVEWIHLPHISPKVITPYDIFCTQLIIKGRHRSKELFSKDPDYIVVPYTKVQFDLLLQEKEDWPISLLGFLGEVHFHLPKDPLLTFTLQTAIIFPHMTSTTPLEKGIVIFTDGSANGRSVTYIQGREPIIKENTQNTAQQAEIVAVITAFEEVSQPFNLYTDSKYVTGLFPEIETATLSPRTKIYTELKHLQRLIHKRQEKFYIGHIRGHTGLPGPLAQGNAYADSLTRILTAAGKRTADGSEFEKRTADGSEFESPKKKAKVE

SEQ ID NO: 3144 - protein, 2116 aa, synthetic construct
MPAAKRVKLDGGDKKYSIGLDIGTNSVGWAVITDEYKVPSKKFKVLGNTDRHSIKKNLIGALLFDSGETAEATRLKRTARRRYTRRKNRICYLQEIFSNEMAKVDDSFFHRLEESFLVEEDKKHERHPIFGNIVDEVAYHEKYPTIYHLRKKLVDSTDKADLRLIYLALAHMIKFRGHFLIEGDLNPDNSDVDKLFIQLVQTYNQLFEENPINASGVDAKAILSARLSKSRRLENLIAQLPGEKKNGLFGNLIALSLGLTPNFKSNFDLAEDAKLQLSKDTYDDDLDNLLAQIGDQYADLFLAAKNLSDAILLSDILRVNTEITKAPLSASMIKRYDEHHQDLTLLKALVRQQLPEKYKEIFFDQSKNGYAGYIDGGASQEEFYKFIKPILEKMDGTEELLVKLNREDLLRKQRTFDNGSIPHQIHLGELHAILRRQEDFYPFLKDNREKIEKILTFRIPYYVGPLARGNSRFAWMTRKSEETITPWNFEEVVDKGASAQSFIERMTNFDKNLPNEKVLPKHSLLYEYFTVYNELTKVKYVTEGMRKPAFLSGEQKKAIVDLLFKTNRKVTVKQLKEDYFKKIECFDSVEISGVEDRFNASLGTYHDLLKIIKDKDFLDNEENEDILEDIVLTLTLFEDREMIEERLKTYAHLFDDKVMKQLKRRRYTGWGRLSRKLINGIRDKQSGKTILDFLKSDGFANRNFMQLIHDDSLTFKEDIQKAQVSGQGDSLHEHIANLAGSPAIKKGILQTVKVVDELVKVMGRHKPENIVIEMARENQTTQKGQKNSRERMKRIEEGIKELGSQILKEHPVENTQLQNEKLYLYYLQNGRDMYVDQELDINRLSDYDVDHIVPQSFLKDDSIDNKVLTRSDKARGKSDNVPSEEVVKKMKNYWRQLLNAKLITQRKFDNLTKAERGGLSELDKAGFIKRQLVETRQITKHVAQILDSRMNTKYDENDKLIREVKVITLKSKLVSDFRKDFQFYKVREINNYHHAHDAYLNAVVGTALIKKYPKLESEFVYGDYKVYDVRKMIAKSEQEIGKATAKYFFYSNIMNFFKTEITLANGEIRKRPLIETNGETGEIVWDKGRDFATVRKVLSMPQVNIVKKTEVQTGGFSKESILPKRNSDKLIARKKDWDPKKYGGFDSPTVAYSVLVVAKVEKGKSKKLKSVKELLGITIMERSSFEKNPIDFLEAKGYKEVKKDLIIKLPKYSLFELENGRKRMLASAGELQKGNELALPSKYVNFLYLASHYEKLKGSPEDNEQKQLFVEQHKHYLDEIIEQISEFSKRVILADANLDKVLSAYNKHRDKPIREQAENIIHLFTLTNLGAPAAFKYFDTTIDRKRYTSTKEVLDATLIHQSITGLYETRIDLSQLGGDGGGGGEAAAKGGSGGVQEISDSRPMLHIYLNGRRFLGLLDTGADKTCIAGRDWPANWPIHQTESSLQGLGMACGVARSSQPLRWQHEDKSGIIHPFVIPTLPFTLWGRDIMKDIKVRLMTDSPDDSQDLMIGAIESNLFADQISWKSDQPVWLNQWPLKQEKLQALQQLVTEQLQLGHLEESNSPWNTPVFVIKKKSGKWRLLQDLRAVNATMHDMGALQPGLPSPVAVPKGWEIIIIDLQDCFFNIKLHPEDCKRFAFSVPSPNFKRPYQRFQWKVLPQGMKNSPTLCQKFVDKAILTVRDKYQDSYIVHYMDDILLAHPSRSIVDEILTSMIQALNKHGLVVSTEKIQKYDNLKYLGTHIQGDSVSYQKLQIRTDKLRTLNDFQKLLGNINWIRPFLKLTTGELKPLFEILNGDSNPISTRKLTPEACKALQLMNERLSTARVKRLDLSQPWSLCILKTEYTPTACLWQDGVVEWIHLPHISPKVITPYDIFCTQLIIKGRHRSKELFSKDPDYIVVPYTKVQFDLLLQEKEDWPISLLGFLGEVHFHLPKDPLLTFTLQTAIIFPHMTSTTPLEKGIVIFTDGSANGRSVTYIQGREPIIKENTQNTAQQAEIVAVITAFEEVSQPFNLYTDSKYVTGLFPEIETATLSPRTKIYTELKHLQRLIHKRQEKFYIGHIRGHTGLPGPLAQGNAYADSLTRILTAAGKRTADGSEFEKRTADGSEFESPKKKAKVE

SEQ ID NO: 3145 - protein, 2113 aa, synthetic construct
MPAAKRVKLDGGDKKYSIGLDIGTNSVGWAVITDEYKVPSKKFKVLGNTDRHSIKKNLIGALLFDSGETAEATRLKRTARRRYTRRKNRICYLQEIFSNEMAKVDDSFFHRLEESFLVEEDKKHERHPIFGNIVDEVAYHEKYPTIYHLRKKLVDSTDKADLRLIYLALAHMIKFRGHFLIEGDLNPDNSDVDKLFIQLVQTYNQLFEENPINASGVDAKAILSARLSKSRRLENLIAQLPGEKKNGLFGNLIALSLGLTPNFKSNFDLAEDAKLQLSKDTYDDDLDNLLAQIGDQYADLFLAAKNLSDAILLSDILRVNTEITKAPLSASMIKRYDEHHQDLTLLKALVRQQLPEKYKEIFFDQSKNGYAGYIDGGASQEEFYKFIKPILEKMDGTEELLVKLNREDLLRKQRTFDNGSIPHQIHLGELHAILRRQEDFYPFLKDNREKIEKILTFRIPYYVGPLARGNSRFAWMTRKSEETITPWNFEEVVDKGASAQSFIERMTNFDKNLPNEKVLPKHSLLYEYFTVYNELTKVKYVTEGMRKPAFLSGEQKKAIVDLLFKTNRKVTVKQLKEDYFKKIECFDSVEISGVEDRFNASLGTYHDLLKIIKDKDFLDNEENEDILEDIVLTLTLFEDREMIEERLKTYAHLFDDKVMKQLKRRRYTGWGRLSRKLINGIRDKQSGKTILDFLKSDGFANRNFMQLIHDDSLTFKEDIQKAQVSGQGDSLHEHIANLAGSPAIKKGILQTVKVVDELVKVMGRHKPENIVIEMARENQTTQKGQKNSRERMKRIEEGIKELGSQILKEHPVENTQLQNEKLYLYYLQNGRDMYVDQELDINRLSDYDVDHIVPQSFLKDDSIDNKVLTRSDKARGKSDNVPSEEVVKKMKNYWRQLLNAKLITQRKFDNLTKAERGGLSELDKAGFIKRQLVETRQITKHVAQILDSRMNTKYDENDKLIREVKVITLKSKLVSDFRKDFQFYKVREINNYHHAHDAYLNAVVGTALIKKYPKLESEFVYGDYKVYDVRKMIAKSEQEIGKATAKYFFYSNIMNFFKTEITLANGEIRKRPLIETNGETGEIVWDKGRDFATVRKVLSMPQVNIVKKTEVQTGGFSKESILPKRNSDKLIARKKDWDPKKYGGFDSPTVAYSVLVVAKVEKGKSKKLKSVKELLGITIMERSSFEKNPIDFLEAKGYKEVKKDLIIKLPKYSLFELENGRKRMLASAGELQKGNELALPSKYVNFLYLASHYEKLKGSPEDNEQKQLFVEQHKHYLDEIIEQISEFSKRVILADANLDKVLSAYNKHRDKPIREQAENIIHLFTLTNLGAPAAFKYFDTTIDRKRYTSTKEVLDATLIHQSITGLYETRIDLSQLGGDGGPAPEAAAKGGVQEISDSRPMLHIYLNGRRFLGLLDTGADKTCIAGRDWPANWPIHQTESSLQGLGMACGVARSSQPLRWQHEDKSGIIHPFVIPTLPFTLWGRDIMKDIKVRLMTDSPDDSQDLMIGAIESNLFADQISWKSDQPVWLNQWPLKQEKLQALQQLVTEQLQLGHLEESNSPWNTPVFVIKKKSGKWRLLQDLRAVNATMHDMGALQPGLPSPVAVPKGWEIIIIDLQDCFFNIKLHPEDCKRFAFSVPSPNFKRPYQRFQWKVLPQGMKNSPTLCQKFVDKAILTVRDKYQDSYIVHYMDDILLAHPSRSIVDEILTSMIQALNKHGLVVSTEKIQKYDNLKYLGTHIQGDSVSYQKLQIRTDKLRTLNDFQKLLGNINWIRPFLKLTTGELKPLFEILNGDSNPISTRKLTPEACKALQLMNERLSTARVKRLDLSQPWSLCILKTEYTPTACLWQDGVVEWIHLPHISPKVITPYDIFCTQLIIKGRHRSKELFSKDPDYIVVPYTKVQFDLLLQEKEDWPISLLGFLGEVHFHLPKDPLLTFTLQTAIIFPHMTSTTPLEKGIVIFTDGSANGRSVTYIQGREPIIKENTQNTAQQAEIVAVITAFEEVSQPFNLYTDSKYVTGLFPEIETATLSPRTKIYTELKHLQRLIHKRQEKFYIGHIRGHTGLPGPLAQGNAYADSLTRILTAAGKRTADGSEFEKRTADGSEFESPKKKAKVE

SEQ ID NO: 3146 - protein, 2116 aa, synthetic construct
MPAAKRVKLDGGDKKYSIGLDIGTNSVGWAVITDEYKVPSKKFKVLGNTDRHSIKKNLIGALLFDSGETAEATRLKRTARRRYTRRKNRICYLQEIFSNEMAKVDDSFFHRLEESFLVEEDKKHERHPIFGNIVDEVAYHEKYPTIYHLRKKLVDSTDKADLRLIYLALAHMIKFRGHFLIEGDLNPDNSDVDKLFIQLVQTYNQLFEENPINASGVDAKAILSARLSKSRRLENLIAQLPGEKKNGLFGNLIALSLGLTPNFKSNFDLAEDAKLQLSKDTYDDDLDNLLAQIGDQYADLFLAAKNLSDAILLSDILRVNTEITKAPLSASMIKRYDEHHQDLTLLKALVRQQLPEKYKEIFFDQSKNGYAGYIDGGASQEEFYKFIKPILEKMDGTEELLVKLNREDLLRKQRTFDNGSIPHQIHLGELHAILRRQEDFYPFLKDNREKIEKILTFRIPYYVGPLARGNSRFAWMTRKSEETITPWNFEEVVDKGASAQSFIERMTNFDKNLPNEKVLPKHSLLYEYFTVYNELTKVKYVTEGMRKPAFLSGEQKKAIVDLLFKTNRKVTVKQLKEDYFKKIECFDSVEISGVEDRFNASLGTYHDLLKIIKDKDFLDNEENEDILEDIVLTLTLFEDREMIEERLKTYAHLFDDKVMKQLKRRRYTGWGRLSRKLINGIRDKQSGKTILDFLKSDGFANRNFMQLIHDDSLTFKEDIQKAQVSGQGDSLHEHIANLAGSPAIKKGILQTVKVVDELVKVMGRHKPENIVIEMARENQTTQKGQKNSRERMKRIEEGIKELGSQILKEHPVENTQLQNEKLYLYYLQNGRDMYVDQELDINRLSDYDVDHIVPQSFLKDDSIDNKVLTRSDKARGKSDNVPSEEVVKKMKNYWRQLLNAKLITQRKFDNLTKAERGGLSELDKAGFIKRQLVETRQITKHVAQILDSRMNTKYDENDKLIREVKVITLKSKLVSDFRKDFQFYKVREINNYHHAHDAYLNAVVGTALIKKYPKLESEFVYGDYKVYDVRKMIAKSEQEIGKATAKYFFYSNIMNFFKTEITLANGEIRKRPLIETNGETGEIVWDKGRDFATVRKVLSMPQVNIVKKTEVQTGGFSKESILPKRNSDKLIARKKDWDPKKYGGFDSPTVAYSVLVVAKVEKGKSKKLKSVKELLGITIMERSSFEKNPIDFLEAKGYKEVKKDLIIKLPKYSLFELENGRKRMLASAGELQKGNELALPSKYVNFLYLASHYEKLKGSPEDNEQKQLFVEQHKHYLDEIIEQISEFSKRVILADANLDKVLSAYNKHRDKPIREQAENIIHLFTLTNLGAPAAFKYFDTTIDRKRYTSTKEVLDATLIHQSITGLYETRIDLSQLGGDGGPAPGGGEAAAKGGVQEISDSRPMLHIYLNGRRFLGLLDTGADKTCIAGRDWPANWPIHQTESSLQGLGMACGVARSSQPLRWQHEDKSGIIHPFVIPTLPFTLWGRDIMKDIKVRLMTDSPDDSQDLMIGAIESNLFADQISWKSDQPVWLNQWPLKQEKLQALQQLVTEQLQLGHLEESNSPWNTPVFVIKKKSGKWRLLQDLRAVNATMHDMGALQPGLPSPVAVPKGWEIIIIDLQDCFFNIKLHPEDCKRFAFSVPSPNFKRPYQRFQWKVLPQGMKNSPTLCQKFVDKAILTVRDKYQDSYIVHYMDDILLAHPSRSIVDEILTSMIQALNKHGLVVSTEKIQKYDNLKYLGTHIQGDSVSYQKLQIRTDKLRTLNDFQKLLGNINWIRPFLKLTTGELKPLFEILNGDSNPISTRKLTPEACKALQLMNERLSTARVKRLDLSQPWSLCILKTEYTPTACLWQDGVVEWIHLPHISPKVITPYDIFCTQLIIKGRHRSKELFSKDPDYIVVPYTKVQFDLLLQEKEDWPISLLGFLGEVHFHLPKDPLLTFTLQTAIIFPHMTSTTPLEKGIVIFTDGSANGRSVTYIQGREPIIKENTQNTAQQAEIVAVITAFEEVSQPFNLYTDSKYVTGLFPEIETATLSPRTKIYTELKHLQRLIHKRQEKFYIGHIRGHTGLPGPLAQGNAYADSLTRILTAAGKRTADGSEFEKRTADGSEFESPKKKAKVE

SEQ ID NO: 3147 - protein, 2116 aa, synthetic construct
MPAAKRVKLDGGDKKYSIGLDIGTNSVGWAVITDEYKVPSKKFKVLGNTDRHSIKKNLIGALLFDSGETAEATRLKRTARRRYTRRKNRICYLQEIFSNEMAKVDDSFFHRLEESFLVEEDKKHERHPIFGNIVDEVAYHEKYPTIYHLRKKLVDSTDKADLRLIYLALAHMIKFRGHFLIEGDLNPDNSDVDKLFIQLVQTYNQLFEENPINASGVDAKAILSARLSKSRRLENLIAQLPGEKKNGLFGNLIALSLGLTPNFKSNFDLAEDAKLQLSKDTYDDDLDNLLAQIGDQYADLFLAAKNLSDAILLSDILRVNTEITKAPLSASMIKRYDEHHQDLTLLKALVRQQLPEKYKEIFFDQSKNGYAGYIDGGASQEEFYKFIKPILEKMDGTEELLVKLNREDLLRKQRTFDNGSIPHQIHLGELHAILRRQEDFYPFLKDNREKIEKILTFRIPYYVGPLARGNSRFAWMTRKSEETITPWNFEEVVDKGASAQSFIERMTNFDKNLPNEKVLPKHSLLYEYFTVYNELTKVKYVTEGMRKPAFLSGEQKKAIVDLLFKTNRKVTVKQLKEDYFKKIECFDSVEISGVEDRFNASLGTYHDLLKIIKDKDFLDNEENEDILEDIVLTLTLFEDREMIEERLKTYAHLFDDKVMKQLKRRRYTGWGRLSRKLINGIRDKQSGKTILDFLKSDGFANRNFMQLIHDDSLTFKEDIQKAQVSGQGDSLHEHIANLAGSPAIKKGILQTVKVVDELVKVMGRHKPENIVIEMARENQTTQKGQKNSRERMKRIEEGIKELGSQILKEHPVENTQLQNEKLYLYYLQNGRDMYVDQELDINRLSDYDVDHIVPQSFLKDDSIDNKVLTRSDKARGKSDNVPSEEVVKKMKNYWRQLLNAKLITQRKFDNLTKAERGGLSELDKAGFIKRQLVETRQITKHVAQILDSRMNTKYDENDKLIREVKVITLKSKLVSDFRKDFQFYKVREINNYHHAHDAYLNAVVGTALIKKYPKLESEFVYGDYKVYDVRKMIAKSEQEIGKATAKYFFYSNIMNFFKTEITLANGEIRKRPLIETNGETGEIVWDKGRDFATVRKVLSMPQVNIVKKTEVQTGGFSKESILPKRNSDKLIARKKDWDPKKYGGFDSPTVAYSVLVVAKVEKGKSKKLKSVKELLGITIMERSSFEKNPIDFLEAKGYKEVKKDLIIKLPKYSLFELENGRKRMLASAGELQKGNELALPSKYVNFLYLASHYEKLKGSPEDNEQKQLFVEQHKHYLDEIIEQISEFSKRVILADANLDKVLSAYNKHRDKPIREQAENIIHLFTLTNLGAPAAFKYFDTTIDRKRYTSTKEVLDATLIHQSITGLYETRIDLSQLGGDGGGSSEAAAKGGGGGVQEISDSRPMLHIYLNGRRFLGLLDTGADKTCIAGRDWPANWPIHQTESSLQGLGMACGVARSSQPLRWQHEDKSGIIHPFVIPTLPFTLWGRDIMKDIKVRLMTDSPDDSQDLMIGAIESNLFADQISWKSDQPVWLNQWPLKQEKLQALQQLVTEQLQLGHLEESNSPWNTPVFVIKKKSGKWRLLQDLRAVNATMHDMGALQPGLPSPVAVPKGWEIIIIDLQDCFFNIKLHPEDCKRFAFSVPSPNFKRPYQRFQWKVLPQGMKNSPTLCQKFVDKAILTVRDKYQDSYIVHYMDDILLAHPSRSIVDEILTSMIQALNKHGLVVSTEKIQKYDNLKYLGTHIQGDSVSYQKLQIRTDKLRTLNDFQKLLGNINWIRPFLKLTTGELKPLFEILNGDSNPISTRKLTPEACKALQLMNERLSTARVKRLDLSQPWSLCILKTEYTPTACLWQDGVVEWIHLPHISPKVITPYDIFCTQLIIKGRHRSKELFSKDPDYIVVPYTKVQFDLLLQEKEDWPISLLGFLGEVHFHLPKDPLLTFTLQTAIIFPHMTSTTPLEKGIVIFTDGSANGRSVTYIQGREPIIKENTQNTAQQAEIVAVITAFEEVSQPFNLYTDSKYVTGLFPEIETATLSPRTKIYTELKHLQRLIHKRQEKFYIGHIRGHTGLPGPLAQGNAYADSLTRILTAAGKRTADGSEFEKRTADGSEFESPKKKAKVE

SEQ ID NO: 3148 - protein, 2116 aa, synthetic construct
MPAAKRVKLDGGDKKYSIGLDIGTNSVGWAVITDEYKVPSKKFKVLGNTDRHSIKKNLIGALLFDSGETAEATRLKRTARRRYTRRKNRICYLQEIFSNEMAKVDDSFFHRLEESFLVEEDKKHERHPIFGNIVDEVAYHEKYPTIYHLRKKLVDSTDKADLRLIYLALAHMIKFRGHFLIEGDLNPDNSDVDKLFIQLVQTYNQLFEENPINASGVDAKAILSARLSKSRRLENLIAQLPGEKKNGLFGNLIALSLGLTPNFKSNFDLAEDAKLQLSKDTYDDDLDNLLAQIGDQYADLFLAAKNLSDAILLSDILRVNTEITKAPLSASMIKRYDEHHQDLTLLKALVRQQLPEKYKEIFFDQSKNGYAGYIDGGASQEEFYKFIKPILEKMDGTEELLVKLNREDLLRKQRTFDNGSIPHQIHLGELHAILRRQEDFYPFLKDNREKIEKILTFRIPYYVGPLARGNSRFAWMTRKSEETITPWNFEEVVDKGASAQSFIERMTNFDKNLPNEKVLPKHSLLYEYFTVYNELTKVKYVTEGMRKPAFLSGEQKKAIVDLLFKTNRKVTVKQLKEDYFKKIECFDSVEISGVEDRFNASLGTYHDLLKIIKDKDFLDNEENEDILEDIVLTLTLFEDREMIEERLKTYAHLFDDKVMKQLKRRRYTGWGRLSRKLINGIRDKQSGKTILDFLKSDGFANRNFMQLIHDDSLTFKEDIQKAQVSGQGDSLHEHIANLAGSPAIKKGILQTVKVVDELVKVMGRHKPENIVIEMARENQTTQKGQKNSRERMKRIEEGIKELGSQILKEHPVENTQLQNEKLYLYYLQNGRDMYVDQELDINRLSDYDVDHIVPQSFLKDDSIDNKVLTRSDKARGKSDNVPSEEVVKKMKNYWRQLLNAKLITQRKFDNLTKAERGGLSELDKAGFIKRQLVETRQITKHVAQILDSRMNTKYDENDKLIREVKVITLKSKLVSDFRKDFQFYKVREINNYHHAHDAYLNAVVGTALIKKYPKLESEFVYGDYKVYDVRKMIAKSEQEIGKATAKYFFYSNIMNFFKTEITLANGEIRKRPLIETNGETGEIVWDKGRDFATVRKVLSMPQVNIVKKTEVQTGGFSKESILPKRNSDKLIARKKDWDPKKYGGFDSPTVAYSVLVVAKVEKGKSKKLKSVKELLGITIMERSSFEKNPIDFLEAKGYKEVKKDLIIKLPKYSLFELENGRKRMLASAGELQKGNELALPSKYVNFLYLASHYEKLKGSPEDNEQKQLFVEQHKHYLDEIIEQISEFSKRVILADANLDKVLSAYNKHRDKPIREQAENIIHLFTLTNLGAPAAFKYFDTTIDRKRYTSTKEVLDATLIHQSITGLYETRIDLSQLGGDGGEAAAKGGSGSSGGVQEISDSRPMLHIYLNGRRFLGLLDTGADKTCIAGRDWPANWPIHQTESSLQGLGMACGVARSSQPLRWQHEDKSGIIHPFVIPTLPFTLWGRDIMKDIKVRLMTDSPDDSQDLMIGAIESNLFADQISWKSDQPVWLNQWPLKQEKLQALQQLVTEQLQLGHLEESNSPWNTPVFVIKKKSGKWRLLQDLRAVNATMHDMGALQPGLPSPVAVPKGWEIIIIDLQDCFFNIKLHPEDCKRFAFSVPSPNFKRPYQRFQWKVLPQGMKNSPTLCQKFVDKAILTVRDKYQDSYIVHYMDDILLAHPSRSIVDEILTSMIQALNKHGLVVSTEKIQKYDNLKYLGTHIQGDSVSYQKLQIRTDKLRTLNDFQKLLGNINWIRPFLKLTTGELKPLFEILNGDSNPISTRKLTPEACKALQLMNERLSTARVKRLDLSQPWSLCILKTEYTPTACLWQDGVVEWIHLPHISPKVITPYDIFCTQLIIKGRHRSKELFSKDPDYIVVPYTKVQFDLLLQEKEDWPISLLGFLGEVHFHLPKDPLLTFTLQTAIIFPHMTSTTPLEKGIVIFTDGSANGRSVTYIQGREPIIKENTQNTAQQAEIVAVITAFEEVSQPFNLYTDSKYVTGLFPEIETATLSPRTKIYTELKHLQRLIHKRQEKFYIGHIRGHTGLPGPLAQGNAYADSLTRILTAAGKRTADGSEFEKRTADGSEFESPKKKAKVE

SEQ ID NO: 3149 - protein, 2116 aa, synthetic construct
MPAAKRVKLDGGDKKYSIGLDIGTNSVGWAVITDEYKVPSKKFKVLGNTDRHSIKKNLIGALLFDSGETAEATRLKRTARRRYTRRKNRICYLQEIFSNEMAKVDDSFFHRLEESFLVEEDKKHERHPIFGNIVDEVAYHEKYPTIYHLRKKLVDSTDKADLRLIYLALAHMIKFRGHFLIEGDLNPDNSDVDKLFIQLVQTYNQLFEENPINASGVDAKAILSARLSKSRRLENLIAQLPGEKKNGLFGNLIALSLGLTPNFKSNFDLAEDAKLQLSKDTYDDDLDNLLAQIGDQYADLFLAAKNLSDAILLSDILRVNTEITKAPLSASMIKRYDEHHQDLTLLKALVRQQLPEKYKEIFFDQSKNGYAGYIDGGASQEEFYKFIKPILEKMDGTEELLVKLNREDLLRKQRTFDNGSIPHQIHLGELHAILRRQEDFYPFLKDNREKIEKILTFRIPYYVGPLARGNSRFAWMTRKSEETITPWNFEEVVDKGASAQSFIERMTNFDKNLPNEKVLPKHSLLYEYFTVYNELTKVKYVTEGMRKPAFLSGEQKKAIVDLLFKTNRKVTVKQLKEDYFKKIECFDSVEISGVEDRFNASLGTYHDLLKIIKDKDFLDNEENEDILEDIVLTLTLFEDREMIEERLKTYAHLFDDKVMKQLKRRRYTGWGRLSRKLINGIRDKQSGKTILDFLKSDGFANRNFMQLIHDDSLTFKEDIQKAQVSGQGDSLHEHIANLAGSPAIKKGILQTVKVVDELVKVMGRHKPENIVIEMARENQTTQKGQKNSRERMKRIEEGIKELGSQILKEHPVENTQLQNEKLYLYYLQNGRDMYVDQELDINRLSDYDVDHIVPQSFLKDDSIDNKVLTRSDKARGKSDNVPSEEVVKKMKNYWRQLLNAKLITQRKFDNLTKAERGGLSELDKAGFIKRQLVETRQITKHVAQILDSRMNTKYDENDKLIREVKVITLKSKLVSDFRKDFQFYKVREINNYHHAHDAYLNAVVGTALIKKYPKLESEFVYGDYKVYDVRKMIAKSEQEIGKATAKYFFYSNIMNFFKTEITLANGEIRKRPLIETNGETGEIVWDKGRDFATVRKVLSMPQVNIVKKTEVQTGGFSKESILPKRNSDKLIARKKDWDPKKYGGFDSPTVAYSVLVVAKVEKGKSKKLKSVKELLGITIMERSSFEKNPIDFLEAKGYKEVKKDLIIKLPKYSLFELENGRKRMLASAGELQKGNELALPSKYVNFLYLASHYEKLKGSPEDNEQKQLFVEQHKHYLDEIIEQISEFSKRVILADANLDKVLSAYNKHRDKPIREQAENIIHLFTLTNLGAPAAFKYFDTTIDRKRYTSTKEVLDATLIHQSITGLYETRIDLSQLGGDGGGSSPAPEAAAKGGVQEISDSRPMLHIYLNGRRFLGLLDTGADKTCIAGRDWPANWPIHQTESSLQGLGMACGVARSSQPLRWQHEDKSGIIHPFVIPTLPFTLWGRDIMKDIKVRLMTDSPDDSQDLMIGAIESNLFADQISWKSDQPVWLNQWPLKQEKLQALQQLVTEQLQLGHLEESNSPWNTPVFVIKKKSGKWRLLQDLRAVNATMHDMGALQPGLPSPVAVPKGWEIIIIDLQDCFFNIKLHPEDCKRFAFSVPSPNFKRPYQRFQWKVLPQGMKNSPTLCQKFVDKAILTVRDKYQDSYIVHYMDDILLAHPSRSIVDEILTSMIQALNKHGLVVSTEKIQKYDNLKYLGTHIQGDSVSYQKLQIRTDKLRTLNDFQKLLGNINWIRPFLKLTTGELKPLFEILNGDSNPISTRKLTPEACKALQLMNERLSTARVKRLDLSQPWSLCILKTEYTPTACLWQDGVVEWIHLPHISPKVITPYDIFCTQLIIKGRHRSKELFSKDPDYIVVPYTKVQFDLLLQEKEDWPISLLGFLGEVHFHLPKDPLLTFTLQTAIIFPHMTSTTPLEKGIVIFTDGSANGRSVTYIQGREPIIKENTQNTAQQAEIVAVITAFEEVSQPFNLYTDSKYVTGLFPEIETATLSPRTKIYTELKHLQRLIHKRQEKFYIGHIRGHTGLPGPLAQGNAYADSLTRILTAAGKRTADGSEFEKRTADGSEFESPKKKAKVE

SEQ ID NO: 3150 - protein, 2114 aa, synthetic construct
MPAAKRVKLDGGDKKYSIGLDIGTNSVGWAVITDEYKVPSKKFKVLGNTDRHSIKKNLIGALLFDSGETAEATRLKRTARRRYTRRKNRICYLQEIFSNEMAKVDDSFFHRLEESFLVEEDKKHERHPIFGNIVDEVAYHEKYPTIYHLRKKLVDSTDKADLRLIYLALAHMIKFRGHFLIEGDLNPDNSDVDKLFIQLVQTYNQLFEENPINASGVDAKAILSARLSKSRRLENLIAQLPGEKKNGLFGNLIALSLGLTPNFKSNFDLAEDAKLQLSKDTYDDDLDNLLAQIGDQYADLFLAAKNLSDAILLSDILRVNTEITKAPLSASMIKRYDEHHQDLTLLKALVRQQLPEKYKEIFFDQSKNGYAGYIDGGASQEEFYKFIKPILEKMDGTEELLVKLNREDLLRKQRTFDNGSIPHQIHLGELHAILRRQEDFYPFLKDNREKIEKILTFRIPYYVGPLARGNSRFAWMTRKSEETITPWNFEEVVDKGASAQSFIERMTNFDKNLPNEKVLPKHSLLYEYFTVYNELTKVKYVTEGMRKPAFLSGEQKKAIVDLLFKTNRKVTVKQLKEDYFKKIECFDSVEISGVEDRFNASLGTYHDLLKIIKDKDFLDNEENEDILEDIVLTLTLFEDREMIEERLKTYAHLFDDKVMKQLKRRRYTGWGRLSRKLINGIRDKQSGKTILDFLKSDGFANRNFMQLIHDDSLTFKEDIQKAQVSGQGDSLHEHIANLAGSPAIKKGILQTVKVVDELVKVMGRHKPENIVIEMARENQTTQKGQKNSRERMKRIEEGIKELGSQILKEHPVENTQLQNEKLYLYYLQNGRDMYVDQELDINRLSDYDVDHIVPQSFLKDDSIDNKVLTRSDKARGKSDNVPSEEVVKKMKNYWRQLLNAKLITQRKFDNLTKAERGGLSELDKAGFIKRQLVETRQITKHVAQILDSRMNTKYDENDKLIREVKVITLKSKLVSDFRKDFQFYKVREINNYHHAHDAYLNAVVGTALIKKYPKLESEFVYGDYKVYDVRKMIAKSEQEIGKATAKYFFYSNIMNFFKTEITLANGEIRKRPLIETNGETGEIVWDKGRDFATVRKVLSMPQVNIVKKTEVQTGGFSKESILPKRNSDKLIARKKDWDPKKYGGFDSPTVAYSVLVVAKVEKGKSKKLKSVKELLGITIMERSSFEKNPIDFLEAKGYKEVKKDLIIKLPKYSLFELENGRKRMLASAGELQKGNELALPSKYVNFLYLASHYEKLKGSPEDNEQKQLFVEQHKHYLDEIIEQISEFSKRVILADANLDKVLSAYNKHRDKPIREQAENIIHLFTLTNLGAPAAFKYFDTTIDRKRYTSTKEVLDATLIHQSITGLYETRIDLSQLGGDGGGGSGSSPAPGGVQEISDSRPMLHIYLNGRRFLGLLDTGADKTCIAGRDWPANWPIHQTESSLQGLGMACGVARSSQPLRWQHEDKSGIIHPFVIPTLPFTLWGRDIMKDIKVRLMTDSPDDSQDLMIGAIESNLFADQISWKSDQPVWLNQWPLKQEKLQALQQLVTEQLQLGHLEESNSPWNTPVFVIKKKSGKWRLLQDLRAVNATMHDMGALQPGLPSPVAVPKGWEIIIIDLQDCFFNIKLHPEDCKRFAFSVPSPNFKRPYQRFQWKVLPQGMKNSPTLCQKFVDKAILTVRDKYQDSYIVHYMDDILLAHPSRSIVDEILTSMIQALNKHGLVVSTEKIQKYDNLKYLGTHIQGDSVSYQKLQIRTDKLRTLNDFQKLLGNINWIRPFLKLTTGELKPLFEILNGDSNPISTRKLTPEACKALQLMNERLSTARVKRLDLSQPWSLCILKTEYTPTACLWQDGVVEWIHLPHISPKVITPYDIFCTQLIIKGRHRSKELFSKDPDYIVVPYTKVQFDLLLQEKEDWPISLLGFLGEVHFHLPKDPLLTFTLQTAIIFPHMTSTTPLEKGIVIFTDGSANGRSVTYIQGREPIIKENTQNTAQQAEIVAVITAFEEVSQPFNLYTDSKYVTGLFPEIETATLSPRTKIYTELKHLQRLIHKRQEKFYIGHIRGHTGLPGPLAQGNAYADSLTRILTAAGKRTADGSEFEKRTADGSEFESPKKKAKVE

SEQ ID NO: 3151 - protein, 2120 aa, synthetic construct
MPAAKRVKLDGGDKKYSIGLDIGTNSVGWAVITDEYKVPSKKFKVLGNTDRHSIKKNLIGALLFDSGETAEATRLKRTARRRYTRRKNRICYLQEIFSNEMAKVDDSFFHRLEESFLVEEDKKHERHPIFGNIVDEVAYHEKYPTIYHLRKKLVDSTDKADLRLIYLALAHMIKFRGHFLIEGDLNPDNSDVDKLFIQLVQTYNQLFEENPINASGVDAKAILSARLSKSRRLENLIAQLPGEKKNGLFGNLIALSLGLTPNFKSNFDLAEDAKLQLSKDTYDDDLDNLLAQIGDQYADLFLAAKNLSDAILLSDILRVNTEITKAPLSASMIKRYDEHHQDLTLLKALVRQQLPEKYKEIFFDQSKNGYAGYIDGGASQEEFYKFIKPILEKMDGTEELLVKLNREDLLRKQRTFDNGSIPHQIHLGELHAILRRQEDFYPFLKDNREKIEKILTFRIPYYVGPLARGNSRFAWMTRKSEETITPWNFEEVVDKGASAQSFIERMTNFDKNLPNEKVLPKHSLLYEYFTVYNELTKVKYVTEGMRKPAFLSGEQKKAIVDLLFKTNRKVTVKQLKEDYFKKIECFDSVEISGVEDRFNASLGTYHDLLKIIKDKDFLDNEENEDILEDIVLTLTLFEDREMIEERLKTYAHLFDDKVMKQLKRRRYTGWGRLSRKLINGIRDKQSGKTILDFLKSDGFANRNFMQLIHDDSLTFKEDIQKAQVSGQGDSLHEHIANLAGSPAIKKGILQTVKVVDELVKVMGRHKPENIVIEMARENQTTQKGQKNSRERMKRIEEGIKELGSQILKEHPVENTQLQNEKLYLYYLQNGRDMYVDQELDINRLSDYDVDHIVPQSFLKDDSIDNKVLTRSDKARGKSDNVPSEEVVKKMKNYWRQLLNAKLITQRKFDNLTKAERGGLSELDKAGFIKRQLVETRQITKHVAQILDSRMNTKYDENDKLIREVKVITLKSKLVSDFRKDFQFYKVREINNYHHAHDAYLNAVVGTALIKKYPKLESEFVYGDYKVYDVRKMIAKSEQEIGKATAKYFFYSNIMNFFKTEITLANGEIRKRPLIETNGETGEIVWDKGRDFATVRKVLSMPQVNIVKKTEVQTGGFSKESILPKRNSDKLIARKKDWDPKKYGGFDSPTVAYSVLVVAKVEKGKSKKLKSVKELLGITIMERSSFEKNPIDFLEAKGYKEVKKDLIIKLPKYSLFELENGRKRMLASAGELQKGNELALPSKYVNFLYLASHYEKLKGSPEDNEQKQLFVEQHKHYLDEIIEQISEFSKRVILADANLDKVLSAYNKHRDKPIREQAENIIHLFTLTNLGAPAAFKYFDTTIDRKRYTSTKEVLDATLIHQSITGLYETRIDLSQLGGDGGEAAAKGGGGSEAAAKGGVQEISDSRPMLHIYLNGRRFLGLLDTGADKTCIAGRDWPANWPIHQTESSLQGLGMACGVARSSQPLRWQHEDKSGIIHPFVIPTLPFTLWGRDIMKDIKVRLMTDSPDDSQDLMIGAIESNLFADQISWKSDQPVWLNQWPLKQEKLQALQQLVTEQLQLGHLEESNSPWNTPVFVIKKKSGKWRLLQDLRAVNATMHDMGALQPGLPSPVAVPKGWEIIIIDLQDCFFNIKLHPEDCKRFAFSVPSPNFKRPYQRFQWKVLPQGMKNSPTLCQKFVDKAILTVRDKYQDSYIVHYMDDILLAHPSRSIVDEILTSMIQALNKHGLVVSTEKIQKYDNLKYLGTHIQGDSVSYQKLQIRTDKLRTLNDFQKLLGNINWIRPFLKLTTGELKPLFEILNGDSNPISTRKLTPEACKALQLMNERLSTARVKRLDLSQPWSLCILKTEYTPTACLWQDGVVEWIHLPHISPKVITPYDIFCTQLIIKGRHRSKELFSKDPDYIVVPYTKVQFDLLLQEKEDWPISLLGFLGEVHFHLPKDPLLTFTLQTAIIFPHMTSTTPLEKGIVIFTDGSANGRSVTYIQGREPIIKENTQNTAQQAEIVAVITAFEEVSQPFNLYTDSKYVTGLFPEIETATLSPRTKIYTELKHLQRLIHKRQEKFYIGHIRGHTGLPGPLAQGNAYADSLTRILTAAGKRTADGSEFEKRTADGSEFESPKKKAKVE

SEQ ID NO: 3152 - protein, 2116 aa, synthetic construct
MPAAKRVKLDGGDKKYSIGLDIGTNSVGWAVITDEYKVPSKKFKVLGNTDRHSIKKNLIGALLFDSGETAEATRLKRTARRRYTRRKNRICYLQEIFSNEMAKVDDSFFHRLEESFLVEEDKKHERHPIFGNIVDEVAYHEKYPTIYHLRKKLVDSTDKADLRLIYLALAHMIKFRGHFLIEGDLNPDNSDVDKLFIQLVQTYNQLFEENPINASGVDAKAILSARLSKSRRLENLIAQLPGEKKNGLFGNLIALSLGLTPNFKSNFDLAEDAKLQLSKDTYDDDLDNLLAQIGDQYADLFLAAKNLSDAILLSDILRVNTEITKAPLSASMIKRYDEHHQDLTLLKALVRQQLPEKYKEIFFDQSKNGYAGYIDGGASQEEFYKFIKPILEKMDGTEELLVKLNREDLLRKQRTFDNGSIPHQIHLGELHAILRRQEDFYPFLKDNREKIEKILTFRIPYYVGPLARGNSRFAWMTRKSEETITPWNFEEVVDKGASAQSFIERMTNFDKNLPNEKVLPKHSLLYEYFTVYNELTKVKYVTEGMRKPAFLSGEQKKAIVDLLFKTNRKVTVKQLKEDYFKKIECFDSVEISGVEDRFNASLGTYHDLLKIIKDKDFLDNEENEDILEDIVLTLTLFEDREMIEERLKTYAHLFDDKVMKQLKRRRYTGWGRLSRKLINGIRDKQSGKTILDFLKSDGFANRNFMQLIHDDSLTFKEDIQKAQVSGQGDSLHEHIANLAGSPAIKKGILQTVKVVDELVKVMGRHKPENIVIEMARENQTTQKGQKNSRERMKRIEEGIKELGSQILKEHPVENTQLQNEKLYLYYLQNGRDMYVDQELDINRLSDYDVDHIVPQSFLKDDSIDNKVLTRSDKARGKSDNVPSEEVVKKMKNYWRQLLNAKLITQRKFDNLTKAERGGLSELDKAGFIKRQLVETRQITKHVAQILDSRMNTKYDENDKLIREVKVITLKSKLVSDFRKDFQFYKVREINNYHHAHDAYLNAVVGTALIKKYPKLESEFVYGDYKVYDVRKMIAKSEQEIGKATAKYFFYSNIMNFFKTEITLANGEIRKRPLIETNGETGEIVWDKGRDFATVRKVLSMPQVNIVKKTEVQTGGFSKESILPKRNSDKLIARKKDWDPKKYGGFDSPTVAYSVLVVAKVEKGKSKKLKSVKELLGITIMERSSFEKNPIDFLEAKGYKEVKKDLIIKLPKYSLFELENGRKRMLASAGELQKGNELALPSKYVNFLYLASHYEKLKGSPEDNEQKQLFVEQHKHYLDEIIEQISEFSKRVILADANLDKVLSAYNKHRDKPIREQAENIIHLFTLTNLGAPAAFKYFDTTIDRKRYTSTKEVLDATLIHQSITGLYETRIDLSQLGGDGGPAPEAAAKGSSGGVQEISDSRPMLHIYLNGRRFLGLLDTGADKTCIAGRDWPANWPIHQTESSLQGLGMACGVARSSQPLRWQHEDKSGIIHPFVIPTLPFTLWGRDIMKDIKVRLMTDSPDDSQDLMIGAIESNLFADQISWKSDQPVWLNQWPLKQEKLQALQQLVTEQLQLGHLEESNSPWNTPVFVIKKKSGKWRLLQDLRAVNATMHDMGALQPGLPSPVAVPKGWEIIIIDLQDCFFNIKLHPEDCKRFAFSVPSPNFKRPYQRFQWKVLPQGMKNSPTLCQKFVDKAILTVRDKYQDSYIVHYMDDILLAHPSRSIVDEILTSMIQALNKHGLVVSTEKIQKYDNLKYLGTHIQGDSVSYQKLQIRTDKLRTLNDFQKLLGNINWIRPFLKLTTGELKPLFEILNGDSNPISTRKLTPEACKALQLMNERLSTARVKRLDLSQPWSLCILKTEYTPTACLWQDGVVEWIHLPHISPKVITPYDIFCTQLIIKGRHRSKELFSKDPDYIVVPYTKVQFDLLLQEKEDWPISLLGFLGEVHFHLPKDPLLTFTLQTAIIFPHMTSTTPLEKGIVIFTDGSANGRSVTYIQGREPIIKENTQNTAQQAEIVAVITAFEEVSQPFNLYTDSKYVTGLFPEIETATLSPRTKIYTELKHLQRLIHKRQEKFYIGHIRGHTGLPGPLAQGNAYADSLTRILTAAGKRTADGSEFEKRTADGSEFESPKKKAKVE

SEQ ID NO: 3153 - protein, 2121 aa, synthetic construct
MPAAKRVKLDGGDKKYSIGLDIGTNSVGWAVITDEYKVPSKKFKVLGNTDRHSIKKNLIGALLFDSGETAEATRLKRTARRRYTRRKNRICYLQEIFSNEMAKVDDSFFHRLEESFLVEEDKKHERHPIFGNIVDEVAYHEKYPTIYHLRKKLVDSTDKADLRLIYLALAHMIKFRGHFLIEGDLNPDNSDVDKLFIQLVQTYNQLFEENPINASGVDAKAILSARLSKSRRLENLIAQLPGEKKNGLFGNLIALSLGLTPNFKSNFDLAEDAKLQLSKDTYDDDLDNLLAQIGDQYADLFLAAKNLSDAILLSDILRVNTEITKAPLSASMIKRYDEHHQDLTLLKALVRQQLPEKYKEIFFDQSKNGYAGYIDGGASQEEFYKFIKPILEKMDGTEELLVKLNREDLLRKQRTFDNGSIPHQIHLGELHAILRRQEDFYPFLKDNREKIEKILTFRIPYYVGPLARGNSRFAWMTRKSEETITPWNFEEVVDKGASAQSFIERMTNFDKNLPNEKVLPKHSLLYEYFTVYNELTKVKYVTEGMRKPAFLSGEQKKAIVDLLFKTNRKVTVKQLKEDYFKKIECFDSVEISGVEDRFNASLGTYHDLLKIIKDKDFLDNEENEDILEDIVLTLTLFEDREMIEERLKTYAHLFDDKVMKQLKRRRYTGWGRLSRKLINGIRDKQSGKTILDFLKSDGFANRNFMQLIHDDSLTFKEDIQKAQVSGQGDSLHEHIANLAGSPAIKKGILQTVKVVDELVKVMGRHKPENIVIEMARENQTTQKGQKNSRERMKRIEEGIKELGSQILKEHPVENTQLQNEKLYLYYLQNGRDMYVDQELDINRLSDYDVDHIVPQSFLKDDSIDNKVLTRSDKARGKSDNVPSEEVVKKMKNYWRQLLNAKLITQRKFDNLTKAERGGLSELDKAGFIKRQLVETRQITKHVAQILDSRMNTKYDENDKLIREVKVITLKSKLVSDFRKDFQFYKVREINNYHHAHDAYLNAVVGTALIKKYPKLESEFVYGDYKVYDVRKMIAKSEQEIGKATAKYFFYSNIMNFFKTEITLANGEIRKRPLIETNGETGEIVWDKGRDFATVRKVLSMPQVNIVKKTEVQTGGFSKESILPKRNSDKLIARKKDWDPKKYGGFDSPTVAYSVLVVAKVEKGKSKKLKSVKELLGITIMERSSFEKNPIDFLEAKGYKEVKKDLIIKLPKYSLFELENGRKRMLASAGELQKGNELALPSKYVNFLYLASHYEKLKGSPEDNEQKQLFVEQHKHYLDEIIEQISEFSKRVILADANLDKVLSAYNKHRDKPIREQAENIIHLFTLTNLGAPAAFKYFDTTIDRKRYTSTKEVLDATLIHQSITGLYETRIDLSQLGGDGGSGSETPGTSESATPESGGVQEISDSRPMLHIYLNGRRFLGLLDTGADKTCIAGRDWPANWPIHQTESSLQGLGMACGVARSSQPLRWQHEDKSGIIHPFVIPTLPFTLWGRDIMKDIKVRLMTDSPDDSQDLMIGAIESNLFADQISWKSDQPVWLNQWPLKQEKLQALQQLVTEQLQLGHLEESNSPWNTPVFVIKKKSGKWRLLQDLRAVNATMHDMGALQPGLPSPVAVPKGWEIIIIDLQDCFFNIKLHPEDCKRFAFSVPSPNFKRPYQRFQWKVLPQGMKNSPTLCQKFVDKAILTVRDKYQDSYIVHYMDDILLAHPSRSIVDEILTSMIQALNKHGLVVSTEKIQKYDNLKYLGTHIQGDSVSYQKLQIRTDKLRTLNDFQKLLGNINWIRPFLKLTTGELKPLFEILNGDSNPISTRKLTPEACKALQLMNERLSTARVKRLDLSQPWSLCILKTEYTPTACLWQDGVVEWIHLPHISPKVITPYDIFCTQLIIKGRHRSKELFSKDPDYIVVPYTKVQFDLLLQEKEDWPISLLGFLGEVHFHLPKDPLLTFTLQTAIIFPHMTSTTPLEKGIVIFTDGSANGRSVTYIQGREPIIKENTQNTAQQAEIVAVITAFEEVSQPFNLYTDSKYVTGLFPEIETATLSPRTKIYTELKHLQRLIHKRQEKFYIGHIRGHTGLPGPLAQGNAYADSLTRILTAAGKRTADGSEFEKRTADGSEFESPKKKAKVE

SEQ ID NO: 3154 - protein, 2116 aa, synthetic construct
MPAAKRVKLDGGDKKYSIGLDIGTNSVGWAVITDEYKVPSKKFKVLGNTDRHSIKKNLIGALLFDSGETAEATRLKRTARRRYTRRKNRICYLQEIFSNEMAKVDDSFFHRLEESFLVEEDKKHERHPIFGNIVDEVAYHEKYPTIYHLRKKLVDSTDKADLRLIYLALAHMIKFRGHFLIEGDLNPDNSDVDKLFIQLVQTYNQLFEENPINASGVDAKAILSARLSKSRRLENLIAQLPGEKKNGLFGNLIALSLGLTPNFKSNFDLAEDAKLQLSKDTYDDDLDNLLAQIGDQYADLFLAAKNLSDAILLSDILRVNTEITKAPLSASMIKRYDEHHQDLTLLKALVRQQLPEKYKEIFFDQSKNGYAGYIDGGASQEEFYKFIKPILEKMDGTEELLVKLNREDLLRKQRTFDNGSIPHQIHLGELHAILRRQEDFYPFLKDNREKIEKILTFRIPYYVGPLARGNSRFAWMTRKSEETITPWNFEEVVDKGASAQSFIERMTNFDKNLPNEKVLPKHSLLYEYFTVYNELTKVKYVTEGMRKPAFLSGEQKKAIVDLLFKTNRKVTVKQLKEDYFKKIECFDSVEISGVEDRFNASLGTYHDLLKIIKDKDFLDNEENEDILEDIVLTLTLFEDREMIEERLKTYAHLFDDKVMKQLKRRRYTGWGRLSRKLINGIRDKQSGKTILDFLKSDGFANRNFMQLIHDDSLTFKEDIQKAQVSGQGDSLHEHIANLAGSPAIKKGILQTVKVVDELVKVMGRHKPENIVIEMARENQTTQKGQKNSRERMKRIEEGIKELGSQILKEHPVENTQLQNEKLYLYYLQNGRDMYVDQELDINRLSDYDVDHIVPQSFLKDDSIDNKVLTRSDKARGKSDNVPSEEVVKKMKNYWRQLLNAKLITQRKFDNLTKAERGGLSELDKAGFIKRQLVETRQITKHVAQILDSRMNTKYDENDKLIREVKVITLKSKLVSDFRKDFQFYKVREINNYHHAHDAYLNAVVGTALIKKYPKLESEFVYGDYKVYDVRKMIAKSEQEIGKATAKYFFYSNIMNFFKTEITLANGEIRKRPLIETNGETGEIVWDKGRDFATVRKVLSMPQVNIVKKTEVQTGGFSKESILPKRNSDKLIARKKDWDPKKYGGFDSPTVAYSVLVVAKVEKGKSKKLKSVKELLGITIMERSSFEKNPIDFLEAKGYKEVKKDLIIKLPKYSLFELENGRKRMLASAGELQKGNELALPSKYVNFLYLASHYEKLKGSPEDNEQKQLFVEQHKHYLDEIIEQISEFSKRVILADANLDKVLSAYNKHRDKPIREQAENIIHLFTLTNLGAPAAFKYFDTTIDRKRYTSTKEVLDATLIHQSITGLYETRIDLSQLGGDGGGGSEAAAKGGGGGVQEISDSRPMLHIYLNGRRFLGLLDTGADKTCIAGRDWPANWPIHQTESSLQGLGMACGVARSSQPLRWQHEDKSGIIHPFVIPTLPFTLWGRDIMKDIKVRLMTDSPDDSQDLMIGAIESNLFADQISWKSDQPVWLNQWPLKQEKLQALQQLVTEQLQLGHLEESNSPWNTPVFVIKKKSGKWRLLQDLRAVNATMHDMGALQPGLPSPVAVPKGWEIIIIDLQDCFFNIKLHPEDCKRFAFSVPSPNFKRPYQRFQWKVLPQGMKNSPTLCQKFVDKAILTVRDKYQDSYIVHYMDDILLAHPSRSIVDEILTSMIQALNKHGLVVSTEKIQKYDNLKYLGTHIQGDSVSYQKLQIRTDKLRTLNDFQKLLGNINWIRPFLKLTTGELKPLFEILNGDSNPISTRKLTPEACKALQLMNERLSTARVKRLDLSQPWSLCILKTEYTPTACLWQDGVVEWIHLPHISPKVITPYDIFCTQLIIKGRHRSKELFSKDPDYIVVPYTKVQFDLLLQEKEDWPISLLGFLGEVHFHLPKDPLLTFTLQTAIIFPHMTSTTPLEKGIVIFTDGSANGRSVTYIQGREPIIKENTQNTAQQAEIVAVITAFEEVSQPFNLYTDSKYVTGLFPEIETATLSPRTKIYTELKHLQRLIHKRQEKFYIGHIRGHTGLPGPLAQGNAYADSLTRILTAAGKRTADGSEFEKRTADGSEFESPKKKAKVE

SEQ ID NO: 3155 - protein, 2114 aa, synthetic construct
MPAAKRVKLDGGDKKYSIGLDIGTNSVGWAVITDEYKVPSKKFKVLGNTDRHSIKKNLIGALLFDSGETAEATRLKRTARRRYTRRKNRICYLQEIFSNEMAKVDDSFFHRLEESFLVEEDKKHERHPIFGNIVDEVAYHEKYPTIYHLRKKLVDSTDKADLRLIYLALAHMIKFRGHFLIEGDLNPDNSDVDKLFIQLVQTYNQLFEENPINASGVDAKAILSARLSKSRRLENLIAQLPGEKKNGLFGNLIALSLGLTPNFKSNFDLAEDAKLQLSKDTYDDDLDNLLAQIGDQYADLFLAAKNLSDAILLSDILRVNTEITKAPLSASMIKRYDEHHQDLTLLKALVRQQLPEKYKEIFFDQSKNGYAGYIDGGASQEEFYKFIKPILEKMDGTEELLVKLNREDLLRKQRTFDNGSIPHQIHLGELHAILRRQEDFYPFLKDNREKIEKILTFRIPYYVGPLARGNSRFAWMTRKSEETITPWNFEEVVDKGASAQSFIERMTNFDKNLPNEKVLPKHSLLYEYFTVYNELTKVKYVTEGMRKPAFLSGEQKKAIVDLLFKTNRKVTVKQLKEDYFKKIECFDSVEISGVEDRFNASLGTYHDLLKIIKDKDFLDNEENEDILEDIVLTLTLFEDREMIEERLKTYAHLFDDKVMKQLKRRRYTGWGRLSRKLINGIRDKQSGKTILDFLKSDGFANRNFMQLIHDDSLTFKEDIQKAQVSGQGDSLHEHIANLAGSPAIKKGILQTVKVVDELVKVMGRHKPENIVIEMARENQTTQKGQKNSRERMKRIEEGIKELGSQILKEHPVENTQLQNEKLYLYYLQNGRDMYVDQELDINRLSDYDVDHIVPQSFLKDDSIDNKVLTRSDKARGKSDNVPSEEVVKKMKNYWRQLLNAKLITQRKFDNLTKAERGGLSELDKAGFIKRQLVETRQITKHVAQILDSRMNTKYDENDKLIREVKVITLKSKLVSDFRKDFQFYKVREINNYHHAHDAYLNAVVGTALIKKYPKLESEFVYGDYKVYDVRKMIAKSEQEIGKATAKYFFYSNIMNFFKTEITLANGEIRKRPLIETNGETGEIVWDKGRDFATVRKVLSMPQVNIVKKTEVQTGGFSKESILPKRNSDKLIARKKDWDPKKYGGFDSPTVAYSVLVVAKVEKGKSKKLKSVKELLGITIMERSSFEKNPIDFLEAKGYKEVKKDLIIKLPKYSLFELENGRKRMLASAGELQKGNELALPSKYVNFLYLASHYEKLKGSPEDNEQKQLFVEQHKHYLDEIIEQISEFSKRVILADANLDKVLSAYNKHRDKPIREQAENIIHLFTLTNLGAPAAFKYFDTTIDRKRYTSTKEVLDATLIHQSITGLYETRIDLSQLGGDGGPAPGGSGSSGGVQEISDSRPMLHIYLNGRRFLGLLDTGADKTCIAGRDWPANWPIHQTESSLQGLGMACGVARSSQPLRWQHEDKSGIIHPFVIPTLPFTLWGRDIMKDIKVRLMTDSPDDSQDLMIGAIESNLFADQISWKSDQPVWLNQWPLKQEKLQALQQLVTEQLQLGHLEESNSPWNTPVFVIKKKSGKWRLLQDLRAVNATMHDMGALQPGLPSPVAVPKGWEIIIIDLQDCFFNIKLHPEDCKRFAFSVPSPNFKRPYQRFQWKVLPQGMKNSPTLCQKFVDKAILTVRDKYQDSYIVHYMDDILLAHPSRSIVDEILTSMIQALNKHGLVVSTEKIQKYDNLKYLGTHIQGDSVSYQKLQIRTDKLRTLNDFQKLLGNINWIRPFLKLTTGELKPLFEILNGDSNPISTRKLTPEACKALQLMNERLSTARVKRLDLSQPWSLCILKTEYTPTACLWQDGVVEWIHLPHISPKVITPYDIFCTQLIIKGRHRSKELFSKDPDYIVVPYTKVQFDLLLQEKEDWPISLLGFLGEVHFHLPKDPLLTFTLQTAIIFPHMTSTTPLEKGIVIFTDGSANGRSVTYIQGREPIIKENTQNTAQQAEIVAVITAFEEVSQPFNLYTDSKYVTGLFPEIETATLSPRTKIYTELKHLQRLIHKRQEKFYIGHIRGHTGLPGPLAQGNAYADSLTRILTAAGKRTADGSEFEKRTADGSEFESPKKKAKVE

SEQ ID NO: 3156 - protein, 2116 aa, synthetic construct
MPAAKRVKLDGGDKKYSIGLDIGTNSVGWAVITDEYKVPSKKFKVLGNTDRHSIKKNLIGALLFDSGETAEATRLKRTARRRYTRRKNRICYLQEIFSNEMAKVDDSFFHRLEESFLVEEDKKHERHPIFGNIVDEVAYHEKYPTIYHLRKKLVDSTDKADLRLIYLALAHMIKFRGHFLIEGDLNPDNSDVDKLFIQLVQTYNQLFEENPINASGVDAKAILSARLSKSRRLENLIAQLPGEKKNGLFGNLIALSLGLTPNFKSNFDLAEDAKLQLSKDTYDDDLDNLLAQIGDQYADLFLAAKNLSDAILLSDILRVNTEITKAPLSASMIKRYDEHHQDLTLLKALVRQQLPEKYKEIFFDQSKNGYAGYIDGGASQEEFYKFIKPILEKMDGTEELLVKLNREDLLRKQRTFDNGSIPHQIHLGELHAILRRQEDFYPFLKDNREKIEKILTFRIPYYVGPLARGNSRFAWMTRKSEETITPWNFEEVVDKGASAQSFIERMTNFDKNLPNEKVLPKHSLLYEYFTVYNELTKVKYVTEGMRKPAFLSGEQKKAIVDLLFKTNRKVTVKQLKEDYFKKIECFDSVEISGVEDRFNASLGTYHDLLKIIKDKDFLDNEENEDILEDIVLTLTLFEDREMIEERLKTYAHLFDDKVMKQLKRRRYTGWGRLSRKLINGIRDKQSGKTILDFLKSDGFANRNFMQLIHDDSLTFKEDIQKAQVSGQGDSLHEHIANLAGSPAIKKGILQTVKVVDELVKVMGRHKPENIVIEMARENQTTQKGQKNSRERMKRIEEGIKELGSQILKEHPVENTQLQNEKLYLYYLQNGRDMYVDQELDINRLSDYDVDHIVPQSFLKDDSIDNKVLTRSDKARGKSDNVPSEEVVKKMKNYWRQLLNAKLITQRKFDNLTKAERGGLSELDKAGFIKRQLVETRQITKHVAQILDSRMNTKYDENDKLIREVKVITLKSKLVSDFRKDFQFYKVREINNYHHAHDAYLNAVVGTALIKKYPKLESEFVYGDYKVYDVRKMIAKSEQEIGKATAKYFFYSNIMNFFKTEITLANGEIRKRPLIETNGETGEIVWDKGRDFATVRKVLSMPQVNIVKKTEVQTGGFSKESILPKRNSDKLIARKKDWDPKKYGGFDSPTVAYSVLVVAKVEKGKSKKLKSVKELLGITIMERSSFEKNPIDFLEAKGYKEVKKDLIIKLPKYSLFELENGRKRMLASAGELQKGNELALPSKYVNFLYLASHYEKLKGSPEDNEQKQLFVEQHKHYLDEIIEQISEFSKRVILADANLDKVLSAYNKHRDKPIREQAENIIHLFTLTNLGAPAAFKYFDTTIDRKRYTSTKEVLDATLIHQSITGLYETRIDLSQLGGDGGEAAAKGGGGGSGGVQEISDSRPMLHIYLNGRRFLGLLDTGADKTCIAGRDWPANWPIHQTESSLQGLGMACGVARSSQPLRWQHEDKSGIIHPFVIPTLPFTLWGRDIMKDIKVRLMTDSPDDSQDLMIGAIESNLFADQISWKSDQPVWLNQWPLKQEKLQALQQLVTEQLQLGHLEESNSPWNTPVFVIKKKSGKWRLLQDLRAVNATMHDMGALQPGLPSPVAVPKGWEIIIIDLQDCFFNIKLHPEDCKRFAFSVPSPNFKRPYQRFQWKVLPQGMKNSPTLCQKFVDKAILTVRDKYQDSYIVHYMDDILLAHPSRSIVDEILTSMIQALNKHGLVVSTEKIQKYDNLKYLGTHIQGDSVSYQKLQIRTDKLRTLNDFQKLLGNINWIRPFLKLTTGELKPLFEILNGDSNPISTRKLTPEACKALQLMNERLSTARVKRLDLSQPWSLCILKTEYTPTACLWQDGVVEWIHLPHISPKVITPYDIFCTQLIIKGRHRSKELFSKDPDYIVVPYTKVQFDLLLQEKEDWPISLLGFLGEVHFHLPKDPLLTFTLQTAIIFPHMTSTTPLEKGIVIFTDGSANGRSVTYIQGREPIIKENTQNTAQQAEIVAVITAFEEVSQPFNLYTDSKYVTGLFPEIETATLSPRTKIYTELKHLQRLIHKRQEKFYIGHIRGHTGLPGPLAQGNAYADSLTRILTAAGKRTADGSEFEKRTADGSEFESPKKKAKVE

SEQ ID NO: 3157 - protein, 2125 aa, synthetic construct
MPAAKRVKLDGGDKKYSIGLDIGTNSVGWAVITDEYKVPSKKFKVLGNTDRHSIKKNLIGALLFDSGETAEATRLKRTARRRYTRRKNRICYLQEIFSNEMAKVDDSFFHRLEESFLVEEDKKHERHPIFGNIVDEVAYHEKYPTIYHLRKKLVDSTDKADLRLIYLALAHMIKFRGHFLIEGDLNPDNSDVDKLFIQLVQTYNQLFEENPINASGVDAKAILSARLSKSRRLENLIAQLPGEKKNGLFGNLIALSLGLTPNFKSNFDLAEDAKLQLSKDTYDDDLDNLLAQIGDQYADLFLAAKNLSDAILLSDILRVNTEITKAPLSASMIKRYDEHHQDLTLLKALVRQQLPEKYKEIFFDQSKNGYAGYIDGGASQEEFYKFIKPILEKMDGTEELLVKLNREDLLRKQRTFDNGSIPHQIHLGELHAILRRQEDFYPFLKDNREKIEKILTFRIPYYVGPLARGNSRFAWMTRKSEETITPWNFEEVVDKGASAQSFIERMTNFDKNLPNEKVLPKHSLLYEYFTVYNELTKVKYVTEGMRKPAFLSGEQKKAIVDLLFKTNRKVTVKQLKEDYFKKIECFDSVEISGVEDRFNASLGTYHDLLKIIKDKDFLDNEENEDILEDIVLTLTLFEDREMIEERLKTYAHLFDDKVMKQLKRRRYTGWGRLSRKLINGIRDKQSGKTILDFLKSDGFANRNFMQLIHDDSLTFKEDIQKAQVSGQGDSLHEHIANLAGSPAIKKGILQTVKVVDELVKVMGRHKPENIVIEMARENQTTQKGQKNSRERMKRIEEGIKELGSQILKEHPVENTQLQNEKLYLYYLQNGRDMYVDQELDINRLSDYDVDHIVPQSFLKDDSIDNKVLTRSDKARGKSDNVPSEEVVKKMKNYWRQLLNAKLITQRKFDNLTKAERGGLSELDKAGFIKRQLVETRQITKHVAQILDSRMNTKYDENDKLIREVKVITLKSKLVSDFRKDFQFYKVREINNYHHAHDAYLNAVVGTALIKKYPKLESEFVYGDYKVYDVRKMIAKSEQEIGKATAKYFFYSNIMNFFKTEITLANGEIRKRPLIETNGETGEIVWDKGRDFATVRKVLSMPQVNIVKKTEVQTGGFSKESILPKRNSDKLIARKKDWDPKKYGGFDSPTVAYSVLVVAKVEKGKSKKLKSVKELLGITIMERSSFEKNPIDFLEAKGYKEVKKDLIIKLPKYSLFELENGRKRMLASAGELQKGNELALPSKYVNFLYLASHYEKLKGSPEDNEQKQLFVEQHKHYLDEIIEQISEFSKRVILADANLDKVLSAYNKHRDKPIREQAENIIHLFTLTNLGAPAAFKYFDTTIDRKRYTSTKEVLDATLIHQSITGLYETRIDLSQLGGDGGEAAAKEAAAKEAAAKEAAAKGGVQEISDSRPMLHIYLNGRRFLGLLDTGADKTCIAGRDWPANWPIHQTESSLQGLGMACGVARSSQPLRWQHEDKSGIIHPFVIPTLPFTLWGRDIMKDIKVRLMTDSPDDSQDLMIGAIESNLFADQISWKSDQPVWLNQWPLKQEKLQALQQLVTEQLQLGHLEESNSPWNTPVFVIKKKSGKWRLLQDLRAVNATMHDMGALQPGLPSPVAVPKGWEIIIIDLQDCFFNIKLHPEDCKRFAFSVPSPNFKRPYQRFQWKVLPQGMKNSPTLCQKFVDKAILTVRDKYQDSYIVHYMDDILLAHPSRSIVDEILTSMIQALNKHGLVVSTEKIQKYDNLKYLGTHIQGDSVSYQKLQIRTDKLRTLNDFQKLLGNINWIRPFLKLTTGELKPLFEILNGDSNPISTRKLTPEACKALQLMNERLSTARVKRLDLSQPWSLCILKTEYTPTACLWQDGVVEWIHLPHISPKVITPYDIFCTQLIIKGRHRSKELFSKDPDYIVVPYTKVQFDLLLQEKEDWPISLLGFLGEVHFHLPKDPLLTFTLQTAIIFPHMTSTTPLEKGIVIFTDGSANGRSVTYIQGREPIIKENTQNTAQQAEIVAVITAFEEVSQPFNLYTDSKYVTGLFPEIETATLSPRTKIYTELKHLQRLIHKRQEKFYIGHIRGHTGLPGPLAQGNAYADSLTRILTAAGKRTADGSEFEKRTADGSEFESPKKKAKVE

SEQ ID NO: 3158 - protein, 2116 aa, synthetic construct
MPAAKRVKLDGGDKKYSIGLDIGTNSVGWAVITDEYKVPSKKFKVLGNTDRHSIKKNLIGALLFDSGETAEATRLKRTARRRYTRRKNRICYLQEIFSNEMAKVDDSFFHRLEESFLVEEDKKHERHPIFGNIVDEVAYHEKYPTIYHLRKKLVDSTDKADLRLIYLALAHMIKFRGHFLIEGDLNPDNSDVDKLFIQLVQTYNQLFEENPINASGVDAKAILSARLSKSRRLENLIAQLPGEKKNGLFGNLIALSLGLTPNFKSNFDLAEDAKLQLSKDTYDDDLDNLLAQIGDQYADLFLAAKNLSDAILLSDILRVNTEITKAPLSASMIKRYDEHHQDLTLLKALVRQQLPEKYKEIFFDQSKNGYAGYIDGGASQEEFYKFIKPILEKMDGTEELLVKLNREDLLRKQRTFDNGSIPHQIHLGELHAILRRQEDFYPFLKDNREKIEKILTFRIPYYVGPLARGNSRFAWMTRKSEETITPWNFEEVVDKGASAQSFIERMTNFDKNLPNEKVLPKHSLLYEYFTVYNELTKVKYVTEGMRKPAFLSGEQKKAIVDLLFKTNRKVTVKQLKEDYFKKIECFDSVEISGVEDRFNASLGTYHDLLKIIKDKDFLDNEENEDILEDIVLTLTLFEDREMIEERLKTYAHLFDDKVMKQLKRRRYTGWGRLSRKLINGIRDKQSGKTILDFLKSDGFANRNFMQLIHDDSLTFKEDIQKAQVSGQGDSLHEHIANLAGSPAIKKGILQTVKVVDELVKVMGRHKPENIVIEMARENQTTQKGQKNSRERMKRIEEGIKELGSQILKEHPVENTQLQNEKLYLYYLQNGRDMYVDQELDINRLSDYDVDHIVPQSFLKDDSIDNKVLTRSDKARGKSDNVPSEEVVKKMKNYWRQLLNAKLITQRKFDNLTKAERGGLSELDKAGFIKRQLVETRQITKHVAQILDSRMNTKYDENDKLIREVKVITLKSKLVSDFRKDFQFYKVREINNYHHAHDAYLNAVVGTALIKKYPKLESEFVYGDYKVYDVRKMIAKSEQEIGKATAKYFFYSNIMNFFKTEITLANGEIRKRPLIETNGETGEIVWDKGRDFATVRKVLSMPQVNIVKKTEVQTGGFSKESILPKRNSDKLIARKKDWDPKKYGGFDSPTVAYSVLVVAKVEKGKSKKLKSVKELLGITIMERSSFEKNPIDFLEAKGYKEVKKDLIIKLPKYSLFELENGRKRMLASAGELQKGNELALPSKYVNFLYLASHYEKLKGSPEDNEQKQLFVEQHKHYLDEIIEQISEFSKRVILADANLDKVLSAYNKHRDKPIREQAENIIHLFTLTNLGAPAAFKYFDTTIDRKRYTSTKEVLDATLIHQSITGLYETRIDLSQLGGDGGGGSEAAAKGSSGGVQEISDSRPMLHIYLNGRRFLGLLDTGADKTCIAGRDWPANWPIHQTESSLQGLGMACGVARSSQPLRWQHEDKSGIIHPFVIPTLPFTLWGRDIMKDIKVRLMTDSPDDSQDLMIGAIESNLFADQISWKSDQPVWLNQWPLKQEKLQALQQLVTEQLQLGHLEESNSPWNTPVFVIKKKSGKWRLLQDLRAVNATMHDMGALQPGLPSPVAVPKGWEIIIIDLQDCFFNIKLHPEDCKRFAFSVPSPNFKRPYQRFQWKVLPQGMKNSPTLCQKFVDKAILTVRDKYQDSYIVHYMDDILLAHPSRSIVDEILTSMIQALNKHGLVVSTEKIQKYDNLKYLGTHIQGDSVSYQKLQIRTDKLRTLNDFQKLLGNINWIRPFLKLTTGELKPLFEILNGDSNPISTRKLTPEACKALQLMNERLSTARVKRLDLSQPWSLCILKTEYTPTACLWQDGVVEWIHLPHISPKVITPYDIFCTQLIIKGRHRSKELFSKDPDYIVVPYTKVQFDLLLQEKEDWPISLLGFLGEVHFHLPKDPLLTFTLQTAIIFPHMTSTTPLEKGIVIFTDGSANGRSVTYIQGREPIIKENTQNTAQQAEIVAVITAFEEVSQPFNLYTDSKYVTGLFPEIETATLSPRTKIYTELKHLQRLIHKRQEKFYIGHIRGHTGLPGPLAQGNAYADSLTRILTAAGKRTADGSEFEKRTADGSEFESPKKKAKVE

SEQ ID NO: 3159 - protein, 2114 aa, synthetic construct
MPAAKRVKLDGGDKKYSIGLDIGTNSVGWAVITDEYKVPSKKFKVLGNTDRHSIKKNLIGALLFDSGETAEATRLKRTARRRYTRRKNRICYLQEIFSNEMAKVDDSFFHRLEESFLVEEDKKHERHPIFGNIVDEVAYHEKYPTIYHLRKKLVDSTDKADLRLIYLALAHMIKFRGHFLIEGDLNPDNSDVDKLFIQLVQTYNQLFEENPINASGVDAKAILSARLSKSRRLENLIAQLPGEKKNGLFGNLIALSLGLTPNFKSNFDLAEDAKLQLSKDTYDDDLDNLLAQIGDQYADLFLAAKNLSDAILLSDILRVNTEITKAPLSASMIKRYDEHHQDLTLLKALVRQQLPEKYKEIFFDQSKNGYAGYIDGGASQEEFYKFIKPILEKMDGTEELLVKLNREDLLRKQRTFDNGSIPHQIHLGELHAILRRQEDFYPFLKDNREKIEKILTFRIPYYVGPLARGNSRFAWMTRKSEETITPWNFEEVVDKGASAQSFIERMTNFDKNLPNEKVLPKHSLLYEYFTVYNELTKVKYVTEGMRKPAFLSGEQKKAIVDLLFKTNRKVTVKQLKEDYFKKIECFDSVEISGVEDRFNASLGTYHDLLKIIKDKDFLDNEENEDILEDIVLTLTLFEDREMIEERLKTYAHLFDDKVMKQLKRRRYTGWGRLSRKLINGIRDKQSGKTILDFLKSDGFANRNFMQLIHDDSLTFKEDIQKAQVSGQGDSLHEHIANLAGSPAIKKGILQTVKVVDELVKVMGRHKPENIVIEMARENQTTQKGQKNSRERMKRIEEGIKELGSQILKEHPVENTQLQNEKLYLYYLQNGRDMYVDQELDINRLSDYDVDHIVPQSFLKDDSIDNKVLTRSDKARGKSDNVPSEEVVKKMKNYWRQLLNAKLITQRKFDNLTKAERGGLSELDKAGFIKRQLVETRQITKHVAQILDSRMNTKYDENDKLIREVKVITLKSKLVSDFRKDFQFYKVREINNYHHAHDAYLNAVVGTALIKKYPKLESEFVYGDYKVYDVRKMIAKSEQEIGKATAKYFFYSNIMNFFKTEITLANGEIRKRPLIETNGETGEIVWDKGRDFATVRKVLSMPQVNIVKKTEVQTGGFSKESILPKRNSDKLIARKKDWDPKKYGGFDSPTVAYSVLVVAKVEKGKSKKLKSVKELLGITIMERSSFEKNPIDFLEAKGYKEVKKDLIIKLPKYSLFELENGRKRMLASAGELQKGNELALPSKYVNFLYLASHYEKLKGSPEDNEQKQLFVEQHKHYLDEIIEQISEFSKRVILADANLDKVLSAYNKHRDKPIREQAENIIHLFTLTNLGAPAAFKYFDTTIDRKRYTSTKEVLDATLIHQSITGLYETRIDLSQLGGDGGGGGGSSGGSGGVQEISDSRPMLHIYLNGRRFLGLLDTGADKTCIAGRDWPANWPIHQTESSLQGLGMACGVARSSQPLRWQHEDKSGIIHPFVIPTLPFTLWGRDIMKDIKVRLMTDSPDDSQDLMIGAIESNLFADQISWKSDQPVWLNQWPLKQEKLQALQQLVTEQLQLGHLEESNSPWNTPVFVIKKKSGKWRLLQDLRAVNATMHDMGALQPGLPSPVAVPKGWEIIIIDLQDCFFNIKLHPEDCKRFAFSVPSPNFKRPYQRFQWKVLPQGMKNSPTLCQKFVDKAILTVRDKYQDSYIVHYMDDILLAHPSRSIVDEILTSMIQALNKHGLVVSTEKIQKYDNLKYLGTHIQGDSVSYQKLQIRTDKLRTLNDFQKLLGNINWIRPFLKLTTGELKPLFEILNGDSNPISTRKLTPEACKALQLMNERLSTARVKRLDLSQPWSLCILKTEYTPTACLWQDGVVEWIHLPHISPKVITPYDIFCTQLIIKGRHRSKELFSKDPDYIVVPYTKVQFDLLLQEKEDWPISLLGFLGEVHFHLPKDPLLTFTLQTAIIFPHMTSTTPLEKGIVIFTDGSANGRSVTYIQGREPIIKENTQNTAQQAEIVAVITAFEEVSQPFNLYTDSKYVTGLFPEIETATLSPRTKIYTELKHLQRLIHKRQEKFYIGHIRGHTGLPGPLAQGNAYADSLTRILTAAGKRTADGSEFEKRTADGSEFESPKKKAKVE

SEQ ID NO: 3160 - protein, 2111 aa, synthetic construct
MPAAKRVKLDGGDKKYSIGLDIGTNSVGWAVITDEYKVPSKKFKVLGNTDRHSIKKNLIGALLFDSGETAEATRLKRTARRRYTRRKNRICYLQEIFSNEMAKVDDSFFHRLEESFLVEEDKKHERHPIFGNIVDEVAYHEKYPTIYHLRKKLVDSTDKADLRLIYLALAHMIKFRGHFLIEGDLNPDNSDVDKLFIQLVQTYNQLFEENPINASGVDAKAILSARLSKSRRLENLIAQLPGEKKNGLFGNLIALSLGLTPNFKSNFDLAEDAKLQLSKDTYDDDLDNLLAQIGDQYADLFLAAKNLSDAILLSDILRVNTEITKAPLSASMIKRYDEHHQDLTLLKALVRQQLPEKYKEIFFDQSKNGYAGYIDGGASQEEFYKFIKPILEKMDGTEELLVKLNREDLLRKQRTFDNGSIPHQIHLGELHAILRRQEDFYPFLKDNREKIEKILTFRIPYYVGPLARGNSRFAWMTRKSEETITPWNFEEVVDKGASAQSFIERMTNFDKNLPNEKVLPKHSLLYEYFTVYNELTKVKYVTEGMRKPAFLSGEQKKAIVDLLFKTNRKVTVKQLKEDYFKKIECFDSVEISGVEDRFNASLGTYHDLLKIIKDKDFLDNEENEDILEDIVLTLTLFEDREMIEERLKTYAHLFDDKVMKQLKRRRYTGWGRLSRKLINGIRDKQSGKTILDFLKSDGFANRNFMQLIHDDSLTFKEDIQKAQVSGQGDSLHEHIANLAGSPAIKKGILQTVKVVDELVKVMGRHKPENIVIEMARENQTTQKGQKNSRERMKRIEEGIKELGSQILKEHPVENTQLQNEKLYLYYLQNGRDMYVDQELDINRLSDYDVDHIVPQSFLKDDSIDNKVLTRSDKARGKSDNVPSEEVVKKMKNYWRQLLNAKLITQRKFDNLTKAERGGLSELDKAGFIKRQLVETRQITKHVAQILDSRMNTKYDENDKLIREVKVITLKSKLVSDFRKDFQFYKVREINNYHHAHDAYLNAVVGTALIKKYPKLESEFVYGDYKVYDVRKMIAKSEQEIGKATAKYFFYSNIMNFFKTEITLANGEIRKRPLIETNGETGEIVWDKGRDFATVRKVLSMPQVNIVKKTEVQTGGFSKESILPKRNSDKLIARKKDWDPKKYGGFDSPTVAYSVLVVAKVEKGKSKKLKSVKELLGITIMERSSFEKNPIDFLEAKGYKEVKKDLIIKLPKYSLFELENGRKRMLASAGELQKGNELALPSKYVNFLYLASHYEKLKGSPEDNEQKQLFVEQHKHYLDEIIEQISEFSKRVILADANLDKVLSAYNKHRDKPIREQAENIIHLFTLTNLGAPAAFKYFDTTIDRKRYTSTKEVLDATLIHQSITGLYETRIDLSQLGGDGGGGSPAPGGVQEISDSRPMLHIYLNGRRFLGLLDTGADKTCIAGRDWPANWPIHQTESSLQGLGMACGVARSSQPLRWQHEDKSGIIHPFVIPTLPFTLWGRDIMKDIKVRLMTDSPDDSQDLMIGAIESNLFADQISWKSDQPVWLNQWPLKQEKLQALQQLVTEQLQLGHLEESNSPWNTPVFVIKKKSGKWRLLQDLRAVNATMHDMGALQPGLPSPVAVPKGWEIIIIDLQDCFFNIKLHPEDCKRFAFSVPSPNFKRPYQRFQWKVLPQGMKNSPTLCQKFVDKAILTVRDKYQDSYIVHYMDDILLAHPSRSIVDEILTSMIQALNKHGLVVSTEKIQKYDNLKYLGTHIQGDSVSYQKLQIRTDKLRTLNDFQKLLGNINWIRPFLKLTTGELKPLFEILNGDSNPISTRKLTPEACKALQLMNERLSTARVKRLDLSQPWSLCILKTEYTPTACLWQDGVVEWIHLPHISPKVITPYDIFCTQLIIKGRHRSKELFSKDPDYIVVPYTKVQFDLLLQEKEDWPISLLGFLGEVHFHLPKDPLLTFTLQTAIIFPHMTSTTPLEKGIVIFTDGSANGRSVTYIQGREPIIKENTQNTAQQAEIVAVITAFEEVSQPFNLYTDSKYVTGLFPEIETATLSPRTKIYTELKHLQRLIHKRQEKFYIGHIRGHTGLPGPLAQGNAYADSLTRILTAAGKRTADGSEFEKRTADGSEFESPKKKAKVE

SEQ ID NO: 3161 - protein, 2114 aa, synthetic construct
MPAAKRVKLDGGDKKYSIGLDIGTNSVGWAVITDEYKVPSKKFKVLGNTDRHSIKKNLIGALLFDSGETAEATRLKRTARRRYTRRKNRICYLQEIFSNEMAKVDDSFFHRLEESFLVEEDKKHERHPIFGNIVDEVAYHEKYPTIYHLRKKLVDSTDKADLRLIYLALAHMIKFRGHFLIEGDLNPDNSDVDKLFIQLVQTYNQLFEENPINASGVDAKAILSARLSKSRRLENLIAQLPGEKKNGLFGNLIALSLGLTPNFKSNFDLAEDAKLQLSKDTYDDDLDNLLAQIGDQYADLFLAAKNLSDAILLSDILRVNTEITKAPLSASMIKRYDEHHQDLTLLKALVRQQLPEKYKEIFFDQSKNGYAGYIDGGASQEEFYKFIKPILEKMDGTEELLVKLNREDLLRKQRTFDNGSIPHQIHLGELHAILRRQEDFYPFLKDNREKIEKILTFRIPYYVGPLARGNSRFAWMTRKSEETITPWNFEEVVDKGASAQSFIERMTNFDKNLPNEKVLPKHSLLYEYFTVYNELTKVKYVTEGMRKPAFLSGEQKKAIVDLLFKTNRKVTVKQLKEDYFKKIECFDSVEISGVEDRFNASLGTYHDLLKIIKDKDFLDNEENEDILEDIVLTLTLFEDREMIEERLKTYAHLFDDKVMKQLKRRRYTGWGRLSRKLINGIRDKQSGKTILDFLKSDGFANRNFMQLIHDDSLTFKEDIQKAQVSGQGDSLHEHIANLAGSPAIKKGILQTVKVVDELVKVMGRHKPENIVIEMARENQTTQKGQKNSRERMKRIEEGIKELGSQILKEHPVENTQLQNEKLYLYYLQNGRDMYVDQELDINRLSDYDVDHIVPQSFLKDDSIDNKVLTRSDKARGKSDNVPSEEVVKKMKNYWRQLLNAKLITQRKFDNLTKAERGGLSELDKAGFIKRQLVETRQITKHVAQILDSRMNTKYDENDKLIREVKVITLKSKLVSDFRKDFQFYKVREINNYHHAHDAYLNAVVGTALIKKYPKLESEFVYGDYKVYDVRKMIAKSEQEIGKATAKYFFYSNIMNFFKTEITLANGEIRKRPLIETNGETGEIVWDKGRDFATVRKVLSMPQVNIVKKTEVQTGGFSKESILPKRNSDKLIARKKDWDPKKYGGFDSPTVAYSVLVVAKVEKGKSKKLKSVKELLGITIMERSSFEKNPIDFLEAKGYKEVKKDLIIKLPKYSLFELENGRKRMLASAGELQKGNELALPSKYVNFLYLASHYEKLKGSPEDNEQKQLFVEQHKHYLDEIIEQISEFSKRVILADANLDKVLSAYNKHRDKPIREQAENIIHLFTLTNLGAPAAFKYFDTTIDRKRYTSTKEVLDATLIHQSITGLYETRIDLSQLGGDGGPAPGSSGGSGGVQEISDSRPMLHIYLNGRRFLGLLDTGADKTCIAGRDWPANWPIHQTESSLQGLGMACGVARSSQPLRWQHEDKSGIIHPFVIPTLPFTLWGRDIMKDIKVRLMTDSPDDSQDLMIGAIESNLFADQISWKSDQPVWLNQWPLKQEKLQALQQLVTEQLQLGHLEESNSPWNTPVFVIKKKSGKWRLLQDLRAVNATMHDMGALQPGLPSPVAVPKGWEIIIIDLQDCFFNIKLHPEDCKRFAFSVPSPNFKRPYQRFQWKVLPQGMKNSPTLCQKFVDKAILTVRDKYQDSYIVHYMDDILLAHPSRSIVDEILTSMIQALNKHGLVVSTEKIQKYDNLKYLGTHIQGDSVSYQKLQIRTDKLRTLNDFQKLLGNINWIRPFLKLTTGELKPLFEILNGDSNPISTRKLTPEACKALQLMNERLSTARVKRLDLSQPWSLCILKTEYTPTACLWQDGVVEWIHLPHISPKVITPYDIFCTQLIIKGRHRSKELFSKDPDYIVVPYTKVQFDLLLQEKEDWPISLLGFLGEVHFHLPKDPLLTFTLQTAIIFPHMTSTTPLEKGIVIFTDGSANGRSVTYIQGREPIIKENTQNTAQQAEIVAVITAFEEVSQPFNLYTDSKYVTGLFPEIETATLSPRTKIYTELKHLQRLIHKRQEKFYIGHIRGHTGLPGPLAQGNAYADSLTRILTAAGKRTADGSEFEKRTADGSEFESPKKKAKVE

SEQ ID NO: 3162 - protein, 2116 aa, synthetic construct
MPAAKRVKLDGGDKKYSIGLDIGTNSVGWAVITDEYKVPSKKFKVLGNTDRHSIKKNLIGALLFDSGETAEATRLKRTARRRYTRRKNRICYLQEIFSNEMAKVDDSFFHRLEESFLVEEDKKHERHPIFGNIVDEVAYHEKYPTIYHLRKKLVDSTDKADLRLIYLALAHMIKFRGHFLIEGDLNPDNSDVDKLFIQLVQTYNQLFEENPINASGVDAKAILSARLSKSRRLENLIAQLPGEKKNGLFGNLIALSLGLTPNFKSNFDLAEDAKLQLSKDTYDDDLDNLLAQIGDQYADLFLAAKNLSDAILLSDILRVNTEITKAPLSASMIKRYDEHHQDLTLLKALVRQQLPEKYKEIFFDQSKNGYAGYIDGGASQEEFYKFIKPILEKMDGTEELLVKLNREDLLRKQRTFDNGSIPHQIHLGELHAILRRQEDFYPFLKDNREKIEKILTFRIPYYVGPLARGNSRFAWMTRKSEETITPWNFEEVVDKGASAQSFIERMTNFDKNLPNEKVLPKHSLLYEYFTVYNELTKVKYVTEGMRKPAFLSGEQKKAIVDLLFKTNRKVTVKQLKEDYFKKIECFDSVEISGVEDRFNASLGTYHDLLKIIKDKDFLDNEENEDILEDIVLTLTLFEDREMIEERLKTYAHLFDDKVMKQLKRRRYTGWGRLSRKLINGIRDKQSGKTILDFLKSDGFANRNFMQLIHDDSLTFKEDIQKAQVSGQGDSLHEHIANLAGSPAIKKGILQTVKVVDELVKVMGRHKPENIVIEMARENQTTQKGQKNSRERMKRIEEGIKELGSQILKEHPVENTQLQNEKLYLYYLQNGRDMYVDQELDINRLSDYDVDHIVPQSFLKDDSIDNKVLTRSDKARGKSDNVPSEEVVKKMKNYWRQLLNAKLITQRKFDNLTKAERGGLSELDKAGFIKRQLVETRQITKHVAQILDSRMNTKYDENDKLIREVKVITLKSKLVSDFRKDFQFYKVREINNYHHAHDAYLNAVVGTALIKKYPKLESEFVYGDYKVYDVRKMIAKSEQEIGKATAKYFFYSNIMNFFKTEITLANGEIRKRPLIETNGETGEIVWDKGRDFATVRKVLSMPQVNIVKKTEVQTGGFSKESILPKRNSDKLIARKKDWDPKKYGGFDSPTVAYSVLVVAKVEKGKSKKLKSVKELLGITIMERSSFEKNPIDFLEAKGYKEVKKDLIIKLPKYSLFELENGRKRMLASAGELQKGNELALPSKYVNFLYLASHYEKLKGSPEDNEQKQLFVEQHKHYLDEIIEQISEFSKRVILADANLDKVLSAYNKHRDKPIREQAENIIHLFTLTNLGAPAAFKYFDTTIDRKRYTSTKEVLDATLIHQSITGLYETRIDLSQLGGDGGGGSGGGEAAAKGGVQEISDSRPMLHIYLNGRRFLGLLDTGADKTCIAGRDWPANWPIHQTESSLQGLGMACGVARSSQPLRWQHEDKSGIIHPFVIPTLPFTLWGRDIMKDIKVRLMTDSPDDSQDLMIGAIESNLFADQISWKSDQPVWLNQWPLKQEKLQALQQLVTEQLQLGHLEESNSPWNTPVFVIKKKSGKWRLLQDLRAVNATMHDMGALQPGLPSPVAVPKGWEIIIIDLQDCFFNIKLHPEDCKRFAFSVPSPNFKRPYQRFQWKVLPQGMKNSPTLCQKFVDKAILTVRDKYQDSYIVHYMDDILLAHPSRSIVDEILTSMIQALNKHGLVVSTEKIQKYDNLKYLGTHIQGDSVSYQKLQIRTDKLRTLNDFQKLLGNINWIRPFLKLTTGELKPLFEILNGDSNPISTRKLTPEACKALQLMNERLSTARVKRLDLSQPWSLCILKTEYTPTACLWQDGVVEWIHLPHISPKVITPYDIFCTQLIIKGRHRSKELFSKDPDYIVVPYTKVQFDLLLQEKEDWPISLLGFLGEVHFHLPKDPLLTFTLQTAIIFPHMTSTTPLEKGIVIFTDGSANGRSVTYIQGREPIIKENTQNTAQQAEIVAVITAFEEVSQPFNLYTDSKYVTGLFPEIETATLSPRTKIYTELKHLQRLIHKRQEKFYIGHIRGHTGLPGPLAQGNAYADSLTRILTAAGKRTADGSEFEKRTADGSEFESPKKKAKVE

SEQ ID NO: 3163 - protein, 2116 aa, synthetic construct
MPAAKRVKLDGGDKKYSIGLDIGTNSVGWAVITDEYKVPSKKFKVLGNTDRHSIKKNLIGALLFDSGETAEATRLKRTARRRYTRRKNRICYLQEIFSNEMAKVDDSFFHRLEESFLVEEDKKHERHPIFGNIVDEVAYHEKYPTIYHLRKKLVDSTDKADLRLIYLALAHMIKFRGHFLIEGDLNPDNSDVDKLFIQLVQTYNQLFEENPINASGVDAKAILSARLSKSRRLENLIAQLPGEKKNGLFGNLIALSLGLTPNFKSNFDLAEDAKLQLSKDTYDDDLDNLLAQIGDQYADLFLAAKNLSDAILLSDILRVNTEITKAPLSASMIKRYDEHHQDLTLLKALVRQQLPEKYKEIFFDQSKNGYAGYIDGGASQEEFYKFIKPILEKMDGTEELLVKLNREDLLRKQRTFDNGSIPHQIHLGELHAILRRQEDFYPFLKDNREKIEKILTFRIPYYVGPLARGNSRFAWMTRKSEETITPWNFEEVVDKGASAQSFIERMTNFDKNLPNEKVLPKHSLLYEYFTVYNELTKVKYVTEGMRKPAFLSGEQKKAIVDLLFKTNRKVTVKQLKEDYFKKIECFDSVEISGVEDRFNASLGTYHDLLKIIKDKDFLDNEENEDILEDIVLTLTLFEDREMIEERLKTYAHLFDDKVMKQLKRRRYTGWGRLSRKLINGIRDKQSGKTILDFLKSDGFANRNFMQLIHDDSLTFKEDIQKAQVSGQGDSLHEHIANLAGSPAIKKGILQTVKVVDELVKVMGRHKPENIVIEMARENQTTQKGQKNSRERMKRIEEGIKELGSQILKEHPVENTQLQNEKLYLYYLQNGRDMYVDQELDINRLSDYDVDHIVPQSFLKDDSIDNKVLTRSDKARGKSDNVPSEEVVKKMKNYWRQLLNAKLITQRKFDNLTKAERGGLSELDKAGFIKRQLVETRQITKHVAQILDSRMNTKYDENDKLIREVKVITLKSKLVSDFRKDFQFYKVREINNYHHAHDAYLNAVVGTALIKKYPKLESEFVYGDYKVYDVRKMIAKSEQEIGKATAKYFFYSNIMNFFKTEITLANGEIRKRPLIETNGETGEIVWDKGRDFATVRKVLSMPQVNIVKKTEVQTGGFSKESILPKRNSDKLIARKKDWDPKKYGGFDSPTVAYSVLVVAKVEKGKSKKLKSVKELLGITIMERSSFEKNPIDFLEAKGYKEVKKDLIIKLPKYSLFELENGRKRMLASAGELQKGNELALPSKYVNFLYLASHYEKLKGSPEDNEQKQLFVEQHKHYLDEIIEQISEFSKRVILADANLDKVLSAYNKHRDKPIREQAENIIHLFTLTNLGAPAAFKYFDTTIDRKRYTSTKEVLDATLIHQSITGLYETRIDLSQLGGDGGGGGGSSEAAAKGGVQEISDSRPMLHIYLNGRRFLGLLDTGADKTCIAGRDWPANWPIHQTESSLQGLGMACGVARSSQPLRWQHEDKSGIIHPFVIPTLPFTLWGRDIMKDIKVRLMTDSPDDSQDLMIGAIESNLFADQISWKSDQPVWLNQWPLKQEKLQALQQLVTEQLQLGHLEESNSPWNTPVFVIKKKSGKWRLLQDLRAVNATMHDMGALQPGLPSPVAVPKGWEIIIIDLQDCFFNIKLHPEDCKRFAFSVPSPNFKRPYQRFQWKVLPQGMKNSPTLCQKFVDKAILTVRDKYQDSYIVHYMDDILLAHPSRSIVDEILTSMIQALNKHGLVVSTEKIQKYDNLKYLGTHIQGDSVSYQKLQIRTDKLRTLNDFQKLLGNINWIRPFLKLTTGELKPLFEILNGDSNPISTRKLTPEACKALQLMNERLSTARVKRLDLSQPWSLCILKTEYTPTACLWQDGVVEWIHLPHISPKVITPYDIFCTQLIIKGRHRSKELFSKDPDYIVVPYTKVQFDLLLQEKEDWPISLLGFLGEVHFHLPKDPLLTFTLQTAIIFPHMTSTTPLEKGIVIFTDGSANGRSVTYIQGREPIIKENTQNTAQQAEIVAVITAFEEVSQPFNLYTDSKYVTGLFPEIETATLSPRTKIYTELKHLQRLIHKRQEKFYIGHIRGHTGLPGPLAQGNAYADSLTRILTAAGKRTADGSEFEKRTADGSEFESPKKKAKVE

SEQ ID NO: 3164 - protein, 2116 aa, synthetic construct
MPAAKRVKLDGGDKKYSIGLDIGTNSVGWAVITDEYKVPSKKFKVLGNTDRHSIKKNLIGALLFDSGETAEATRLKRTARRRYTRRKNRICYLQEIFSNEMAKVDDSFFHRLEESFLVEEDKKHERHPIFGNIVDEVAYHEKYPTIYHLRKKLVDSTDKADLRLIYLALAHMIKFRGHFLIEGDLNPDNSDVDKLFIQLVQTYNQLFEENPINASGVDAKAILSARLSKSRRLENLIAQLPGEKKNGLFGNLIALSLGLTPNFKSNFDLAEDAKLQLSKDTYDDDLDNLLAQIGDQYADLFLAAKNLSDAILLSDILRVNTEITKAPLSASMIKRYDEHHQDLTLLKALVRQQLPEKYKEIFFDQSKNGYAGYIDGGASQEEFYKFIKPILEKMDGTEELLVKLNREDLLRKQRTFDNGSIPHQIHLGELHAILRRQEDFYPFLKDNREKIEKILTFRIPYYVGPLARGNSRFAWMTRKSEETITPWNFEEVVDKGASAQSFIERMTNFDKNLPNEKVLPKHSLLYEYFTVYNELTKVKYVTEGMRKPAFLSGEQKKAIVDLLFKTNRKVTVKQLKEDYFKKIECFDSVEISGVEDRFNASLGTYHDLLKIIKDKDFLDNEENEDILEDIVLTLTLFEDREMIEERLKTYAHLFDDKVMKQLKRRRYTGWGRLSRKLINGIRDKQSGKTILDFLKSDGFANRNFMQLIHDDSLTFKEDIQKAQVSGQGDSLHEHIANLAGSPAIKKGILQTVKVVDELVKVMGRHKPENIVIEMARENQTTQKGQKNSRERMKRIEEGIKELGSQILKEHPVENTQLQNEKLYLYYLQNGRDMYVDQELDINRLSDYDVDHIVPQSFLKDDSIDNKVLTRSDKARGKSDNVPSEEVVKKMKNYWRQLLNAKLITQRKFDNLTKAERGGLSELDKAGFIKRQLVETRQITKHVAQILDSRMNTKYDENDKLIREVKVITLKSKLVSDFRKDFQFYKVREINNYHHAHDAYLNAVVGTALIKKYPKLESEFVYGDYKVYDVRKMIAKSEQEIGKATAKYFFYSNIMNFFKTEITLANGEIRKRPLIETNGETGEIVWDKGRDFATVRKVLSMPQVNIVKKTEVQTGGFSKESILPKRNSDKLIARKKDWDPKKYGGFDSPTVAYSVLVVAKVEKGKSKKLKSVKELLGITIMERSSFEKNPIDFLEAKGYKEVKKDLIIKLPKYSLFELENGRKRMLASAGELQKGNELALPSKYVNFLYLASHYEKLKGSPEDNEQKQLFVEQHKHYLDEIIEQISEFSKRVILADANLDKVLSAYNKHRDKPIREQAENIIHLFTLTNLGAPAAFKYFDTTIDRKRYTSTKEVLDATLIHQSITGLYETRIDLSQLGGDGGGGSPAPEAAAKGGVQEISDSRPMLHIYLNGRRFLGLLDTGADKTCIAGRDWPANWPIHQTESSLQGLGMACGVARSSQPLRWQHEDKSGIIHPFVIPTLPFTLWGRDIMKDIKVRLMTDSPDDSQDLMIGAIESNLFADQISWKSDQPVWLNQWPLKQEKLQALQQLVTEQLQLGHLEESNSPWNTPVFVIKKKSGKWRLLQDLRAVNATMHDMGALQPGLPSPVAVPKGWEIIIIDLQDCFFNIKLHPEDCKRFAFSVPSPNFKRPYQRFQWKVLPQGMKNSPTLCQKFVDKAILTVRDKYQDSYIVHYMDDILLAHPSRSIVDEILTSMIQALNKHGLVVSTEKIQKYDNLKYLGTHIQGDSVSYQKLQIRTDKLRTLNDFQKLLGNINWIRPFLKLTTGELKPLFEILNGDSNPISTRKLTPEACKALQLMNERLSTARVKRLDLSQPWSLCILKTEYTPTACLWQDGVVEWIHLPHISPKVITPYDIFCTQLIIKGRHRSKELFSKDPDYIVVPYTKVQFDLLLQEKEDWPISLLGFLGEVHFHLPKDPLLTFTLQTAIIFPHMTSTTPLEKGIVIFTDGSANGRSVTYIQGREPIIKENTQNTAQQAEIVAVITAFEEVSQPFNLYTDSKYVTGLFPEIETATLSPRTKIYTELKHLQRLIHKRQEKFYIGHIRGHTGLPGPLAQGNAYADSLTRILTAAGKRTADGSEFEKRTADGSEFESPKKKAKVE

SEQ ID NO: 3165 - protein, 2117 aa, synthetic construct
MPAAKRVKLDGGDKKYSIGLDIGTNSVGWAVITDEYKVPSKKFKVLGNTDRHSIKKNLIGALLFDSGETAEATRLKRTARRRYTRRKNRICYLQEIFSNEMAKVDDSFFHRLEESFLVEEDKKHERHPIFGNIVDEVAYHEKYPTIYHLRKKLVDSTDKADLRLIYLALAHMIKFRGHFLIEGDLNPDNSDVDKLFIQLVQTYNQLFEENPINASGVDAKAILSARLSKSRRLENLIAQLPGEKKNGLFGNLIALSLGLTPNFKSNFDLAEDAKLQLSKDTYDDDLDNLLAQIGDQYADLFLAAKNLSDAILLSDILRVNTEITKAPLSASMIKRYDEHHQDLTLLKALVRQQLPEKYKEIFFDQSKNGYAGYIDGGASQEEFYKFIKPILEKMDGTEELLVKLNREDLLRKQRTFDNGSIPHQIHLGELHAILRRQEDFYPFLKDNREKIEKILTFRIPYYVGPLARGNSRFAWMTRKSEETITPWNFEEVVDKGASAQSFIERMTNFDKNLPNEKVLPKHSLLYEYFTVYNELTKVKYVTEGMRKPAFLSGEQKKAIVDLLFKTNRKVTVKQLKEDYFKKIECFDSVEISGVEDRFNASLGTYHDLLKIIKDKDFLDNEENEDILEDIVLTLTLFEDREMIEERLKTYAHLFDDKVMKQLKRRRYTGWGRLSRKLINGIRDKQSGKTILDFLKSDGFANRNFMQLIHDDSLTFKEDIQKAQVSGQGDSLHEHIANLAGSPAIKKGILQTVKVVDELVKVMGRHKPENIVIEMARENQTTQKGQKNSRERMKRIEEGIKELGSQILKEHPVENTQLQNEKLYLYYLQNGRDMYVDQELDINRLSDYDVDHIVPQSFLKDDSIDNKVLTRSDKARGKSDNVPSEEVVKKMKNYWRQLLNAKLITQRKFDNLTKAERGGLSELDKAGFIKRQLVETRQITKHVAQILDSRMNTKYDENDKLIREVKVITLKSKLVSDFRKDFQFYKVREINNYHHAHDAYLNAVVGTALIKKYPKLESEFVYGDYKVYDVRKMIAKSEQEIGKATAKYFFYSNIMNFFKTEITLANGEIRKRPLIETNGETGEIVWDKGRDFATVRKVLSMPQVNIVKKTEVQTGGFSKESILPKRNSDKLIARKKDWDPKKYGGFDSPTVAYSVLVVAKVEKGKSKKLKSVKELLGITIMERSSFEKNPIDFLEAKGYKEVKKDLIIKLPKYSLFELENGRKRMLASAGELQKGNELALPSKYVNFLYLASHYEKLKGSPEDNEQKQLFVEQHKHYLDEIIEQISEFSKRVILADANLDKVLSAYNKHRDKPIREQAENIIHLFTLTNLGAPAAFKYFDTTIDRKRYTSTKEVLDATLIHQSITGLYETRIDLSQLGGDGGGSAGSAAGSGEFGGVQEISDSRPMLHIYLNGRRFLGLLDTGADKTCIAGRDWPANWPIHQTESSLQGLGMACGVARSSQPLRWQHEDKSGIIHPFVIPTLPFTLWGRDIMKDIKVRLMTDSPDDSQDLMIGAIESNLFADQISWKSDQPVWLNQWPLKQEKLQALQQLVTEQLQLGHLEESNSPWNTPVFVIKKKSGKWRLLQDLRAVNATMHDMGALQPGLPSPVAVPKGWEIIIIDLQDCFFNIKLHPEDCKRFAFSVPSPNFKRPYQRFQWKVLPQGMKNSPTLCQKFVDKAILTVRDKYQDSYIVHYMDDILLAHPSRSIVDEILTSMIQALNKHGLVVSTEKIQKYDNLKYLGTHIQGDSVSYQKLQIRTDKLRTLNDFQKLLGNINWIRPFLKLTTGELKPLFEILNGDSNPISTRKLTPEACKALQLMNERLSTARVKRLDLSQPWSLCILKTEYTPTACLWQDGVVEWIHLPHISPKVITPYDIFCTQLIIKGRHRSKELFSKDPDYIVVPYTKVQFDLLLQEKEDWPISLLGFLGEVHFHLPKDPLLTFTLQTAIIFPHMTSTTPLEKGIVIFTDGSANGRSVTYIQGREPIIKENTQNTAQQAEIVAVITAFEEVSQPFNLYTDSKYVTGLFPEIETATLSPRTKIYTELKHLQRLIHKRQEKFYIGHIRGHTGLPGPLAQGNAYADSLTRILTAAGKRTADGSEFEKRTADGSEFESPKKKAKVE

SEQ ID NO: 3166 - protein, 2111 aa, synthetic construct
MPAAKRVKLDGGDKKYSIGLDIGTNSVGWAVITDEYKVPSKKFKVLGNTDRHSIKKNLIGALLFDSGETAEATRLKRTARRRYTRRKNRICYLQEIFSNEMAKVDDSFFHRLEESFLVEEDKKHERHPIFGNIVDEVAYHEKYPTIYHLRKKLVDSTDKADLRLIYLALAHMIKFRGHFLIEGDLNPDNSDVDKLFIQLVQTYNQLFEENPINASGVDAKAILSARLSKSRRLENLIAQLPGEKKNGLFGNLIALSLGLTPNFKSNFDLAEDAKLQLSKDTYDDDLDNLLAQIGDQYADLFLAAKNLSDAILLSDILRVNTEITKAPLSASMIKRYDEHHQDLTLLKALVRQQLPEKYKEIFFDQSKNGYAGYIDGGASQEEFYKFIKPILEKMDGTEELLVKLNREDLLRKQRTFDNGSIPHQIHLGELHAILRRQEDFYPFLKDNREKIEKILTFRIPYYVGPLARGNSRFAWMTRKSEETITPWNFEEVVDKGASAQSFIERMTNFDKNLPNEKVLPKHSLLYEYFTVYNELTKVKYVTEGMRKPAFLSGEQKKAIVDLLFKTNRKVTVKQLKEDYFKKIECFDSVEISGVEDRFNASLGTYHDLLKIIKDKDFLDNEENEDILEDIVLTLTLFEDREMIEERLKTYAHLFDDKVMKQLKRRRYTGWGRLSRKLINGIRDKQSGKTILDFLKSDGFANRNFMQLIHDDSLTFKEDIQKAQVSGQGDSLHEHIANLAGSPAIKKGILQTVKVVDELVKVMGRHKPENIVIEMARENQTTQKGQKNSRERMKRIEEGIKELGSQILKEHPVENTQLQNEKLYLYYLQNGRDMYVDQELDINRLSDYDVDHIVPQSFLKDDSIDNKVLTRSDKARGKSDNVPSEEVVKKMKNYWRQLLNAKLITQRKFDNLTKAERGGLSELDKAGFIKRQLVETRQITKHVAQILDSRMNTKYDENDKLIREVKVITLKSKLVSDFRKDFQFYKVREINNYHHAHDAYLNAVVGTALIKKYPKLESEFVYGDYKVYDVRKMIAKSEQEIGKATAKYFFYSNIMNFFKTEITLANGEIRKRPLIETNGETGEIVWDKGRDFATVRKVLSMPQVNIVKKTEVQTGGFSKESILPKRNSDKLIARKKDWDPKKYGGFDSPTVAYSVLVVAKVEKGKSKKLKSVKELLGITIMERSSFEKNPIDFLEAKGYKEVKKDLIIKLPKYSLFELENGRKRMLASAGELQKGNELALPSKYVNFLYLASHYEKLKGSPEDNEQKQLFVEQHKHYLDEIIEQISEFSKRVILADANLDKVLSAYNKHRDKPIREQAENIIHLFTLTNLGAPAAFKYFDTTIDRKRYTSTKEVLDATLIHQSITGLYETRIDLSQLGGDGGGGGGGSGGVQEISDSRPMLHIYLNGRRFLGLLDTGADKTCIAGRDWPANWPIHQTESSLQGLGMACGVARSSQPLRWQHEDKSGIIHPFVIPTLPFTLWGRDIMKDIKVRLMTDSPDDSQDLMIGAIESNLFADQISWKSDQPVWLNQWPLKQEKLQALQQLVTEQLQLGHLEESNSPWNTPVFVIKKKSGKWRLLQDLRAVNATMHDMGALQPGLPSPVAVPKGWEIIIIDLQDCFFNIKLHPEDCKRFAFSVPSPNFKRPYQRFQWKVLPQGMKNSPTLCQKFVDKAILTVRDKYQDSYIVHYMDDILLAHPSRSIVDEILTSMIQALNKHGLVVSTEKIQKYDNLKYLGTHIQGDSVSYQKLQIRTDKLRTLNDFQKLLGNINWIRPFLKLTTGELKPLFEILNGDSNPISTRKLTPEACKALQLMNERLSTARVKRLDLSQPWSLCILKTEYTPTACLWQDGVVEWIHLPHISPKVITPYDIFCTQLIIKGRHRSKELFSKDPDYIVVPYTKVQFDLLLQEKEDWPISLLGFLGEVHFHLPKDPLLTFTLQTAIIFPHMTSTTPLEKGIVIFTDGSANGRSVTYIQGREPIIKENTQNTAQQAEIVAVITAFEEVSQPFNLYTDSKYVTGLFPEIETATLSPRTKIYTELKHLQRLIHKRQEKFYIGHIRGHTGLPGPLAQGNAYADSLTRILTAAGKRTADGSEFEKRTADGSEFESPKKKAKVE

SEQ ID NO: 3167 - protein, 2113 aa, synthetic construct
MPAAKRVKLDGGDKKYSIGLDIGTNSVGWAVITDEYKVPSKKFKVLGNTDRHSIKKNLIGALLFDSGETAEATRLKRTARRRYTRRKNRICYLQEIFSNEMAKVDDSFFHRLEESFLVEEDKKHERHPIFGNIVDEVAYHEKYPTIYHLRKKLVDSTDKADLRLIYLALAHMIKFRGHFLIEGDLNPDNSDVDKLFIQLVQTYNQLFEENPINASGVDAKAILSARLSKSRRLENLIAQLPGEKKNGLFGNLIALSLGLTPNFKSNFDLAEDAKLQLSKDTYDDDLDNLLAQIGDQYADLFLAAKNLSDAILLSDILRVNTEITKAPLSASMIKRYDEHHQDLTLLKALVRQQLPEKYKEIFFDQSKNGYAGYIDGGASQEEFYKFIKPILEKMDGTEELLVKLNREDLLRKQRTFDNGSIPHQIHLGELHAILRRQEDFYPFLKDNREKIEKILTFRIPYYVGPLARGNSRFAWMTRKSEETITPWNFEEVVDKGASAQSFIERMTNFDKNLPNEKVLPKHSLLYEYFTVYNELTKVKYVTEGMRKPAFLSGEQKKAIVDLLFKTNRKVTVKQLKEDYFKKIECFDSVEISGVEDRFNASLGTYHDLLKIIKDKDFLDNEENEDILEDIVLTLTLFEDREMIEERLKTYAHLFDDKVMKQLKRRRYTGWGRLSRKLINGIRDKQSGKTILDFLKSDGFANRNFMQLIHDDSLTFKEDIQKAQVSGQGDSLHEHIANLAGSPAIKKGILQTVKVVDELVKVMGRHKPENIVIEMARENQTTQKGQKNSRERMKRIEEGIKELGSQILKEHPVENTQLQNEKLYLYYLQNGRDMYVDQELDINRLSDYDVDHIVPQSFLKDDSIDNKVLTRSDKARGKSDNVPSEEVVKKMKNYWRQLLNAKLITQRKFDNLTKAERGGLSELDKAGFIKRQLVETRQITKHVAQILDSRMNTKYDENDKLIREVKVITLKSKLVSDFRKDFQFYKVREINNYHHAHDAYLNAVVGTALIKKYPKLESEFVYGDYKVYDVRKMIAKSEQEIGKATAKYFFYSNIMNFFKTEITLANGEIRKRPLIETNGETGEIVWDKGRDFATVRKVLSMPQVNIVKKTEVQTGGFSKESILPKRNSDKLIARKKDWDPKKYGGFDSPTVAYSVLVVAKVEKGKSKKLKSVKELLGITIMERSSFEKNPIDFLEAKGYKEVKKDLIIKLPKYSLFELENGRKRMLASAGELQKGNELALPSKYVNFLYLASHYEKLKGSPEDNEQKQLFVEQHKHYLDEIIEQISEFSKRVILADANLDKVLSAYNKHRDKPIREQAENIIHLFTLTNLGAPAAFKYFDTTIDRKRYTSTKEVLDATLIHQSITGLYETRIDLSQLGGDGGGGGEAAAKGGVQEISDSRPMLHIYLNGRRFLGLLDTGADKTCIAGRDWPANWPIHQTESSLQGLGMACGVARSSQPLRWQHEDKSGIIHPFVIPTLPFTLWGRDIMKDIKVRLMTDSPDDSQDLMIGAIESNLFADQISWKSDQPVWLNQWPLKQEKLQALQQLVTEQLQLGHLEESNSPWNTPVFVIKKKSGKWRLLQDLRAVNATMHDMGALQPGLPSPVAVPKGWEIIIIDLQDCFFNIKLHPEDCKRFAFSVPSPNFKRPYQRFQWKVLPQGMKNSPTLCQKFVDKAILTVRDKYQDSYIVHYMDDILLAHPSRSIVDEILTSMIQALNKHGLVVSTEKIQKYDNLKYLGTHIQGDSVSYQKLQIRTDKLRTLNDFQKLLGNINWIRPFLKLTTGELKPLFEILNGDSNPISTRKLTPEACKALQLMNERLSTARVKRLDLSQPWSLCILKTEYTPTACLWQDGVVEWIHLPHISPKVITPYDIFCTQLIIKGRHRSKELFSKDPDYIVVPYTKVQFDLLLQEKEDWPISLLGFLGEVHFHLPKDPLLTFTLQTAIIFPHMTSTTPLEKGIVIFTDGSANGRSVTYIQGREPIIKENTQNTAQQAEIVAVITAFEEVSQPFNLYTDSKYVTGLFPEIETATLSPRTKIYTELKHLQRLIHKRQEKFYIGHIRGHTGLPGPLAQGNAYADSLTRILTAAGKRTADGSEFEKRTADGSEFESPKKKAKVE

SEQ ID NO: 3168 - protein, 2111 aa, synthetic construct
MPAAKRVKLDGGDKKYSIGLDIGTNSVGWAVITDEYKVPSKKFKVLGNTDRHSIKKNLIGALLFDSGETAEATRLKRTARRRYTRRKNRICYLQEIFSNEMAKVDDSFFHRLEESFLVEEDKKHERHPIFGNIVDEVAYHEKYPTIYHLRKKLVDSTDKADLRLIYLALAHMIKFRGHFLIEGDLNPDNSDVDKLFIQLVQTYNQLFEENPINASGVDAKAILSARLSKSRRLENLIAQLPGEKKNGLFGNLIALSLGLTPNFKSNFDLAEDAKLQLSKDTYDDDLDNLLAQIGDQYADLFLAAKNLSDAILLSDILRVNTEITKAPLSASMIKRYDEHHQDLTLLKALVRQQLPEKYKEIFFDQSKNGYAGYIDGGASQEEFYKFIKPILEKMDGTEELLVKLNREDLLRKQRTFDNGSIPHQIHLGELHAILRRQEDFYPFLKDNREKIEKILTFRIPYYVGPLARGNSRFAWMTRKSEETITPWNFEEVVDKGASAQSFIERMTNFDKNLPNEKVLPKHSLLYEYFTVYNELTKVKYVTEGMRKPAFLSGEQKKAIVDLLFKTNRKVTVKQLKEDYFKKIECFDSVEISGVEDRFNASLGTYHDLLKIIKDKDFLDNEENEDILEDIVLTLTLFEDREMIEERLKTYAHLFDDKVMKQLKRRRYTGWGRLSRKLINGIRDKQSGKTILDFLKSDGFANRNFMQLIHDDSLTFKEDIQKAQVSGQGDSLHEHIANLAGSPAIKKGILQTVKVVDELVKVMGRHKPENIVIEMARENQTTQKGQKNSRERMKRIEEGIKELGSQILKEHPVENTQLQNEKLYLYYLQNGRDMYVDQELDINRLSDYDVDHIVPQSFLKDDSIDNKVLTRSDKARGKSDNVPSEEVVKKMKNYWRQLLNAKLITQRKFDNLTKAERGGLSELDKAGFIKRQLVETRQITKHVAQILDSRMNTKYDENDKLIREVKVITLKSKLVSDFRKDFQFYKVREINNYHHAHDAYLNAVVGTALIKKYPKLESEFVYGDYKVYDVRKMIAKSEQEIGKATAKYFFYSNIMNFFKTEITLANGEIRKRPLIETNGETGEIVWDKGRDFATVRKVLSMPQVNIVKKTEVQTGGFSKESILPKRNSDKLIARKKDWDPKKYGGFDSPTVAYSVLVVAKVEKGKSKKLKSVKELLGITIMERSSFEKNPIDFLEAKGYKEVKKDLIIKLPKYSLFELENGRKRMLASAGELQKGNELALPSKYVNFLYLASHYEKLKGSPEDNEQKQLFVEQHKHYLDEIIEQISEFSKRVILADANLDKVLSAYNKHRDKPIREQAENIIHLFTLTNLGAPAAFKYFDTTIDRKRYTSTKEVLDATLIHQSITGLYETRIDLSQLGGDGGGGSGGSGGVQEISDSRPMLHIYLNGRRFLGLLDTGADKTCIAGRDWPANWPIHQTESSLQGLGMACGVARSSQPLRWQHEDKSGIIHPFVIPTLPFTLWGRDIMKDIKVRLMTDSPDDSQDLMIGAIESNLFADQISWKSDQPVWLNQWPLKQEKLQALQQLVTEQLQLGHLEESNSPWNTPVFVIKKKSGKWRLLQDLRAVNATMHDMGALQPGLPSPVAVPKGWEIIIIDLQDCFFNIKLHPEDCKRFAFSVPSPNFKRPYQRFQWKVLPQGMKNSPTLCQKFVDKAILTVRDKYQDSYIVHYMDDILLAHPSRSIVDEILTSMIQALNKHGLVVSTEKIQKYDNLKYLGTHIQGDSVSYQKLQIRTDKLRTLNDFQKLLGNINWIRPFLKLTTGELKPLFEILNGDSNPISTRKLTPEACKALQLMNERLSTARVKRLDLSQPWSLCILKTEYTPTACLWQDGVVEWIHLPHISPKVITPYDIFCTQLIIKGRHRSKELFSKDPDYIVVPYTKVQFDLLLQEKEDWPISLLGFLGEVHFHLPKDPLLTFTLQTAIIFPHMTSTTPLEKGIVIFTDGSANGRSVTYIQGREPIIKENTQNTAQQAEIVAVITAFEEVSQPFNLYTDSKYVTGLFPEIETATLSPRTKIYTELKHLQRLIHKRQEKFYIGHIRGHTGLPGPLAQGNAYADSLTRILTAAGKRTADGSEFEKRTADGSEFESPKKKAKVE

SEQ ID NO: 3169 - protein, 2116 aa, synthetic construct
MPAAKRVKLDGGDKKYSIGLDIGTNSVGWAVITDEYKVPSKKFKVLGNTDRHSIKKNLIGALLFDSGETAEATRLKRTARRRYTRRKNRICYLQEIFSNEMAKVDDSFFHRLEESFLVEEDKKHERHPIFGNIVDEVAYHEKYPTIYHLRKKLVDSTDKADLRLIYLALAHMIKFRGHFLIEGDLNPDNSDVDKLFIQLVQTYNQLFEENPINASGVDAKAILSARLSKSRRLENLIAQLPGEKKNGLFGNLIALSLGLTPNFKSNFDLAEDAKLQLSKDTYDDDLDNLLAQIGDQYADLFLAAKNLSDAILLSDILRVNTEITKAPLSASMIKRYDEHHQDLTLLKALVRQQLPEKYKEIFFDQSKNGYAGYIDGGASQEEFYKFIKPILEKMDGTEELLVKLNREDLLRKQRTFDNGSIPHQIHLGELHAILRRQEDFYPFLKDNREKIEKILTFRIPYYVGPLARGNSRFAWMTRKSEETITPWNFEEVVDKGASAQSFIERMTNFDKNLPNEKVLPKHSLLYEYFTVYNELTKVKYVTEGMRKPAFLSGEQKKAIVDLLFKTNRKVTVKQLKEDYFKKIECFDSVEISGVEDRFNASLGTYHDLLKIIKDKDFLDNEENEDILEDIVLTLTLFEDREMIEERLKTYAHLFDDKVMKQLKRRRYTGWGRLSRKLINGIRDKQSGKTILDFLKSDGFANRNFMQLIHDDSLTFKEDIQKAQVSGQGDSLHEHIANLAGSPAIKKGILQTVKVVDELVKVMGRHKPENIVIEMARENQTTQKGQKNSRERMKRIEEGIKELGSQILKEHPVENTQLQNEKLYLYYLQNGRDMYVDQELDINRLSDYDVDHIVPQSFLKDDSIDNKVLTRSDKARGKSDNVPSEEVVKKMKNYWRQLLNAKLITQRKFDNLTKAERGGLSELDKAGFIKRQLVETRQITKHVAQILDSRMNTKYDENDKLIREVKVITLKSKLVSDFRKDFQFYKVREINNYHHAHDAYLNAVVGTALIKKYPKLESEFVYGDYKVYDVRKMIAKSEQEIGKATAKYFFYSNIMNFFKTEITLANGEIRKRPLIETNGETGEIVWDKGRDFATVRKVLSMPQVNIVKKTEVQTGGFSKESILPKRNSDKLIARKKDWDPKKYGGFDSPTVAYSVLVVAKVEKGKSKKLKSVKELLGITIMERSSFEKNPIDFLEAKGYKEVKKDLIIKLPKYSLFELENGRKRMLASAGELQKGNELALPSKYVNFLYLASHYEKLKGSPEDNEQKQLFVEQHKHYLDEIIEQISEFSKRVILADANLDKVLSAYNKHRDKPIREQAENIIHLFTLTNLGAPAAFKYFDTTIDRKRYTSTKEVLDATLIHQSITGLYETRIDLSQLGGDGGPAPAPAPAPAPGGVQEISDSRPMLHIYLNGRRFLGLLDTGADKTCIAGRDWPANWPIHQTESSLQGLGMACGVARSSQPLRWQHEDKSGIIHPFVIPTLPFTLWGRDIMKDIKVRLMTDSPDDSQDLMIGAIESNLFADQISWKSDQPVWLNQWPLKQEKLQALQQLVTEQLQLGHLEESNSPWNTPVFVIKKKSGKWRLLQDLRAVNATMHDMGALQPGLPSPVAVPKGWEIIIIDLQDCFFNIKLHPEDCKRFAFSVPSPNFKRPYQRFQWKVLPQGMKNSPTLCQKFVDKAILTVRDKYQDSYIVHYMDDILLAHPSRSIVDEILTSMIQALNKHGLVVSTEKIQKYDNLKYLGTHIQGDSVSYQKLQIRTDKLRTLNDFQKLLGNINWIRPFLKLTTGELKPLFEILNGDSNPISTRKLTPEACKALQLMNERLSTARVKRLDLSQPWSLCILKTEYTPTACLWQDGVVEWIHLPHISPKVITPYDIFCTQLIIKGRHRSKELFSKDPDYIVVPYTKVQFDLLLQEKEDWPISLLGFLGEVHFHLPKDPLLTFTLQTAIIFPHMTSTTPLEKGIVIFTDGSANGRSVTYIQGREPIIKENTQNTAQQAEIVAVITAFEEVSQPFNLYTDSKYVTGLFPEIETATLSPRTKIYTELKHLQRLIHKRQEKFYIGHIRGHTGLPGPLAQGNAYADSLTRILTAAGKRTADGSEFEKRTADGSEFESPKKKAKVE

SEQ ID NO: 3170 - protein, 2116 aa, synthetic construct
MPAAKRVKLDGGDKKYSIGLDIGTNSVGWAVITDEYKVPSKKFKVLGNTDRHSIKKNLIGALLFDSGETAEATRLKRTARRRYTRRKNRICYLQEIFSNEMAKVDDSFFHRLEESFLVEEDKKHERHPIFGNIVDEVAYHEKYPTIYHLRKKLVDSTDKADLRLIYLALAHMIKFRGHFLIEGDLNPDNSDVDKLFIQLVQTYNQLFEENPINASGVDAKAILSARLSKSRRLENLIAQLPGEKKNGLFGNLIALSLGLTPNFKSNFDLAEDAKLQLSKDTYDDDLDNLLAQIGDQYADLFLAAKNLSDAILLSDILRVNTEITKAPLSASMIKRYDEHHQDLTLLKALVRQQLPEKYKEIFFDQSKNGYAGYIDGGASQEEFYKFIKPILEKMDGTEELLVKLNREDLLRKQRTFDNGSIPHQIHLGELHAILRRQEDFYPFLKDNREKIEKILTFRIPYYVGPLARGNSRFAWMTRKSEETITPWNFEEVVDKGASAQSFIERMTNFDKNLPNEKVLPKHSLLYEYFTVYNELTKVKYVTEGMRKPAFLSGEQKKAIVDLLFKTNRKVTVKQLKEDYFKKIECFDSVEISGVEDRFNASLGTYHDLLKIIKDKDFLDNEENEDILEDIVLTLTLFEDREMIEERLKTYAHLFDDKVMKQLKRRRYTGWGRLSRKLINGIRDKQSGKTILDFLKSDGFANRNFMQLIHDDSLTFKEDIQKAQVSGQGDSLHEHIANLAGSPAIKKGILQTVKVVDELVKVMGRHKPENIVIEMARENQTTQKGQKNSRERMKRIEEGIKELGSQILKEHPVENTQLQNEKLYLYYLQNGRDMYVDQELDINRLSDYDVDHIVPQSFLKDDSIDNKVLTRSDKARGKSDNVPSEEVVKKMKNYWRQLLNAKLITQRKFDNLTKAERGGLSELDKAGFIKRQLVETRQITKHVAQILDSRMNTKYDENDKLIREVKVITLKSKLVSDFRKDFQFYKVREINNYHHAHDAYLNAVVGTALIKKYPKLESEFVYGDYKVYDVRKMIAKSEQEIGKATAKYFFYSNIMNFFKTEITLANGEIRKRPLIETNGETGEIVWDKGRDFATVRKVLSMPQVNIVKKTEVQTGGFSKESILPKRNSDKLIARKKDWDPKKYGGFDSPTVAYSVLVVAKVEKGKSKKLKSVKELLGITIMERSSFEKNPIDFLEAKGYKEVKKDLIIKLPKYSLFELENGRKRMLASAGELQKGNELALPSKYVNFLYLASHYEKLKGSPEDNEQKQLFVEQHKHYLDEIIEQISEFSKRVILADANLDKVLSAYNKHRDKPIREQAENIIHLFTLTNLGAPAAFKYFDTTIDRKRYTSTKEVLDATLIHQSITGLYETRIDLSQLGGDGGGGSEAAAKPAPGGVQEISDSRPMLHIYLNGRRFLGLLDTGADKTCIAGRDWPANWPIHQTESSLQGLGMACGVARSSQPLRWQHEDKSGIIHPFVIPTLPFTLWGRDIMKDIKVRLMTDSPDDSQDLMIGAIESNLFADQISWKSDQPVWLNQWPLKQEKLQALQQLVTEQLQLGHLEESNSPWNTPVFVIKKKSGKWRLLQDLRAVNATMHDMGALQPGLPSPVAVPKGWEIIIIDLQDCFFNIKLHPEDCKRFAFSVPSPNFKRPYQRFQWKVLPQGMKNSPTLCQKFVDKAILTVRDKYQDSYIVHYMDDILLAHPSRSIVDEILTSMIQALNKHGLVVSTEKIQKYDNLKYLGTHIQGDSVSYQKLQIRTDKLRTLNDFQKLLGNINWIRPFLKLTTGELKPLFEILNGDSNPISTRKLTPEACKALQLMNERLSTARVKRLDLSQPWSLCILKTEYTPTACLWQDGVVEWIHLPHISPKVITPYDIFCTQLIIKGRHRSKELFSKDPDYIVVPYTKVQFDLLLQEKEDWPISLLGFLGEVHFHLPKDPLLTFTLQTAIIFPHMTSTTPLEKGIVIFTDGSANGRSVTYIQGREPIIKENTQNTAQQAEIVAVITAFEEVSQPFNLYTDSKYVTGLFPEIETATLSPRTKIYTELKHLQRLIHKRQEKFYIGHIRGHTGLPGPLAQGNAYADSLTRILTAAGKRTADGSEFEKRTADGSEFESPKKKAKVE

SEQ ID NO: 3171 - protein, 2116 aa, synthetic construct
MPAAKRVKLDGGDKKYSIGLDIGTNSVGWAVITDEYKVPSKKFKVLGNTDRHSIKKNLIGALLFDSGETAEATRLKRTARRRYTRRKNRICYLQEIFSNEMAKVDDSFFHRLEESFLVEEDKKHERHPIFGNIVDEVAYHEKYPTIYHLRKKLVDSTDKADLRLIYLALAHMIKFRGHFLIEGDLNPDNSDVDKLFIQLVQTYNQLFEENPINASGVDAKAILSARLSKSRRLENLIAQLPGEKKNGLFGNLIALSLGLTPNFKSNFDLAEDAKLQLSKDTYDDDLDNLLAQIGDQYADLFLAAKNLSDAILLSDILRVNTEITKAPLSASMIKRYDEHHQDLTLLKALVRQQLPEKYKEIFFDQSKNGYAGYIDGGASQEEFYKFIKPILEKMDGTEELLVKLNREDLLRKQRTFDNGSIPHQIHLGELHAILRRQEDFYPFLKDNREKIEKILTFRIPYYVGPLARGNSRFAWMTRKSEETITPWNFEEVVDKGASAQSFIERMTNFDKNLPNEKVLPKHSLLYEYFTVYNELTKVKYVTEGMRKPAFLSGEQKKAIVDLLFKTNRKVTVKQLKEDYFKKIECFDSVEISGVEDRFNASLGTYHDLLKIIKDKDFLDNEENEDILEDIVLTLTLFEDREMIEERLKTYAHLFDDKVMKQLKRRRYTGWGRLSRKLINGIRDKQSGKTILDFLKSDGFANRNFMQLIHDDSLTFKEDIQKAQVSGQGDSLHEHIANLAGSPAIKKGILQTVKVVDELVKVMGRHKPENIVIEMARENQTTQKGQKNSRERMKRIEEGIKELGSQILKEHPVENTQLQNEKLYLYYLQNGRDMYVDQELDINRLSDYDVDHIVPQSFLKDDSIDNKVLTRSDKARGKSDNVPSEEVVKKMKNYWRQLLNAKLITQRKFDNLTKAERGGLSELDKAGFIKRQLVETRQITKHVAQILDSRMNTKYDENDKLIREVKVITLKSKLVSDFRKDFQFYKVREINNYHHAHDAYLNAVVGTALIKKYPKLESEFVYGDYKVYDVRKMIAKSEQEIGKATAKYFFYSNIMNFFKTEITLANGEIRKRPLIETNGETGEIVWDKGRDFATVRKVLSMPQVNIVKKTEVQTGGFSKESILPKRNSDKLIARKKDWDPKKYGGFDSPTVAYSVLVVAKVEKGKSKKLKSVKELLGITIMERSSFEKNPIDFLEAKGYKEVKKDLIIKLPKYSLFELENGRKRMLASAGELQKGNELALPSKYVNFLYLASHYEKLKGSPEDNEQKQLFVEQHKHYLDEIIEQISEFSKRVILADANLDKVLSAYNKHRDKPIREQAENIIHLFTLTNLGAPAAFKYFDTTIDRKRYTSTKEVLDATLIHQSITGLYETRIDLSQLGGDGGEAAAKGSSGGSGGWVQEISDSRPMLHIYLNGRRFLGLLNTGADKTCIAGRDWPANWPIHQTESSLQGLGMACGVARSSQPLRWQHEDKSGIIHPFVIPTLPFTLWGRDIMKDIKVRLMTDSPDDSQDLMIGAIESNLFADQISWKSDQPVWLNQWPLKQEKLQALQQLVTEQLQLGHLEESNSPWNTPVFVIKKKSGKWRLLQDLRAVNATMHDMGALQPGLPSPVAVPKGWEIIIIDLQDCFFNIKLHPEDCKRFAFSVPSPNFKRPYQRFQWKVLPQGMKNSPTLCQKFVDKAILTVRDKYQDSYIVHYMDDILLAHPSRSIVDEILTSMIQALNKHGLVVSTEKIQKYDNLKYLGTHIQGDSVSYQKLQIRTDKLRTLNDFQKLLGNINWIRPFLKLTTGELKPLFEILNGDSNPISTRKLTPEACKALQLMNERLSTARVKRLDLSQPWSLCILKTEYTPTACLWQDGVVEWIHLPHISPKVITPYDIFCTQLIIKGRHRSKELFSKDPDYIVVPYTKVQFDLLLQEKEDWPISLLGFLGEVHFHLPKDPLLTFTLQTAIIFPHMTSTTPLEKGIVIFTDGSANGRSVTYIQGREPIIKENTQNTAQQAEIVAVITAFEEVSQPFNLYTDSKYVTGLFPEIETATLSPRTKIYTELKHLQRLIHKRQEKFYIGHIRGHTGLPGPLAQGNAYADSLTRILTAGKRTADGSEFEKRTADGSEFESPKKKAKVE

SEQ ID NO: 3172 - protein, 2135 aa, synthetic construct
MPAAKRVKLDGGDKKYSIGLDIGTNSVGWAVITDEYKVPSKKFKVLGNTDRHSIKKNLIGALLFDSGETAEATRLKRTARRRYTRRKNRICYLQEIFSNEMAKVDDSFFHRLEESFLVEEDKKHERHPIFGNIVDEVAYHEKYPTIYHLRKKLVDSTDKADLRLIYLALAHMIKFRGHFLIEGDLNPDNSDVDKLFIQLVQTYNQLFEENPINASGVDAKAILSARLSKSRRLENLIAQLPGEKKNGLFGNLIALSLGLTPNFKSNFDLAEDAKLQLSKDTYDDDLDNLLAQIGDQYADLFLAAKNLSDAILLSDILRVNTEITKAPLSASMIKRYDEHHQDLTLLKALVRQQLPEKYKEIFFDQSKNGYAGYIDGGASQEEFYKFIKPILEKMDGTEELLVKLNREDLLRKQRTFDNGSIPHQIHLGELHAILRRQEDFYPFLKDNREKIEKILTFRIPYYVGPLARGNSRFAWMTRKSEETITPWNFEEVVDKGASAQSFIERMTNFDKNLPNEKVLPKHSLLYEYFTVYNELTKVKYVTEGMRKPAFLSGEQKKAIVDLLFKTNRKVTVKQLKEDYFKKIECFDSVEISGVEDRFNASLGTYHDLLKIIKDKDFLDNEENEDILEDIVLTLTLFEDREMIEERLKTYAHLFDDKVMKQLKRRRYTGWGRLSRKLINGIRDKQSGKTILDFLKSDGFANRNFMQLIHDDSLTFKEDIQKAQVSGQGDSLHEHIANLAGSPAIKKGILQTVKVVDELVKVMGRHKPENIVIEMARENQTTQKGQKNSRERMKRIEEGIKELGSQILKEHPVENTQLQNEKLYLYYLQNGRDMYVDQELDINRLSDYDVDHIVPQSFLKDDSIDNKVLTRSDKARGKSDNVPSEEVVKKMKNYWRQLLNAKLITQRKFDNLTKAERGGLSELDKAGFIKRQLVETRQITKHVAQILDSRMNTKYDENDKLIREVKVITLKSKLVSDFRKDFQFYKVREINNYHHAHDAYLNAVVGTALIKKYPKLESEFVYGDYKVYDVRKMIAKSEQEIGKATAKYFFYSNIMNFFKTEITLANGEIRKRPLIETNGETGEIVWDKGRDFATVRKVLSMPQVNIVKKTEVQTGGFSKESILPKRNSDKLIARKKDWDPKKYGGFDSPTVAYSVLVVAKVEKGKSKKLKSVKELLGITIMERSSFEKNPIDFLEAKGYKEVKKDLIIKLPKYSLFELENGRKRMLASAGELQKGNELALPSKYVNFLYLASHYEKLKGSPEDNEQKQLFVEQHKHYLDEIIEQISEFSKRVILADANLDKVLSAYNKHRDKPIREQAENIIHLFTLTNLGAPAAFKYFDTTIDRKRYTSTKEVLDATLIHQSITGLYETRIDLSQLGGDGGEAAAKEAAAKEAAAKEAAAKEAAAKEAAAKGGWVQEISDSRPMLHIYLNGRRFLGLLNTGADKTCIAGRDWPANWPIHQTESSLQGLGMACGVARSSQPLRWQHEDKSGIIHPFVIPTLPFTLWGRDIMKDIKVRLMTDSPDDSQDLMIGAIESNLFADQISWKSDQPVWLNQWPLKQEKLQALQQLVTEQLQLGHLEESNSPWNTPVFVIKKKSGKWRLLQDLRAVNATMHDMGALQPGLPSPVAVPKGWEIIIIDLQDCFFNIKLHPEDCKRFAFSVPSPNFKRPYQRFQWKVLPQGMKNSPTLCQKFVDKAILTVRDKYQDSYIVHYMDDILLAHPSRSIVDEILTSMIQALNKHGLVVSTEKIQKYDNLKYLGTHIQGDSVSYQKLQIRTDKLRTLNDFQKLLGNINWIRPFLKLTTGELKPLFEILNGDSNPISTRKLTPEACKALQLMNERLSTARVKRLDLSQPWSLCILKTEYTPTACLWQDGVVEWIHLPHISPKVITPYDIFCTQLIIKGRHRSKELFSKDPDYIVVPYTKVQFDLLLQEKEDWPISLLGFLGEVHFHLPKDPLLTFTLQTAIIFPHMTSTTPLEKGIVIFTDGSANGRSVTYIQGREPIIKENTQNTAQQAEIVAVITAFEEVSQPFNLYTDSKYVTGLFPEIETATLSPRTKIYTELKHLQRLIHKRQEKFYIGHIRGHTGLPGPLAQGNAYADSLTRILTAGKRTADGSEFEKRTADGSEFESPKKKAKVE

SEQ ID NO: 3173 - protein, 2135 aa, synthetic construct
MPAAKRVKLDGGDKKYSIGLDIGTNSVGWAVITDEYKVPSKKFKVLGNTDRHSIKKNLIGALLFDSGETAEATRLKRTARRRYTRRKNRICYLQEIFSNEMAKVDDSFFHRLEESFLVEEDKKHERHPIFGNIVDEVAYHEKYPTIYHLRKKLVDSTDKADLRLIYLALAHMIKFRGHFLIEGDLNPDNSDVDKLFIQLVQTYNQLFEENPINASGVDAKAILSARLSKSRRLENLIAQLPGEKKNGLFGNLIALSLGLTPNFKSNFDLAEDAKLQLSKDTYDDDLDNLLAQIGDQYADLFLAAKNLSDAILLSDILRVNTEITKAPLSASMIKRYDEHHQDLTLLKALVRQQLPEKYKEIFFDQSKNGYAGYIDGGASQEEFYKFIKPILEKMDGTEELLVKLNREDLLRKQRTFDNGSIPHQIHLGELHAILRRQEDFYPFLKDNREKIEKILTFRIPYYVGPLARGNSRFAWMTRKSEETITPWNFEEVVDKGASAQSFIERMTNFDKNLPNEKVLPKHSLLYEYFTVYNELTKVKYVTEGMRKPAFLSGEQKKAIVDLLFKTNRKVTVKQLKEDYFKKIECFDSVEISGVEDRFNASLGTYHDLLKIIKDKDFLDNEENEDILEDIVLTLTLFEDREMIEERLKTYAHLFDDKVMKQLKRRRYTGWGRLSRKLINGIRDKQSGKTILDFLKSDGFANRNFMQLIHDDSLTFKEDIQKAQVSGQGDSLHEHIANLAGSPAIKKGILQTVKVVDELVKVMGRHKPENIVIEMARENQTTQKGQKNSRERMKRIEEGIKELGSQILKEHPVENTQLQNEKLYLYYLQNGRDMYVDQELDINRLSDYDVDHIVPQSFLKDDSIDNKVLTRSDKARGKSDNVPSEEVVKKMKNYWRQLLNAKLITQRKFDNLTKAERGGLSELDKAGFIKRQLVETRQITKHVAQILDSRMNTKYDENDKLIREVKVITLKSKLVSDFRKDFQFYKVREINNYHHAHDAYLNAVVGTALIKKYPKLESEFVYGDYKVYDVRKMIAKSEQEIGKATAKYFFYSNIMNFFKTEITLANGEIRKRPLIETNGETGEIVWDKGRDFATVRKVLSMPQVNIVKKTEVQTGGFSKESILPKRNSDKLIARKKDWDPKKYGGFDSPTVAYSVLVVAKVEKGKSKKLKSVKELLGITIMERSSFEKNPIDFLEAKGYKEVKKDLIIKLPKYSLFELENGRKRMLASAGELQKGNELALPSKYVNFLYLASHYEKLKGSPEDNEQKQLFVEQHKHYLDEIIEQISEFSKRVILADANLDKVLSAYNKHRDKPIREQAENIIHLFTLTNLGAPAAFKYFDTTIDRKRYTSTKEVLDATLIHQSITGLYETRIDLSQLGGDGGGGGGSGGGGSGGGGSGGGGSGGGGSGGGGSGGWVQEISDSRPMLHIYLNGRRFLGLLNTGADKTCIAGRDWPANWPIHQTESSLQGLGMACGVARSSQPLRWQHEDKSGIIHPFVIPTLPFTLWGRDIMKDIKVRLMTDSPDDSQDLMIGAIESNLFADQISWKSDQPVWLNQWPLKQEKLQALQQLVTEQLQLGHLEESNSPWNTPVFVIKKKSGKWRLLQDLRAVNATMHDMGALQPGLPSPVAVPKGWEIIIIDLQDCFFNIKLHPEDCKRFAFSVPSPNFKRPYQRFQWKVLPQGMKNSPTLCQKFVDKAILTVRDKYQDSYIVHYMDDILLAHPSRSIVDEILTSMIQALNKHGLVVSTEKIQKYDNLKYLGTHIQGDSVSYQKLQIRTDKLRTLNDFQKLLGNINWIRPFLKLTTGELKPLFEILNGDSNPISTRKLTPEACKALQLMNERLSTARVKRLDLSQPWSLCILKTEYTPTACLWQDGVVEWIHLPHISPKVITPYDIFCTQLIIKGRHRSKELFSKDPDYIVVPYTKVQFDLLLQEKEDWPISLLGFLGEVHFHLPKDPLLTFTLQTAIIFPHMTSTTPLEKGIVIFTDGSANGRSVTYIQGREPIIKENTQNTAQQAEIVAVITAFEEVSQPFNLYTDSKYVTGLFPEIETATLSPRTKIYTELKHLQRLIHKRQEKFYIGHIRGHTGLPGPLAQGNAYADSLTRILTAGKRTADGSEFEKRTADGSEFESPKKKAKVE

SEQ ID NO: 3174 - protein, 2130 aa, synthetic construct
MPAAKRVKLDGGDKKYSIGLDIGTNSVGWAVITDEYKVPSKKFKVLGNTDRHSIKKNLIGALLFDSGETAEATRLKRTARRRYTRRKNRICYLQEIFSNEMAKVDDSFFHRLEESFLVEEDKKHERHPIFGNIVDEVAYHEKYPTIYHLRKKLVDSTDKADLRLIYLALAHMIKFRGHFLIEGDLNPDNSDVDKLFIQLVQTYNQLFEENPINASGVDAKAILSARLSKSRRLENLIAQLPGEKKNGLFGNLIALSLGLTPNFKSNFDLAEDAKLQLSKDTYDDDLDNLLAQIGDQYADLFLAAKNLSDAILLSDILRVNTEITKAPLSASMIKRYDEHHQDLTLLKALVRQQLPEKYKEIFFDQSKNGYAGYIDGGASQEEFYKFIKPILEKMDGTEELLVKLNREDLLRKQRTFDNGSIPHQIHLGELHAILRRQEDFYPFLKDNREKIEKILTFRIPYYVGPLARGNSRFAWMTRKSEETITPWNFEEVVDKGASAQSFIERMTNFDKNLPNEKVLPKHSLLYEYFTVYNELTKVKYVTEGMRKPAFLSGEQKKAIVDLLFKTNRKVTVKQLKEDYFKKIECFDSVEISGVEDRFNASLGTYHDLLKIIKDKDFLDNEENEDILEDIVLTLTLFEDREMIEERLKTYAHLFDDKVMKQLKRRRYTGWGRLSRKLINGIRDKQSGKTILDFLKSDGFANRNFMQLIHDDSLTFKEDIQKAQVSGQGDSLHEHIANLAGSPAIKKGILQTVKVVDELVKVMGRHKPENIVIEMARENQTTQKGQKNSRERMKRIEEGIKELGSQILKEHPVENTQLQNEKLYLYYLQNGRDMYVDQELDINRLSDYDVDHIVPQSFLKDDSIDNKVLTRSDKARGKSDNVPSEEVVKKMKNYWRQLLNAKLITQRKFDNLTKAERGGLSELDKAGFIKRQLVETRQITKHVAQILDSRMNTKYDENDKLIREVKVITLKSKLVSDFRKDFQFYKVREINNYHHAHDAYLNAVVGTALIKKYPKLESEFVYGDYKVYDVRKMIAKSEQEIGKATAKYFFYSNIMNFFKTEITLANGEIRKRPLIETNGETGEIVWDKGRDFATVRKVLSMPQVNIVKKTEVQTGGFSKESILPKRNSDKLIARKKDWDPKKYGGFDSPTVAYSVLVVAKVEKGKSKKLKSVKELLGITIMERSSFEKNPIDFLEAKGYKEVKKDLIIKLPKYSLFELENGRKRMLASAGELQKGNELALPSKYVNFLYLASHYEKLKGSPEDNEQKQLFVEQHKHYLDEIIEQISEFSKRVILADANLDKVLSAYNKHRDKPIREQAENIIHLFTLTNLGAPAAFKYFDTTIDRKRYTSTKEVLDATLIHQSITGLYETRIDLSQLGGDGGEAAAKEAAAKEAAAKEAAAKEAAAKGGWVQEISDSRPMLHIYLNGRRFLGLLNTGADKTCIAGRDWPANWPIHQTESSLQGLGMACGVARSSQPLRWQHEDKSGIIHPFVIPTLPFTLWGRDIMKDIKVRLMTDSPDDSQDLMIGAIESNLFADQISWKSDQPVWLNQWPLKQEKLQALQQLVTEQLQLGHLEESNSPWNTPVFVIKKKSGKWRLLQDLRAVNATMHDMGALQPGLPSPVAVPKGWEIIIIDLQDCFFNIKLHPEDCKRFAFSVPSPNFKRPYQRFQWKVLPQGMKNSPTLCQKFVDKAILTVRDKYQDSYIVHYMDDILLAHPSRSIVDEILTSMIQALNKHGLVVSTEKIQKYDNLKYLGTHIQGDSVSYQKLQIRTDKLRTLNDFQKLLGNINWIRPFLKLTTGELKPLFEILNGDSNPISTRKLTPEACKALQLMNERLSTARVKRLDLSQPWSLCILKTEYTPTACLWQDGVVEWIHLPHISPKVITPYDIFCTQLIIKGRHRSKELFSKDPDYIVVPYTKVQFDLLLQEKEDWPISLLGFLGEVHFHLPKDPLLTFTLQTAIIFPHMTSTTPLEKGIVIFTDGSANGRSVTYIQGREPIIKENTQNTAQQAEIVAVITAFEEVSQPFNLYTDSKYVTGLFPEIETATLSPRTKIYTELKHLQRLIHKRQEKFYIGHIRGHTGLPGPLAQGNAYADSLTRILTAGKRTADGSEFEKRTADGSEFESPKKKAKVE

SEQ ID NO: 3175 - protein, 2116 aa, synthetic construct
MPAAKRVKLDGGDKKYSIGLDIGTNSVGWAVITDEYKVPSKKFKVLGNTDRHSIKKNLIGALLFDSGETAEATRLKRTARRRYTRRKNRICYLQEIFSNEMAKVDDSFFHRLEESFLVEEDKKHERHPIFGNIVDEVAYHEKYPTIYHLRKKLVDSTDKADLRLIYLALAHMIKFRGHFLIEGDLNPDNSDVDKLFIQLVQTYNQLFEENPINASGVDAKAILSARLSKSRRLENLIAQLPGEKKNGLFGNLIALSLGLTPNFKSNFDLAEDAKLQLSKDTYDDDLDNLLAQIGDQYADLFLAAKNLSDAILLSDILRVNTEITKAPLSASMIKRYDEHHQDLTLLKALVRQQLPEKYKEIFFDQSKNGYAGYIDGGASQEEFYKFIKPILEKMDGTEELLVKLNREDLLRKQRTFDNGSIPHQIHLGELHAILRRQEDFYPFLKDNREKIEKILTFRIPYYVGPLARGNSRFAWMTRKSEETITPWNFEEVVDKGASAQSFIERMTNFDKNLPNEKVLPKHSLLYEYFTVYNELTKVKYVTEGMRKPAFLSGEQKKAIVDLLFKTNRKVTVKQLKEDYFKKIECFDSVEISGVEDRFNASLGTYHDLLKIIKDKDFLDNEENEDILEDIVLTLTLFEDREMIEERLKTYAHLFDDKVMKQLKRRRYTGWGRLSRKLINGIRDKQSGKTILDFLKSDGFANRNFMQLIHDDSLTFKEDIQKAQVSGQGDSLHEHIANLAGSPAIKKGILQTVKVVDELVKVMGRHKPENIVIEMARENQTTQKGQKNSRERMKRIEEGIKELGSQILKEHPVENTQLQNEKLYLYYLQNGRDMYVDQELDINRLSDYDVDHIVPQSFLKDDSIDNKVLTRSDKARGKSDNVPSEEVVKKMKNYWRQLLNAKLITQRKFDNLTKAERGGLSELDKAGFIKRQLVETRQITKHVAQILDSRMNTKYDENDKLIREVKVITLKSKLVSDFRKDFQFYKVREINNYHHAHDAYLNAVVGTALIKKYPKLESEFVYGDYKVYDVRKMIAKSEQEIGKATAKYFFYSNIMNFFKTEITLANGEIRKRPLIETNGETGEIVWDKGRDFATVRKVLSMPQVNIVKKTEVQTGGFSKESILPKRNSDKLIARKKDWDPKKYGGFDSPTVAYSVLVVAKVEKGKSKKLKSVKELLGITIMERSSFEKNPIDFLEAKGYKEVKKDLIIKLPKYSLFELENGRKRMLASAGELQKGNELALPSKYVNFLYLASHYEKLKGSPEDNEQKQLFVEQHKHYLDEIIEQISEFSKRVILADANLDKVLSAYNKHRDKPIREQAENIIHLFTLTNLGAPAAFKYFDTTIDRKRYTSTKEVLDATLIHQSITGLYETRIDLSQLGGDGGPAPAPAPAPAPGGWVQEISDSRPMLHIYLNGRRFLGLLNTGADKTCIAGRDWPANWPIHQTESSLQGLGMACGVARSSQPLRWQHEDKSGIIHPFVIPTLPFTLWGRDIMKDIKVRLMTDSPDDSQDLMIGAIESNLFADQISWKSDQPVWLNQWPLKQEKLQALQQLVTEQLQLGHLEESNSPWNTPVFVIKKKSGKWRLLQDLRAVNATMHDMGALQPGLPSPVAVPKGWEIIIIDLQDCFFNIKLHPEDCKRFAFSVPSPNFKRPYQRFQWKVLPQGMKNSPTLCQKFVDKAILTVRDKYQDSYIVHYMDDILLAHPSRSIVDEILTSMIQALNKHGLVVSTEKIQKYDNLKYLGTHIQGDSVSYQKLQIRTDKLRTLNDFQKLLGNINWIRPFLKLTTGELKPLFEILNGDSNPISTRKLTPEACKALQLMNERLSTARVKRLDLSQPWSLCILKTEYTPTACLWQDGVVEWIHLPHISPKVITPYDIFCTQLIIKGRHRSKELFSKDPDYIVVPYTKVQFDLLLQEKEDWPISLLGFLGEVHFHLPKDPLLTFTLQTAIIFPHMTSTTPLEKGIVIFTDGSANGRSVTYIQGREPIIKENTQNTAQQAEIVAVITAFEEVSQPFNLYTDSKYVTGLFPEIETATLSPRTKIYTELKHLQRLIHKRQEKFYIGHIRGHTGLPGPLAQGNAYADSLTRILTAGKRTADGSEFEKRTADGSEFESPKKKAKVE

SEQ ID NO: 3176 - protein, 2114 aa, synthetic construct
MPAAKRVKLDGGDKKYSIGLDIGTNSVGWAVITDEYKVPSKKFKVLGNTDRHSIKKNLIGALLFDSGETAEATRLKRTARRRYTRRKNRICYLQEIFSNEMAKVDDSFFHRLEESFLVEEDKKHERHPIFGNIVDEVAYHEKYPTIYHLRKKLVDSTDKADLRLIYLALAHMIKFRGHFLIEGDLNPDNSDVDKLFIQLVQTYNQLFEENPINASGVDAKAILSARLSKSRRLENLIAQLPGEKKNGLFGNLIALSLGLTPNFKSNFDLAEDAKLQLSKDTYDDDLDNLLAQIGDQYADLFLAAKNLSDAILLSDILRVNTEITKAPLSASMIKRYDEHHQDLTLLKALVRQQLPEKYKEIFFDQSKNGYAGYIDGGASQEEFYKFIKPILEKMDGTEELLVKLNREDLLRKQRTFDNGSIPHQIHLGELHAILRRQEDFYPFLKDNREKIEKILTFRIPYYVGPLARGNSRFAWMTRKSEETITPWNFEEVVDKGASAQSFIERMTNFDKNLPNEKVLPKHSLLYEYFTVYNELTKVKYVTEGMRKPAFLSGEQKKAIVDLLFKTNRKVTVKQLKEDYFKKIECFDSVEISGVEDRFNASLGTYHDLLKIIKDKDFLDNEENEDILEDIVLTLTLFEDREMIEERLKTYAHLFDDKVMKQLKRRRYTGWGRLSRKLINGIRDKQSGKTILDFLKSDGFANRNFMQLIHDDSLTFKEDIQKAQVSGQGDSLHEHIANLAGSPAIKKGILQTVKVVDELVKVMGRHKPENIVIEMARENQTTQKGQKNSRERMKRIEEGIKELGSQILKEHPVENTQLQNEKLYLYYLQNGRDMYVDQELDINRLSDYDVDHIVPQSFLKDDSIDNKVLTRSDKARGKSDNVPSEEVVKKMKNYWRQLLNAKLITQRKFDNLTKAERGGLSELDKAGFIKRQLVETRQITKHVAQILDSRMNTKYDENDKLIREVKVITLKSKLVSDFRKDFQFYKVREINNYHHAHDAYLNAVVGTALIKKYPKLESEFVYGDYKVYDVRKMIAKSEQEIGKATAKYFFYSNIMNFFKTEITLANGEIRKRPLIETNGETGEIVWDKGRDFATVRKVLSMPQVNIVKKTEVQTGGFSKESILPKRNSDKLIARKKDWDPKKYGGFDSPTVAYSVLVVAKVEKGKSKKLKSVKELLGITIMERSSFEKNPIDFLEAKGYKEVKKDLIIKLPKYSLFELENGRKRMLASAGELQKGNELALPSKYVNFLYLASHYEKLKGSPEDNEQKQLFVEQHKHYLDEIIEQISEFSKRVILADANLDKVLSAYNKHRDKPIREQAENIIHLFTLTNLGAPAAFKYFDTTIDRKRYTSTKEVLDATLIHQSITGLYETRIDLSQLGGDGGPAPGSSGGSGGWVQEISDSRPMLHIYLNGRRFLGLLNTGADKTCIAGRDWPANWPIHQTESSLQGLGMACGVARSSQPLRWQHEDKSGIIHPFVIPTLPFTLWGRDIMKDIKVRLMTDSPDDSQDLMIGAIESNLFADQISWKSDQPVWLNQWPLKQEKLQALQQLVTEQLQLGHLEESNSPWNTPVFVIKKKSGKWRLLQDLRAVNATMHDMGALQPGLPSPVAVPKGWEIIIIDLQDCFFNIKLHPEDCKRFAFSVPSPNFKRPYQRFQWKVLPQGMKNSPTLCQKFVDKAILTVRDKYQDSYIVHYMDDILLAHPSRSIVDEILTSMIQALNKHGLVVSTEKIQKYDNLKYLGTHIQGDSVSYQKLQIRTDKLRTLNDFQKLLGNINWIRPFLKLTTGELKPLFEILNGDSNPISTRKLTPEACKALQLMNERLSTARVKRLDLSQPWSLCILKTEYTPTACLWQDGVVEWIHLPHISPKVITPYDIFCTQLIIKGRHRSKELFSKDPDYIVVPYTKVQFDLLLQEKEDWPISLLGFLGEVHFHLPKDPLLTFTLQTAIIFPHMTSTTPLEKGIVIFTDGSANGRSVTYIQGREPIIKENTQNTAQQAEIVAVITAFEEVSQPFNLYTDSKYVTGLFPEIETATLSPRTKIYTELKHLQRLIHKRQEKFYIGHIRGHTGLPGPLAQGNAYADSLTRILTAGKRTADGSEFEKRTADGSEFESPKKKAKVE

SEQ ID NO: 3177 - protein, 2113 aa, synthetic construct
MPAAKRVKLDGGDKKYSIGLDIGTNSVGWAVITDEYKVPSKKFKVLGNTDRHSIKKNLIGALLFDSGETAEATRLKRTARRRYTRRKNRICYLQEIFSNEMAKVDDSFFHRLEESFLVEEDKKHERHPIFGNIVDEVAYHEKYPTIYHLRKKLVDSTDKADLRLIYLALAHMIKFRGHFLIEGDLNPDNSDVDKLFIQLVQTYNQLFEENPINASGVDAKAILSARLSKSRRLENLIAQLPGEKKNGLFGNLIALSLGLTPNFKSNFDLAEDAKLQLSKDTYDDDLDNLLAQIGDQYADLFLAAKNLSDAILLSDILRVNTEITKAPLSASMIKRYDEHHQDLTLLKALVRQQLPEKYKEIFFDQSKNGYAGYIDGGASQEEFYKFIKPILEKMDGTEELLVKLNREDLLRKQRTFDNGSIPHQIHLGELHAILRRQEDFYPFLKDNREKIEKILTFRIPYYVGPLARGNSRFAWMTRKSEETITPWNFEEVVDKGASAQSFIERMTNFDKNLPNEKVLPKHSLLYEYFTVYNELTKVKYVTEGMRKPAFLSGEQKKAIVDLLFKTNRKVTVKQLKEDYFKKIECFDSVEISGVEDRFNASLGTYHDLLKIIKDKDFLDNEENEDILEDIVLTLTLFEDREMIEERLKTYAHLFDDKVMKQLKRRRYTGWGRLSRKLINGIRDKQSGKTILDFLKSDGFANRNFMQLIHDDSLTFKEDIQKAQVSGQGDSLHEHIANLAGSPAIKKGILQTVKVVDELVKVMGRHKPENIVIEMARENQTTQKGQKNSRERMKRIEEGIKELGSQILKEHPVENTQLQNEKLYLYYLQNGRDMYVDQELDINRLSDYDVDHIVPQSFLKDDSIDNKVLTRSDKARGKSDNVPSEEVVKKMKNYWRQLLNAKLITQRKFDNLTKAERGGLSELDKAGFIKRQLVETRQITKHVAQILDSRMNTKYDENDKLIREVKVITLKSKLVSDFRKDFQFYKVREINNYHHAHDAYLNAVVGTALIKKYPKLESEFVYGDYKVYDVRKMIAKSEQEIGKATAKYFFYSNIMNFFKTEITLANGEIRKRPLIETNGETGEIVWDKGRDFATVRKVLSMPQVNIVKKTEVQTGGFSKESILPKRNSDKLIARKKDWDPKKYGGFDSPTVAYSVLVVAKVEKGKSKKLKSVKELLGITIMERSSFEKNPIDFLEAKGYKEVKKDLIIKLPKYSLFELENGRKRMLASAGELQKGNELALPSKYVNFLYLASHYEKLKGSPEDNEQKQLFVEQHKHYLDEIIEQISEFSKRVILADANLDKVLSAYNKHRDKPIREQAENIIHLFTLTNLGAPAAFKYFDTTIDRKRYTSTKEVLDATLIHQSITGLYETRIDLSQLGGDGGGGGEAAAKGGWVQEISDSRPMLHIYLNGRRFLGLLNTGADKTCIAGRDWPANWPIHQTESSLQGLGMACGVARSSQPLRWQHEDKSGIIHPFVIPTLPFTLWGRDIMKDIKVRLMTDSPDDSQDLMIGAIESNLFADQISWKSDQPVWLNQWPLKQEKLQALQQLVTEQLQLGHLEESNSPWNTPVFVIKKKSGKWRLLQDLRAVNATMHDMGALQPGLPSPVAVPKGWEIIIIDLQDCFFNIKLHPEDCKRFAFSVPSPNFKRPYQRFQWKVLPQGMKNSPTLCQKFVDKAILTVRDKYQDSYIVHYMDDILLAHPSRSIVDEILTSMIQALNKHGLVVSTEKIQKYDNLKYLGTHIQGDSVSYQKLQIRTDKLRTLNDFQKLLGNINWIRPFLKLTTGELKPLFEILNGDSNPISTRKLTPEACKALQLMNERLSTARVKRLDLSQPWSLCILKTEYTPTACLWQDGVVEWIHLPHISPKVITPYDIFCTQLIIKGRHRSKELFSKDPDYIVVPYTKVQFDLLLQEKEDWPISLLGFLGEVHFHLPKDPLLTFTLQTAIIFPHMTSTTPLEKGIVIFTDGSANGRSVTYIQGREPIIKENTQNTAQQAEIVAVITAFEEVSQPFNLYTDSKYVTGLFPEIETATLSPRTKIYTELKHLQRLIHKRQEKFYIGHIRGHTGLPGPLAQGNAYADSLTRILTAGKRTADGSEFEKRTADGSEFESPKKKAKVE

SEQ ID NO: 3178 - protein, 2116 aa, synthetic construct
MPAAKRVKLDGGDKKYSIGLDIGTNSVGWAVITDEYKVPSKKFKVLGNTDRHSIKKNLIGALLFDSGETAEATRLKRTARRRYTRRKNRICYLQEIFSNEMAKVDDSFFHRLEESFLVEEDKKHERHPIFGNIVDEVAYHEKYPTIYHLRKKLVDSTDKADLRLIYLALAHMIKFRGHFLIEGDLNPDNSDVDKLFIQLVQTYNQLFEENPINASGVDAKAILSARLSKSRRLENLIAQLPGEKKNGLFGNLIALSLGLTPNFKSNFDLAEDAKLQLSKDTYDDDLDNLLAQIGDQYADLFLAAKNLSDAILLSDILRVNTEITKAPLSASMIKRYDEHHQDLTLLKALVRQQLPEKYKEIFFDQSKNGYAGYIDGGASQEEFYKFIKPILEKMDGTEELLVKLNREDLLRKQRTFDNGSIPHQIHLGELHAILRRQEDFYPFLKDNREKIEKILTFRIPYYVGPLARGNSRFAWMTRKSEETITPWNFEEVVDKGASAQSFIERMTNFDKNLPNEKVLPKHSLLYEYFTVYNELTKVKYVTEGMRKPAFLSGEQKKAIVDLLFKTNRKVTVKQLKEDYFKKIECFDSVEISGVEDRFNASLGTYHDLLKIIKDKDFLDNEENEDILEDIVLTLTLFEDREMIEERLKTYAHLFDDKVMKQLKRRRYTGWGRLSRKLINGIRDKQSGKTILDFLKSDGFANRNFMQLIHDDSLTFKEDIQKAQVSGQGDSLHEHIANLAGSPAIKKGILQTVKVVDELVKVMGRHKPENIVIEMARENQTTQKGQKNSRERMKRIEEGIKELGSQILKEHPVENTQLQNEKLYLYYLQNGRDMYVDQELDINRLSDYDVDHIVPQSFLKDDSIDNKVLTRSDKARGKSDNVPSEEVVKKMKNYWRQLLNAKLITQRKFDNLTKAERGGLSELDKAGFIKRQLVETRQITKHVAQILDSRMNTKYDENDKLIREVKVITLKSKLVSDFRKDFQFYKVREINNYHHAHDAYLNAVVGTALIKKYPKLESEFVYGDYKVYDVRKMIAKSEQEIGKATAKYFFYSNIMNFFKTEITLANGEIRKRPLIETNGETGEIVWDKGRDFATVRKVLSMPQVNIVKKTEVQTGGFSKESILPKRNSDKLIARKKDWDPKKYGGFDSPTVAYSVLVVAKVEKGKSKKLKSVKELLGITIMERSSFEKNPIDFLEAKGYKEVKKDLIIKLPKYSLFELENGRKRMLASAGELQKGNELALPSKYVNFLYLASHYEKLKGSPEDNEQKQLFVEQHKHYLDEIIEQISEFSKRVILADANLDKVLSAYNKHRDKPIREQAENIIHLFTLTNLGAPAAFKYFDTTIDRKRYTSTKEVLDATLIHQSITGLYETRIDLSQLGGDGGGGSPAPEAAAKGGWVQEISDSRPMLHIYLNGRRFLGLLNTGADKTCIAGRDWPANWPIHQTESSLQGLGMACGVARSSQPLRWQHEDKSGIIHPFVIPTLPFTLWGRDIMKDIKVRLMTDSPDDSQDLMIGAIESNLFADQISWKSDQPVWLNQWPLKQEKLQALQQLVTEQLQLGHLEESNSPWNTPVFVIKKKSGKWRLLQDLRAVNATMHDMGALQPGLPSPVAVPKGWEIIIIDLQDCFFNIKLHPEDCKRFAFSVPSPNFKRPYQRFQWKVLPQGMKNSPTLCQKFVDKAILTVRDKYQDSYIVHYMDDILLAHPSRSIVDEILTSMIQALNKHGLVVSTEKIQKYDNLKYLGTHIQGDSVSYQKLQIRTDKLRTLNDFQKLLGNINWIRPFLKLTTGELKPLFEILNGDSNPISTRKLTPEACKALQLMNERLSTARVKRLDLSQPWSLCILKTEYTPTACLWQDGVVEWIHLPHISPKVITPYDIFCTQLIIKGRHRSKELFSKDPDYIVVPYTKVQFDLLLQEKEDWPISLLGFLGEVHFHLPKDPLLTFTLQTAIIFPHMTSTTPLEKGIVIFTDGSANGRSVTYIQGREPIIKENTQNTAQQAEIVAVITAFEEVSQPFNLYTDSKYVTGLFPEIETATLSPRTKIYTELKHLQRLIHKRQEKFYIGHIRGHTGLPGPLAQGNAYADSLTRILTAGKRTADGSEFEKRTADGSEFESPKKKAKVE

SEQ ID NO: 3179 - protein, 2114 aa, synthetic construct
MPAAKRVKLDGGDKKYSIGLDIGTNSVGWAVITDEYKVPSKKFKVLGNTDRHSIKKNLIGALLFDSGETAEATRLKRTARRRYTRRKNRICYLQEIFSNEMAKVDDSFFHRLEESFLVEEDKKHERHPIFGNIVDEVAYHEKYPTIYHLRKKLVDSTDKADLRLIYLALAHMIKFRGHFLIEGDLNPDNSDVDKLFIQLVQTYNQLFEENPINASGVDAKAILSARLSKSRRLENLIAQLPGEKKNGLFGNLIALSLGLTPNFKSNFDLAEDAKLQLSKDTYDDDLDNLLAQIGDQYADLFLAAKNLSDAILLSDILRVNTEITKAPLSASMIKRYDEHHQDLTLLKALVRQQLPEKYKEIFFDQSKNGYAGYIDGGASQEEFYKFIKPILEKMDGTEELLVKLNREDLLRKQRTFDNGSIPHQIHLGELHAILRRQEDFYPFLKDNREKIEKILTFRIPYYVGPLARGNSRFAWMTRKSEETITPWNFEEVVDKGASAQSFIERMTNFDKNLPNEKVLPKHSLLYEYFTVYNELTKVKYVTEGMRKPAFLSGEQKKAIVDLLFKTNRKVTVKQLKEDYFKKIECFDSVEISGVEDRFNASLGTYHDLLKIIKDKDFLDNEENEDILEDIVLTLTLFEDREMIEERLKTYAHLFDDKVMKQLKRRRYTGWGRLSRKLINGIRDKQSGKTILDFLKSDGFANRNFMQLIHDDSLTFKEDIQKAQVSGQGDSLHEHIANLAGSPAIKKGILQTVKVVDELVKVMGRHKPENIVIEMARENQTTQKGQKNSRERMKRIEEGIKELGSQILKEHPVENTQLQNEKLYLYYLQNGRDMYVDQELDINRLSDYDVDHIVPQSFLKDDSIDNKVLTRSDKARGKSDNVPSEEVVKKMKNYWRQLLNAKLITQRKFDNLTKAERGGLSELDKAGFIKRQLVETRQITKHVAQILDSRMNTKYDENDKLIREVKVITLKSKLVSDFRKDFQFYKVREINNYHHAHDAYLNAVVGTALIKKYPKLESEFVYGDYKVYDVRKMIAKSEQEIGKATAKYFFYSNIMNFFKTEITLANGEIRKRPLIETNGETGEIVWDKGRDFATVRKVLSMPQVNIVKKTEVQTGGFSKESILPKRNSDKLIARKKDWDPKKYGGFDSPTVAYSVLVVAKVEKGKSKKLKSVKELLGITIMERSSFEKNPIDFLEAKGYKEVKKDLIIKLPKYSLFELENGRKRMLASAGELQKGNELALPSKYVNFLYLASHYEKLKGSPEDNEQKQLFVEQHKHYLDEIIEQISEFSKRVILADANLDKVLSAYNKHRDKPIREQAENIIHLFTLTNLGAPAAFKYFDTTIDRKRYTSTKEVLDATLIHQSITGLYETRIDLSQLGGDGGGGSGSSGGGGGWVQEISDSRPMLHIYLNGRRFLGLLNTGADKTCIAGRDWPANWPIHQTESSLQGLGMACGVARSSQPLRWQHEDKSGIIHPFVIPTLPFTLWGRDIMKDIKVRLMTDSPDDSQDLMIGAIESNLFADQISWKSDQPVWLNQWPLKQEKLQALQQLVTEQLQLGHLEESNSPWNTPVFVIKKKSGKWRLLQDLRAVNATMHDMGALQPGLPSPVAVPKGWEIIIIDLQDCFFNIKLHPEDCKRFAFSVPSPNFKRPYQRFQWKVLPQGMKNSPTLCQKFVDKAILTVRDKYQDSYIVHYMDDILLAHPSRSIVDEILTSMIQALNKHGLVVSTEKIQKYDNLKYLGTHIQGDSVSYQKLQIRTDKLRTLNDFQKLLGNINWIRPFLKLTTGELKPLFEILNGDSNPISTRKLTPEACKALQLMNERLSTARVKRLDLSQPWSLCILKTEYTPTACLWQDGVVEWIHLPHISPKVITPYDIFCTQLIIKGRHRSKELFSKDPDYIVVPYTKVQFDLLLQEKEDWPISLLGFLGEVHFHLPKDPLLTFTLQTAIIFPHMTSTTPLEKGIVIFTDGSANGRSVTYIQGREPIIKENTQNTAQQAEIVAVITAFEEVSQPFNLYTDSKYVTGLFPEIETATLSPRTKIYTELKHLQRLIHKRQEKFYIGHIRGHTGLPGPLAQGNAYADSLTRILTAGKRTADGSEFEKRTADGSEFESPKKKAKVE

SEQ ID NO: 3180 - protein, 2114 aa, synthetic construct
MPAAKRVKLDGGDKKYSIGLDIGTNSVGWAVITDEYKVPSKKFKVLGNTDRHSIKKNLIGALLFDSGETAEATRLKRTARRRYTRRKNRICYLQEIFSNEMAKVDDSFFHRLEESFLVEEDKKHERHPIFGNIVDEVAYHEKYPTIYHLRKKLVDSTDKADLRLIYLALAHMIKFRGHFLIEGDLNPDNSDVDKLFIQLVQTYNQLFEENPINASGVDAKAILSARLSKSRRLENLIAQLPGEKKNGLFGNLIALSLGLTPNFKSNFDLAEDAKLQLSKDTYDDDLDNLLAQIGDQYADLFLAAKNLSDAILLSDILRVNTEITKAPLSASMIKRYDEHHQDLTLLKALVRQQLPEKYKEIFFDQSKNGYAGYIDGGASQEEFYKFIKPILEKMDGTEELLVKLNREDLLRKQRTFDNGSIPHQIHLGELHAILRRQEDFYPFLKDNREKIEKILTFRIPYYVGPLARGNSRFAWMTRKSEETITPWNFEEVVDKGASAQSFIERMTNFDKNLPNEKVLPKHSLLYEYFTVYNELTKVKYVTEGMRKPAFLSGEQKKAIVDLLFKTNRKVTVKQLKEDYFKKIECFDSVEISGVEDRFNASLGTYHDLLKIIKDKDFLDNEENEDILEDIVLTLTLFEDREMIEERLKTYAHLFDDKVMKQLKRRRYTGWGRLSRKLINGIRDKQSGKTILDFLKSDGFANRNFMQLIHDDSLTFKEDIQKAQVSGQGDSLHEHIANLAGSPAIKKGILQTVKVVDELVKVMGRHKPENIVIEMARENQTTQKGQKNSRERMKRIEEGIKELGSQILKEHPVENTQLQNEKLYLYYLQNGRDMYVDQELDINRLSDYDVDHIVPQSFLKDDSIDNKVLTRSDKARGKSDNVPSEEVVKKMKNYWRQLLNAKLITQRKFDNLTKAERGGLSELDKAGFIKRQLVETRQITKHVAQILDSRMNTKYDENDKLIREVKVITLKSKLVSDFRKDFQFYKVREINNYHHAHDAYLNAVVGTALIKKYPKLESEFVYGDYKVYDVRKMIAKSEQEIGKATAKYFFYSNIMNFFKTEITLANGEIRKRPLIETNGETGEIVWDKGRDFATVRKVLSMPQVNIVKKTEVQTGGFSKESILPKRNSDKLIARKKDWDPKKYGGFDSPTVAYSVLVVAKVEKGKSKKLKSVKELLGITIMERSSFEKNPIDFLEAKGYKEVKKDLIIKLPKYSLFELENGRKRMLASAGELQKGNELALPSKYVNFLYLASHYEKLKGSPEDNEQKQLFVEQHKHYLDEIIEQISEFSKRVILADANLDKVLSAYNKHRDKPIREQAENIIHLFTLTNLGAPAAFKYFDTTIDRKRYTSTKEVLDATLIHQSITGLYETRIDLSQLGGDGGPAPAPAPAPGGWVQEISDSRPMLHIYLNGRRFLGLLNTGADKTCIAGRDWPANWPIHQTESSLQGLGMACGVARSSQPLRWQHEDKSGIIHPFVIPTLPFTLWGRDIMKDIKVRLMTDSPDDSQDLMIGAIESNLFADQISWKSDQPVWLNQWPLKQEKLQALQQLVTEQLQLGHLEESNSPWNTPVFVIKKKSGKWRLLQDLRAVNATMHDMGALQPGLPSPVAVPKGWEIIIIDLQDCFFNIKLHPEDCKRFAFSVPSPNFKRPYQRFQWKVLPQGMKNSPTLCQKFVDKAILTVRDKYQDSYIVHYMDDILLAHPSRSIVDEILTSMIQALNKHGLVVSTEKIQKYDNLKYLGTHIQGDSVSYQKLQIRTDKLRTLNDFQKLLGNINWIRPFLKLTTGELKPLFEILNGDSNPISTRKLTPEACKALQLMNERLSTARVKRLDLSQPWSLCILKTEYTPTACLWQDGVVEWIHLPHISPKVITPYDIFCTQLIIKGRHRSKELFSKDPDYIVVPYTKVQFDLLLQEKEDWPISLLGFLGEVHFHLPKDPLLTFTLQTAIIFPHMTSTTPLEKGIVIFTDGSANGRSVTYIQGREPIIKENTQNTAQQAEIVAVITAFEEVSQPFNLYTDSKYVTGLFPEIETATLSPRTKIYTELKHLQRLIHKRQEKFYIGHIRGHTGLPGPLAQGNAYADSLTRILTAGKRTADGSEFEKRTADGSEFESPKKKAKVE

SEQ ID NO: 3181 - protein, 2116 aa, synthetic construct
MPAAKRVKLDGGDKKYSIGLDIGTNSVGWAVITDEYKVPSKKFKVLGNTDRHSIKKNLIGALLFDSGETAEATRLKRTARRRYTRRKNRICYLQEIFSNEMAKVDDSFFHRLEESFLVEEDKKHERHPIFGNIVDEVAYHEKYPTIYHLRKKLVDSTDKADLRLIYLALAHMIKFRGHFLIEGDLNPDNSDVDKLFIQLVQTYNQLFEENPINASGVDAKAILSARLSKSRRLENLIAQLPGEKKNGLFGNLIALSLGLTPNFKSNFDLAEDAKLQLSKDTYDDDLDNLLAQIGDQYADLFLAAKNLSDAILLSDILRVNTEITKAPLSASMIKRYDEHHQDLTLLKALVRQQLPEKYKEIFFDQSKNGYAGYIDGGASQEEFYKFIKPILEKMDGTEELLVKLNREDLLRKQRTFDNGSIPHQIHLGELHAILRRQEDFYPFLKDNREKIEKILTFRIPYYVGPLARGNSRFAWMTRKSEETITPWNFEEVVDKGASAQSFIERMTNFDKNLPNEKVLPKHSLLYEYFTVYNELTKVKYVTEGMRKPAFLSGEQKKAIVDLLFKTNRKVTVKQLKEDYFKKIECFDSVEISGVEDRFNASLGTYHDLLKIIKDKDFLDNEENEDILEDIVLTLTLFEDREMIEERLKTYAHLFDDKVMKQLKRRRYTGWGRLSRKLINGIRDKQSGKTILDFLKSDGFANRNFMQLIHDDSLTFKEDIQKAQVSGQGDSLHEHIANLAGSPAIKKGILQTVKVVDELVKVMGRHKPENIVIEMARENQTTQKGQKNSRERMKRIEEGIKELGSQILKEHPVENTQLQNEKLYLYYLQNGRDMYVDQELDINRLSDYDVDHIVPQSFLKDDSIDNKVLTRSDKARGKSDNVPSEEVVKKMKNYWRQLLNAKLITQRKFDNLTKAERGGLSELDKAGFIKRQLVETRQITKHVAQILDSRMNTKYDENDKLIREVKVITLKSKLVSDFRKDFQFYKVREINNYHHAHDAYLNAVVGTALIKKYPKLESEFVYGDYKVYDVRKMIAKSEQEIGKATAKYFFYSNIMNFFKTEITLANGEIRKRPLIETNGETGEIVWDKGRDFATVRKVLSMPQVNIVKKTEVQTGGFSKESILPKRNSDKLIARKKDWDPKKYGGFDSPTVAYSVLVVAKVEKGKSKKLKSVKELLGITIMERSSFEKNPIDFLEAKGYKEVKKDLIIKLPKYSLFELENGRKRMLASAGELQKGNELALPSKYVNFLYLASHYEKLKGSPEDNEQKQLFVEQHKHYLDEIIEQISEFSKRVILADANLDKVLSAYNKHRDKPIREQAENIIHLFTLTNLGAPAAFKYFDTTIDRKRYTSTKEVLDATLIHQSITGLYETRIDLSQLGGDGGGSSGGGEAAAKGGWVQEISDSRPMLHIYLNGRRFLGLLNTGADKTCIAGRDWPANWPIHQTESSLQGLGMACGVARSSQPLRWQHEDKSGIIHPFVIPTLPFTLWGRDIMKDIKVRLMTDSPDDSQDLMIGAIESNLFADQISWKSDQPVWLNQWPLKQEKLQALQQLVTEQLQLGHLEESNSPWNTPVFVIKKKSGKWRLLQDLRAVNATMHDMGALQPGLPSPVAVPKGWEIIIIDLQDCFFNIKLHPEDCKRFAFSVPSPNFKRPYQRFQWKVLPQGMKNSPTLCQKFVDKAILTVRDKYQDSYIVHYMDDILLAHPSRSIVDEILTSMIQALNKHGLVVSTEKIQKYDNLKYLGTHIQGDSVSYQKLQIRTDKLRTLNDFQKLLGNINWIRPFLKLTTGELKPLFEILNGDSNPISTRKLTPEACKALQLMNERLSTARVKRLDLSQPWSLCILKTEYTPTACLWQDGVVEWIHLPHISPKVITPYDIFCTQLIIKGRHRSKELFSKDPDYIVVPYTKVQFDLLLQEKEDWPISLLGFLGEVHFHLPKDPLLTFTLQTAIIFPHMTSTTPLEKGIVIFTDGSANGRSVTYIQGREPIIKENTQNTAQQAEIVAVITAFEEVSQPFNLYTDSKYVTGLFPEIETATLSPRTKIYTELKHLQRLIHKRQEKFYIGHIRGHTGLPGPLAQGNAYADSLTRILTAGKRTADGSEFEKRTADGSEFESPKKKAKVE

SEQ ID NO: 3182 - protein, 2116 aa, synthetic construct
MPAAKRVKLDGGDKKYSIGLDIGTNSVGWAVITDEYKVPSKKFKVLGNTDRHSIKKNLIGALLFDSGETAEATRLKRTARRRYTRRKNRICYLQEIFSNEMAKVDDSFFHRLEESFLVEEDKKHERHPIFGNIVDEVAYHEKYPTIYHLRKKLVDSTDKADLRLIYLALAHMIKFRGHFLIEGDLNPDNSDVDKLFIQLVQTYNQLFEENPINASGVDAKAILSARLSKSRRLENLIAQLPGEKKNGLFGNLIALSLGLTPNFKSNFDLAEDAKLQLSKDTYDDDLDNLLAQIGDQYADLFLAAKNLSDAILLSDILRVNTEITKAPLSASMIKRYDEHHQDLTLLKALVRQQLPEKYKEIFFDQSKNGYAGYIDGGASQEEFYKFIKPILEKMDGTEELLVKLNREDLLRKQRTFDNGSIPHQIHLGELHAILRRQEDFYPFLKDNREKIEKILTFRIPYYVGPLARGNSRFAWMTRKSEETITPWNFEEVVDKGASAQSFIERMTNFDKNLPNEKVLPKHSLLYEYFTVYNELTKVKYVTEGMRKPAFLSGEQKKAIVDLLFKTNRKVTVKQLKEDYFKKIECFDSVEISGVEDRFNASLGTYHDLLKIIKDKDFLDNEENEDILEDIVLTLTLFEDREMIEERLKTYAHLFDDKVMKQLKRRRYTGWGRLSRKLINGIRDKQSGKTILDFLKSDGFANRNFMQLIHDDSLTFKEDIQKAQVSGQGDSLHEHIANLAGSPAIKKGILQTVKVVDELVKVMGRHKPENIVIEMARENQTTQKGQKNSRERMKRIEEGIKELGSQILKEHPVENTQLQNEKLYLYYLQNGRDMYVDQELDINRLSDYDVDHIVPQSFLKDDSIDNKVLTRSDKARGKSDNVPSEEVVKKMKNYWRQLLNAKLITQRKFDNLTKAERGGLSELDKAGFIKRQLVETRQITKHVAQILDSRMNTKYDENDKLIREVKVITLKSKLVSDFRKDFQFYKVREINNYHHAHDAYLNAVVGTALIKKYPKLESEFVYGDYKVYDVRKMIAKSEQEIGKATAKYFFYSNIMNFFKTEITLANGEIRKRPLIETNGETGEIVWDKGRDFATVRKVLSMPQVNIVKKTEVQTGGFSKESILPKRNSDKLIARKKDWDPKKYGGFDSPTVAYSVLVVAKVEKGKSKKLKSVKELLGITIMERSSFEKNPIDFLEAKGYKEVKKDLIIKLPKYSLFELENGRKRMLASAGELQKGNELALPSKYVNFLYLASHYEKLKGSPEDNEQKQLFVEQHKHYLDEIIEQISEFSKRVILADANLDKVLSAYNKHRDKPIREQAENIIHLFTLTNLGAPAAFKYFDTTIDRKRYTSTKEVLDATLIHQSITGLYETRIDLSQLGGDGGGSSEAAAKPAPGGWVQEISDSRPMLHIYLNGRRFLGLLNTGADKTCIAGRDWPANWPIHQTESSLQGLGMACGVARSSQPLRWQHEDKSGIIHPFVIPTLPFTLWGRDIMKDIKVRLMTDSPDDSQDLMIGAIESNLFADQISWKSDQPVWLNQWPLKQEKLQALQQLVTEQLQLGHLEESNSPWNTPVFVIKKKSGKWRLLQDLRAVNATMHDMGALQPGLPSPVAVPKGWEIIIIDLQDCFFNIKLHPEDCKRFAFSVPSPNFKRPYQRFQWKVLPQGMKNSPTLCQKFVDKAILTVRDKYQDSYIVHYMDDILLAHPSRSIVDEILTSMIQALNKHGLVVSTEKIQKYDNLKYLGTHIQGDSVSYQKLQIRTDKLRTLNDFQKLLGNINWIRPFLKLTTGELKPLFEILNGDSNPISTRKLTPEACKALQLMNERLSTARVKRLDLSQPWSLCILKTEYTPTACLWQDGVVEWIHLPHISPKVITPYDIFCTQLIIKGRHRSKELFSKDPDYIVVPYTKVQFDLLLQEKEDWPISLLGFLGEVHFHLPKDPLLTFTLQTAIIFPHMTSTTPLEKGIVIFTDGSANGRSVTYIQGREPIIKENTQNTAQQAEIVAVITAFEEVSQPFNLYTDSKYVTGLFPEIETATLSPRTKIYTELKHLQRLIHKRQEKFYIGHIRGHTGLPGPLAQGNAYADSLTRILTAGKRTADGSEFEKRTADGSEFESPKKKAKVE

SEQ ID NO: 3183 - protein, 2111 aa, synthetic construct
MPAAKRVKLDGGDKKYSIGLDIGTNSVGWAVITDEYKVPSKKFKVLGNTDRHSIKKNLIGALLFDSGETAEATRLKRTARRRYTRRKNRICYLQEIFSNEMAKVDDSFFHRLEESFLVEEDKKHERHPIFGNIVDEVAYHEKYPTIYHLRKKLVDSTDKADLRLIYLALAHMIKFRGHFLIEGDLNPDNSDVDKLFIQLVQTYNQLFEENPINASGVDAKAILSARLSKSRRLENLIAQLPGEKKNGLFGNLIALSLGLTPNFKSNFDLAEDAKLQLSKDTYDDDLDNLLAQIGDQYADLFLAAKNLSDAILLSDILRVNTEITKAPLSASMIKRYDEHHQDLTLLKALVRQQLPEKYKEIFFDQSKNGYAGYIDGGASQEEFYKFIKPILEKMDGTEELLVKLNREDLLRKQRTFDNGSIPHQIHLGELHAILRRQEDFYPFLKDNREKIEKILTFRIPYYVGPLARGNSRFAWMTRKSEETITPWNFEEVVDKGASAQSFIERMTNFDKNLPNEKVLPKHSLLYEYFTVYNELTKVKYVTEGMRKPAFLSGEQKKAIVDLLFKTNRKVTVKQLKEDYFKKIECFDSVEISGVEDRFNASLGTYHDLLKIIKDKDFLDNEENEDILEDIVLTLTLFEDREMIEERLKTYAHLFDDKVMKQLKRRRYTGWGRLSRKLINGIRDKQSGKTILDFLKSDGFANRNFMQLIHDDSLTFKEDIQKAQVSGQGDSLHEHIANLAGSPAIKKGILQTVKVVDELVKVMGRHKPENIVIEMARENQTTQKGQKNSRERMKRIEEGIKELGSQILKEHPVENTQLQNEKLYLYYLQNGRDMYVDQELDINRLSDYDVDHIVPQSFLKDDSIDNKVLTRSDKARGKSDNVPSEEVVKKMKNYWRQLLNAKLITQRKFDNLTKAERGGLSELDKAGFIKRQLVETRQITKHVAQILDSRMNTKYDENDKLIREVKVITLKSKLVSDFRKDFQFYKVREINNYHHAHDAYLNAVVGTALIKKYPKLESEFVYGDYKVYDVRKMIAKSEQEIGKATAKYFFYSNIMNFFKTEITLANGEIRKRPLIETNGETGEIVWDKGRDFATVRKVLSMPQVNIVKKTEVQTGGFSKESILPKRNSDKLIARKKDWDPKKYGGFDSPTVAYSVLVVAKVEKGKSKKLKSVKELLGITIMERSSFEKNPIDFLEAKGYKEVKKDLIIKLPKYSLFELENGRKRMLASAGELQKGNELALPSKYVNFLYLASHYEKLKGSPEDNEQKQLFVEQHKHYLDEIIEQISEFSKRVILADANLDKVLSAYNKHRDKPIREQAENIIHLFTLTNLGAPAAFKYFDTTIDRKRYTSTKEVLDATLIHQSITGLYETRIDLSQLGGDGGGGSGSSGGWVQEISDSRPMLHIYLNGRRFLGLLNTGADKTCIAGRDWPANWPIHQTESSLQGLGMACGVARSSQPLRWQHEDKSGIIHPFVIPTLPFTLWGRDIMKDIKVRLMTDSPDDSQDLMIGAIESNLFADQISWKSDQPVWLNQWPLKQEKLQALQQLVTEQLQLGHLEESNSPWNTPVFVIKKKSGKWRLLQDLRAVNATMHDMGALQPGLPSPVAVPKGWEIIIIDLQDCFFNIKLHPEDCKRFAFSVPSPNFKRPYQRFQWKVLPQGMKNSPTLCQKFVDKAILTVRDKYQDSYIVHYMDDILLAHPSRSIVDEILTSMIQALNKHGLVVSTEKIQKYDNLKYLGTHIQGDSVSYQKLQIRTDKLRTLNDFQKLLGNINWIRPFLKLTTGELKPLFEILNGDSNPISTRKLTPEACKALQLMNERLSTARVKRLDLSQPWSLCILKTEYTPTACLWQDGVVEWIHLPHISPKVITPYDIFCTQLIIKGRHRSKELFSKDPDYIVVPYTKVQFDLLLQEKEDWPISLLGFLGEVHFHLPKDPLLTFTLQTAIIFPHMTSTTPLEKGIVIFTDGSANGRSVTYIQGREPIIKENTQNTAQQAEIVAVITAFEEVSQPFNLYTDSKYVTGLFPEIETATLSPRTKIYTELKHLQRLIHKRQEKFYIGHIRGHTGLPGPLAQGNAYADSLTRILTAGKRTADGSEFEKRTADGSEFESPKKKAKVE

SEQ ID NO: 3184 - protein, 2114 aa, synthetic construct
MPAAKRVKLDGGDKKYSIGLDIGTNSVGWAVITDEYKVPSKKFKVLGNTDRHSIKKNLIGALLFDSGETAEATRLKRTARRRYTRRKNRICYLQEIFSNEMAKVDDSFFHRLEESFLVEEDKKHERHPIFGNIVDEVAYHEKYPTIYHLRKKLVDSTDKADLRLIYLALAHMIKFRGHFLIEGDLNPDNSDVDKLFIQLVQTYNQLFEENPINASGVDAKAILSARLSKSRRLENLIAQLPGEKKNGLFGNLIALSLGLTPNFKSNFDLAEDAKLQLSKDTYDDDLDNLLAQIGDQYADLFLAAKNLSDAILLSDILRVNTEITKAPLSASMIKRYDEHHQDLTLLKALVRQQLPEKYKEIFFDQSKNGYAGYIDGGASQEEFYKFIKPILEKMDGTEELLVKLNREDLLRKQRTFDNGSIPHQIHLGELHAILRRQEDFYPFLKDNREKIEKILTFRIPYYVGPLARGNSRFAWMTRKSEETITPWNFEEVVDKGASAQSFIERMTNFDKNLPNEKVLPKHSLLYEYFTVYNELTKVKYVTEGMRKPAFLSGEQKKAIVDLLFKTNRKVTVKQLKEDYFKKIECFDSVEISGVEDRFNASLGTYHDLLKIIKDKDFLDNEENEDILEDIVLTLTLFEDREMIEERLKTYAHLFDDKVMKQLKRRRYTGWGRLSRKLINGIRDKQSGKTILDFLKSDGFANRNFMQLIHDDSLTFKEDIQKAQVSGQGDSLHEHIANLAGSPAIKKGILQTVKVVDELVKVMGRHKPENIVIEMARENQTTQKGQKNSRERMKRIEEGIKELGSQILKEHPVENTQLQNEKLYLYYLQNGRDMYVDQELDINRLSDYDVDHIVPQSFLKDDSIDNKVLTRSDKARGKSDNVPSEEVVKKMKNYWRQLLNAKLITQRKFDNLTKAERGGLSELDKAGFIKRQLVETRQITKHVAQILDSRMNTKYDENDKLIREVKVITLKSKLVSDFRKDFQFYKVREINNYHHAHDAYLNAVVGTALIKKYPKLESEFVYGDYKVYDVRKMIAKSEQEIGKATAKYFFYSNIMNFFKTEITLANGEIRKRPLIETNGETGEIVWDKGRDFATVRKVLSMPQVNIVKKTEVQTGGFSKESILPKRNSDKLIARKKDWDPKKYGGFDSPTVAYSVLVVAKVEKGKSKKLKSVKELLGITIMERSSFEKNPIDFLEAKGYKEVKKDLIIKLPKYSLFELENGRKRMLASAGELQKGNELALPSKYVNFLYLASHYEKLKGSPEDNEQKQLFVEQHKHYLDEIIEQISEFSKRVILADANLDKVLSAYNKHRDKPIREQAENIIHLFTLTNLGAPAAFKYFDTTIDRKRYTSTKEVLDATLIHQSITGLYETRIDLSQLGGDGGGGGGSSGGSGGWVQEISDSRPMLHIYLNGRRFLGLLNTGADKTCIAGRDWPANWPIHQTESSLQGLGMACGVARSSQPLRWQHEDKSGIIHPFVIPTLPFTLWGRDIMKDIKVRLMTDSPDDSQDLMIGAIESNLFADQISWKSDQPVWLNQWPLKQEKLQALQQLVTEQLQLGHLEESNSPWNTPVFVIKKKSGKWRLLQDLRAVNATMHDMGALQPGLPSPVAVPKGWEIIIIDLQDCFFNIKLHPEDCKRFAFSVPSPNFKRPYQRFQWKVLPQGMKNSPTLCQKFVDKAILTVRDKYQDSYIVHYMDDILLAHPSRSIVDEILTSMIQALNKHGLVVSTEKIQKYDNLKYLGTHIQGDSVSYQKLQIRTDKLRTLNDFQKLLGNINWIRPFLKLTTGELKPLFEILNGDSNPISTRKLTPEACKALQLMNERLSTARVKRLDLSQPWSLCILKTEYTPTACLWQDGVVEWIHLPHISPKVITPYDIFCTQLIIKGRHRSKELFSKDPDYIVVPYTKVQFDLLLQEKEDWPISLLGFLGEVHFHLPKDPLLTFTLQTAIIFPHMTSTTPLEKGIVIFTDGSANGRSVTYIQGREPIIKENTQNTAQQAEIVAVITAFEEVSQPFNLYTDSKYVTGLFPEIETATLSPRTKIYTELKHLQRLIHKRQEKFYIGHIRGHTGLPGPLAQGNAYADSLTRILTAGKRTADGSEFEKRTADGSEFESPKKKAKVE

SEQ ID NO: 3185 - protein, 2120 aa, synthetic construct
MPAAKRVKLDGGDKKYSIGLDIGTNSVGWAVITDEYKVPSKKFKVLGNTDRHSIKKNLIGALLFDSGETAEATRLKRTARRRYTRRKNRICYLQEIFSNEMAKVDDSFFHRLEESFLVEEDKKHERHPIFGNIVDEVAYHEKYPTIYHLRKKLVDSTDKADLRLIYLALAHMIKFRGHFLIEGDLNPDNSDVDKLFIQLVQTYNQLFEENPINASGVDAKAILSARLSKSRRLENLIAQLPGEKKNGLFGNLIALSLGLTPNFKSNFDLAEDAKLQLSKDTYDDDLDNLLAQIGDQYADLFLAAKNLSDAILLSDILRVNTEITKAPLSASMIKRYDEHHQDLTLLKALVRQQLPEKYKEIFFDQSKNGYAGYIDGGASQEEFYKFIKPILEKMDGTEELLVKLNREDLLRKQRTFDNGSIPHQIHLGELHAILRRQEDFYPFLKDNREKIEKILTFRIPYYVGPLARGNSRFAWMTRKSEETITPWNFEEVVDKGASAQSFIERMTNFDKNLPNEKVLPKHSLLYEYFTVYNELTKVKYVTEGMRKPAFLSGEQKKAIVDLLFKTNRKVTVKQLKEDYFKKIECFDSVEISGVEDRFNASLGTYHDLLKIIKDKDFLDNEENEDILEDIVLTLTLFEDREMIEERLKTYAHLFDDKVMKQLKRRRYTGWGRLSRKLINGIRDKQSGKTILDFLKSDGFANRNFMQLIHDDSLTFKEDIQKAQVSGQGDSLHEHIANLAGSPAIKKGILQTVKVVDELVKVMGRHKPENIVIEMARENQTTQKGQKNSRERMKRIEEGIKELGSQILKEHPVENTQLQNEKLYLYYLQNGRDMYVDQELDINRLSDYDVDHIVPQSFLKDDSIDNKVLTRSDKARGKSDNVPSEEVVKKMKNYWRQLLNAKLITQRKFDNLTKAERGGLSELDKAGFIKRQLVETRQITKHVAQILDSRMNTKYDENDKLIREVKVITLKSKLVSDFRKDFQFYKVREINNYHHAHDAYLNAVVGTALIKKYPKLESEFVYGDYKVYDVRKMIAKSEQEIGKATAKYFFYSNIMNFFKTEITLANGEIRKRPLIETNGETGEIVWDKGRDFATVRKVLSMPQVNIVKKTEVQTGGFSKESILPKRNSDKLIARKKDWDPKKYGGFDSPTVAYSVLVVAKVEKGKSKKLKSVKELLGITIMERSSFEKNPIDFLEAKGYKEVKKDLIIKLPKYSLFELENGRKRMLASAGELQKGNELALPSKYVNFLYLASHYEKLKGSPEDNEQKQLFVEQHKHYLDEIIEQISEFSKRVILADANLDKVLSAYNKHRDKPIREQAENIIHLFTLTNLGAPAAFKYFDTTIDRKRYTSTKEVLDATLIHQSITGLYETRIDLSQLGGDGGEAAAKGGGGSEAAAKGGWVQEISDSRPMLHIYLNGRRFLGLLNTGADKTCIAGRDWPANWPIHQTESSLQGLGMACGVARSSQPLRWQHEDKSGIIHPFVIPTLPFTLWGRDIMKDIKVRLMTDSPDDSQDLMIGAIESNLFADQISWKSDQPVWLNQWPLKQEKLQALQQLVTEQLQLGHLEESNSPWNTPVFVIKKKSGKWRLLQDLRAVNATMHDMGALQPGLPSPVAVPKGWEIIIIDLQDCFFNIKLHPEDCKRFAFSVPSPNFKRPYQRFQWKVLPQGMKNSPTLCQKFVDKAILTVRDKYQDSYIVHYMDDILLAHPSRSIVDEILTSMIQALNKHGLVVSTEKIQKYDNLKYLGTHIQGDSVSYQKLQIRTDKLRTLNDFQKLLGNINWIRPFLKLTTGELKPLFEILNGDSNPISTRKLTPEACKALQLMNERLSTARVKRLDLSQPWSLCILKTEYTPTACLWQDGVVEWIHLPHISPKVITPYDIFCTQLIIKGRHRSKELFSKDPDYIVVPYTKVQFDLLLQEKEDWPISLLGFLGEVHFHLPKDPLLTFTLQTAIIFPHMTSTTPLEKGIVIFTDGSANGRSVTYIQGREPIIKENTQNTAQQAEIVAVITAFEEVSQPFNLYTDSKYVTGLFPEIETATLSPRTKIYTELKHLQRLIHKRQEKFYIGHIRGHTGLPGPLAQGNAYADSLTRILTAGKRTADGSEFEKRTADGSEFESPKKKAKVE

SEQ ID NO: 3186 - protein, 2108 aa, synthetic construct
MPAAKRVKLDGGDKKYSIGLDIGTNSVGWAVITDEYKVPSKKFKVLGNTDRHSIKKNLIGALLFDSGETAEATRLKRTARRRYTRRKNRICYLQEIFSNEMAKVDDSFFHRLEESFLVEEDKKHERHPIFGNIVDEVAYHEKYPTIYHLRKKLVDSTDKADLRLIYLALAHMIKFRGHFLIEGDLNPDNSDVDKLFIQLVQTYNQLFEENPINASGVDAKAILSARLSKSRRLENLIAQLPGEKKNGLFGNLIALSLGLTPNFKSNFDLAEDAKLQLSKDTYDDDLDNLLAQIGDQYADLFLAAKNLSDAILLSDILRVNTEITKAPLSASMIKRYDEHHQDLTLLKALVRQQLPEKYKEIFFDQSKNGYAGYIDGGASQEEFYKFIKPILEKMDGTEELLVKLNREDLLRKQRTFDNGSIPHQIHLGELHAILRRQEDFYPFLKDNREKIEKILTFRIPYYVGPLARGNSRFAWMTRKSEETITPWNFEEVVDKGASAQSFIERMTNFDKNLPNEKVLPKHSLLYEYFTVYNELTKVKYVTEGMRKPAFLSGEQKKAIVDLLFKTNRKVTVKQLKEDYFKKIECFDSVEISGVEDRFNASLGTYHDLLKIIKDKDFLDNEENEDILEDIVLTLTLFEDREMIEERLKTYAHLFDDKVMKQLKRRRYTGWGRLSRKLINGIRDKQSGKTILDFLKSDGFANRNFMQLIHDDSLTFKEDIQKAQVSGQGDSLHEHIANLAGSPAIKKGILQTVKVVDELVKVMGRHKPENIVIEMARENQTTQKGQKNSRERMKRIEEGIKELGSQILKEHPVENTQLQNEKLYLYYLQNGRDMYVDQELDINRLSDYDVDHIVPQSFLKDDSIDNKVLTRSDKARGKSDNVPSEEVVKKMKNYWRQLLNAKLITQRKFDNLTKAERGGLSELDKAGFIKRQLVETRQITKHVAQILDSRMNTKYDENDKLIREVKVITLKSKLVSDFRKDFQFYKVREINNYHHAHDAYLNAVVGTALIKKYPKLESEFVYGDYKVYDVRKMIAKSEQEIGKATAKYFFYSNIMNFFKTEITLANGEIRKRPLIETNGETGEIVWDKGRDFATVRKVLSMPQVNIVKKTEVQTGGFSKESILPKRNSDKLIARKKDWDPKKYGGFDSPTVAYSVLVVAKVEKGKSKKLKSVKELLGITIMERSSFEKNPIDFLEAKGYKEVKKDLIIKLPKYSLFELENGRKRMLASAGELQKGNELALPSKYVNFLYLASHYEKLKGSPEDNEQKQLFVEQHKHYLDEIIEQISEFSKRVILADANLDKVLSAYNKHRDKPIREQAENIIHLFTLTNLGAPAAFKYFDTTIDRKRYTSTKEVLDATLIHQSITGLYETRIDLSQLGGDGGGGSGGWVQEISDSRPMLHIYLNGRRFLGLLNTGADKTCIAGRDWPANWPIHQTESSLQGLGMACGVARSSQPLRWQHEDKSGIIHPFVIPTLPFTLWGRDIMKDIKVRLMTDSPDDSQDLMIGAIESNLFADQISWKSDQPVWLNQWPLKQEKLQALQQLVTEQLQLGHLEESNSPWNTPVFVIKKKSGKWRLLQDLRAVNATMHDMGALQPGLPSPVAVPKGWEIIIIDLQDCFFNIKLHPEDCKRFAFSVPSPNFKRPYQRFQWKVLPQGMKNSPTLCQKFVDKAILTVRDKYQDSYIVHYMDDILLAHPSRSIVDEILTSMIQALNKHGLVVSTEKIQKYDNLKYLGTHIQGDSVSYQKLQIRTDKLRTLNDFQKLLGNINWIRPFLKLTTGELKPLFEILNGDSNPISTRKLTPEACKALQLMNERLSTARVKRLDLSQPWSLCILKTEYTPTACLWQDGVVEWIHLPHISPKVITPYDIFCTQLIIKGRHRSKELFSKDPDYIVVPYTKVQFDLLLQEKEDWPISLLGFLGEVHFHLPKDPLLTFTLQTAIIFPHMTSTTPLEKGIVIFTDGSANGRSVTYIQGREPIIKENTQNTAQQAEIVAVITAFEEVSQPFNLYTDSKYVTGLFPEIETATLSPRTKIYTELKHLQRLIHKRQEKFYIGHIRGHTGLPGPLAQGNAYADSLTRILTAGKRTADGSEFEKRTADGSEFESPKKKAKVE

SEQ ID NO: 3187 - protein, 2114 aa, synthetic construct
MPAAKRVKLDGGDKKYSIGLDIGTNSVGWAVITDEYKVPSKKFKVLGNTDRHSIKKNLIGALLFDSGETAEATRLKRTARRRYTRRKNRICYLQEIFSNEMAKVDDSFFHRLEESFLVEEDKKHERHPIFGNIVDEVAYHEKYPTIYHLRKKLVDSTDKADLRLIYLALAHMIKFRGHFLIEGDLNPDNSDVDKLFIQLVQTYNQLFEENPINASGVDAKAILSARLSKSRRLENLIAQLPGEKKNGLFGNLIALSLGLTPNFKSNFDLAEDAKLQLSKDTYDDDLDNLLAQIGDQYADLFLAAKNLSDAILLSDILRVNTEITKAPLSASMIKRYDEHHQDLTLLKALVRQQLPEKYKEIFFDQSKNGYAGYIDGGASQEEFYKFIKPILEKMDGTEELLVKLNREDLLRKQRTFDNGSIPHQIHLGELHAILRRQEDFYPFLKDNREKIEKILTFRIPYYVGPLARGNSRFAWMTRKSEETITPWNFEEVVDKGASAQSFIERMTNFDKNLPNEKVLPKHSLLYEYFTVYNELTKVKYVTEGMRKPAFLSGEQKKAIVDLLFKTNRKVTVKQLKEDYFKKIECFDSVEISGVEDRFNASLGTYHDLLKIIKDKDFLDNEENEDILEDIVLTLTLFEDREMIEERLKTYAHLFDDKVMKQLKRRRYTGWGRLSRKLINGIRDKQSGKTILDFLKSDGFANRNFMQLIHDDSLTFKEDIQKAQVSGQGDSLHEHIANLAGSPAIKKGILQTVKVVDELVKVMGRHKPENIVIEMARENQTTQKGQKNSRERMKRIEEGIKELGSQILKEHPVENTQLQNEKLYLYYLQNGRDMYVDQELDINRLSDYDVDHIVPQSFLKDDSIDNKVLTRSDKARGKSDNVPSEEVVKKMKNYWRQLLNAKLITQRKFDNLTKAERGGLSELDKAGFIKRQLVETRQITKHVAQILDSRMNTKYDENDKLIREVKVITLKSKLVSDFRKDFQFYKVREINNYHHAHDAYLNAVVGTALIKKYPKLESEFVYGDYKVYDVRKMIAKSEQEIGKATAKYFFYSNIMNFFKTEITLANGEIRKRPLIETNGETGEIVWDKGRDFATVRKVLSMPQVNIVKKTEVQTGGFSKESILPKRNSDKLIARKKDWDPKKYGGFDSPTVAYSVLVVAKVEKGKSKKLKSVKELLGITIMERSSFEKNPIDFLEAKGYKEVKKDLIIKLPKYSLFELENGRKRMLASAGELQKGNELALPSKYVNFLYLASHYEKLKGSPEDNEQKQLFVEQHKHYLDEIIEQISEFSKRVILADANLDKVLSAYNKHRDKPIREQAENIIHLFTLTNLGAPAAFKYFDTTIDRKRYTSTKEVLDATLIHQSITGLYETRIDLSQLGGDGGGSSPAPGGGGGWVQEISDSRPMLHIYLNGRRFLGLLNTGADKTCIAGRDWPANWPIHQTESSLQGLGMACGVARSSQPLRWQHEDKSGIIHPFVIPTLPFTLWGRDIMKDIKVRLMTDSPDDSQDLMIGAIESNLFADQISWKSDQPVWLNQWPLKQEKLQALQQLVTEQLQLGHLEESNSPWNTPVFVIKKKSGKWRLLQDLRAVNATMHDMGALQPGLPSPVAVPKGWEIIIIDLQDCFFNIKLHPEDCKRFAFSVPSPNFKRPYQRFQWKVLPQGMKNSPTLCQKFVDKAILTVRDKYQDSYIVHYMDDILLAHPSRSIVDEILTSMIQALNKHGLVVSTEKIQKYDNLKYLGTHIQGDSVSYQKLQIRTDKLRTLNDFQKLLGNINWIRPFLKLTTGELKPLFEILNGDSNPISTRKLTPEACKALQLMNERLSTARVKRLDLSQPWSLCILKTEYTPTACLWQDGVVEWIHLPHISPKVITPYDIFCTQLIIKGRHRSKELFSKDPDYIVVPYTKVQFDLLLQEKEDWPISLLGFLGEVHFHLPKDPLLTFTLQTAIIFPHMTSTTPLEKGIVIFTDGSANGRSVTYIQGREPIIKENTQNTAQQAEIVAVITAFEEVSQPFNLYTDSKYVTGLFPEIETATLSPRTKIYTELKHLQRLIHKRQEKFYIGHIRGHTGLPGPLAQGNAYADSLTRILTAGKRTADGSEFEKRTADGSEFESPKKKAKVE

SEQ ID NO: 3188 - protein, 2114 aa, synthetic construct
MPAAKRVKLDGGDKKYSIGLDIGTNSVGWAVITDEYKVPSKKFKVLGNTDRHSIKKNLIGALLFDSGETAEATRLKRTARRRYTRRKNRICYLQEIFSNEMAKVDDSFFHRLEESFLVEEDKKHERHPIFGNIVDEVAYHEKYPTIYHLRKKLVDSTDKADLRLIYLALAHMIKFRGHFLIEGDLNPDNSDVDKLFIQLVQTYNQLFEENPINASGVDAKAILSARLSKSRRLENLIAQLPGEKKNGLFGNLIALSLGLTPNFKSNFDLAEDAKLQLSKDTYDDDLDNLLAQIGDQYADLFLAAKNLSDAILLSDILRVNTEITKAPLSASMIKRYDEHHQDLTLLKALVRQQLPEKYKEIFFDQSKNGYAGYIDGGASQEEFYKFIKPILEKMDGTEELLVKLNREDLLRKQRTFDNGSIPHQIHLGELHAILRRQEDFYPFLKDNREKIEKILTFRIPYYVGPLARGNSRFAWMTRKSEETITPWNFEEVVDKGASAQSFIERMTNFDKNLPNEKVLPKHSLLYEYFTVYNELTKVKYVTEGMRKPAFLSGEQKKAIVDLLFKTNRKVTVKQLKEDYFKKIECFDSVEISGVEDRFNASLGTYHDLLKIIKDKDFLDNEENEDILEDIVLTLTLFEDREMIEERLKTYAHLFDDKVMKQLKRRRYTGWGRLSRKLINGIRDKQSGKTILDFLKSDGFANRNFMQLIHDDSLTFKEDIQKAQVSGQGDSLHEHIANLAGSPAIKKGILQTVKVVDELVKVMGRHKPENIVIEMARENQTTQKGQKNSRERMKRIEEGIKELGSQILKEHPVENTQLQNEKLYLYYLQNGRDMYVDQELDINRLSDYDVDHIVPQSFLKDDSIDNKVLTRSDKARGKSDNVPSEEVVKKMKNYWRQLLNAKLITQRKFDNLTKAERGGLSELDKAGFIKRQLVETRQITKHVAQILDSRMNTKYDENDKLIREVKVITLKSKLVSDFRKDFQFYKVREINNYHHAHDAYLNAVVGTALIKKYPKLESEFVYGDYKVYDVRKMIAKSEQEIGKATAKYFFYSNIMNFFKTEITLANGEIRKRPLIETNGETGEIVWDKGRDFATVRKVLSMPQVNIVKKTEVQTGGFSKESILPKRNSDKLIARKKDWDPKKYGGFDSPTVAYSVLVVAKVEKGKSKKLKSVKELLGITIMERSSFEKNPIDFLEAKGYKEVKKDLIIKLPKYSLFELENGRKRMLASAGELQKGNELALPSKYVNFLYLASHYEKLKGSPEDNEQKQLFVEQHKHYLDEIIEQISEFSKRVILADANLDKVLSAYNKHRDKPIREQAENIIHLFTLTNLGAPAAFKYFDTTIDRKRYTSTKEVLDATLIHQSITGLYETRIDLSQLGGDGGPAPGSSGGGGGWVQEISDSRPMLHIYLNGRRFLGLLNTGADKTCIAGRDWPANWPIHQTESSLQGLGMACGVARSSQPLRWQHEDKSGIIHPFVIPTLPFTLWGRDIMKDIKVRLMTDSPDDSQDLMIGAIESNLFADQISWKSDQPVWLNQWPLKQEKLQALQQLVTEQLQLGHLEESNSPWNTPVFVIKKKSGKWRLLQDLRAVNATMHDMGALQPGLPSPVAVPKGWEIIIIDLQDCFFNIKLHPEDCKRFAFSVPSPNFKRPYQRFQWKVLPQGMKNSPTLCQKFVDKAILTVRDKYQDSYIVHYMDDILLAHPSRSIVDEILTSMIQALNKHGLVVSTEKIQKYDNLKYLGTHIQGDSVSYQKLQIRTDKLRTLNDFQKLLGNINWIRPFLKLTTGELKPLFEILNGDSNPISTRKLTPEACKALQLMNERLSTARVKRLDLSQPWSLCILKTEYTPTACLWQDGVVEWIHLPHISPKVITPYDIFCTQLIIKGRHRSKELFSKDPDYIVVPYTKVQFDLLLQEKEDWPISLLGFLGEVHFHLPKDPLLTFTLQTAIIFPHMTSTTPLEKGIVIFTDGSANGRSVTYIQGREPIIKENTQNTAQQAEIVAVITAFEEVSQPFNLYTDSKYVTGLFPEIETATLSPRTKIYTELKHLQRLIHKRQEKFYIGHIRGHTGLPGPLAQGNAYADSLTRILTAGKRTADGSEFEKRTADGSEFESPKKKAKVE

SEQ ID NO: 3189 - protein, 2116 aa, synthetic construct
MPAAKRVKLDGGDKKYSIGLDIGTNSVGWAVITDEYKVPSKKFKVLGNTDRHSIKKNLIGALLFDSGETAEATRLKRTARRRYTRRKNRICYLQEIFSNEMAKVDDSFFHRLEESFLVEEDKKHERHPIFGNIVDEVAYHEKYPTIYHLRKKLVDSTDKADLRLIYLALAHMIKFRGHFLIEGDLNPDNSDVDKLFIQLVQTYNQLFEENPINASGVDAKAILSARLSKSRRLENLIAQLPGEKKNGLFGNLIALSLGLTPNFKSNFDLAEDAKLQLSKDTYDDDLDNLLAQIGDQYADLFLAAKNLSDAILLSDILRVNTEITKAPLSASMIKRYDEHHQDLTLLKALVRQQLPEKYKEIFFDQSKNGYAGYIDGGASQEEFYKFIKPILEKMDGTEELLVKLNREDLLRKQRTFDNGSIPHQIHLGELHAILRRQEDFYPFLKDNREKIEKILTFRIPYYVGPLARGNSRFAWMTRKSEETITPWNFEEVVDKGASAQSFIERMTNFDKNLPNEKVLPKHSLLYEYFTVYNELTKVKYVTEGMRKPAFLSGEQKKAIVDLLFKTNRKVTVKQLKEDYFKKIECFDSVEISGVEDRFNASLGTYHDLLKIIKDKDFLDNEENEDILEDIVLTLTLFEDREMIEERLKTYAHLFDDKVMKQLKRRRYTGWGRLSRKLINGIRDKQSGKTILDFLKSDGFANRNFMQLIHDDSLTFKEDIQKAQVSGQGDSLHEHIANLAGSPAIKKGILQTVKVVDELVKVMGRHKPENIVIEMARENQTTQKGQKNSRERMKRIEEGIKELGSQILKEHPVENTQLQNEKLYLYYLQNGRDMYVDQELDINRLSDYDVDHIVPQSFLKDDSIDNKVLTRSDKARGKSDNVPSEEVVKKMKNYWRQLLNAKLITQRKFDNLTKAERGGLSELDKAGFIKRQLVETRQITKHVAQILDSRMNTKYDENDKLIREVKVITLKSKLVSDFRKDFQFYKVREINNYHHAHDAYLNAVVGTALIKKYPKLESEFVYGDYKVYDVRKMIAKSEQEIGKATAKYFFYSNIMNFFKTEITLANGEIRKRPLIETNGETGEIVWDKGRDFATVRKVLSMPQVNIVKKTEVQTGGFSKESILPKRNSDKLIARKKDWDPKKYGGFDSPTVAYSVLVVAKVEKGKSKKLKSVKELLGITIMERSSFEKNPIDFLEAKGYKEVKKDLIIKLPKYSLFELENGRKRMLASAGELQKGNELALPSKYVNFLYLASHYEKLKGSPEDNEQKQLFVEQHKHYLDEIIEQISEFSKRVILADANLDKVLSAYNKHRDKPIREQAENIIHLFTLTNLGAPAAFKYFDTTIDRKRYTSTKEVLDATLIHQSITGLYETRIDLSQLGGDGGEAAAKGGSPAPGGWVQEISDSRPMLHIYLNGRRFLGLLNTGADKTCIAGRDWPANWPIHQTESSLQGLGMACGVARSSQPLRWQHEDKSGIIHPFVIPTLPFTLWGRDIMKDIKVRLMTDSPDDSQDLMIGAIESNLFADQISWKSDQPVWLNQWPLKQEKLQALQQLVTEQLQLGHLEESNSPWNTPVFVIKKKSGKWRLLQDLRAVNATMHDMGALQPGLPSPVAVPKGWEIIIIDLQDCFFNIKLHPEDCKRFAFSVPSPNFKRPYQRFQWKVLPQGMKNSPTLCQKFVDKAILTVRDKYQDSYIVHYMDDILLAHPSRSIVDEILTSMIQALNKHGLVVSTEKIQKYDNLKYLGTHIQGDSVSYQKLQIRTDKLRTLNDFQKLLGNINWIRPFLKLTTGELKPLFEILNGDSNPISTRKLTPEACKALQLMNERLSTARVKRLDLSQPWSLCILKTEYTPTACLWQDGVVEWIHLPHISPKVITPYDIFCTQLIIKGRHRSKELFSKDPDYIVVPYTKVQFDLLLQEKEDWPISLLGFLGEVHFHLPKDPLLTFTLQTAIIFPHMTSTTPLEKGIVIFTDGSANGRSVTYIQGREPIIKENTQNTAQQAEIVAVITAFEEVSQPFNLYTDSKYVTGLFPEIETATLSPRTKIYTELKHLQRLIHKRQEKFYIGHIRGHTGLPGPLAQGNAYADSLTRILTAGKRTADGSEFEKRTADGSEFESPKKKAKVE

SEQ ID NO: 3190 - protein, 2114 aa, synthetic construct
MPAAKRVKLDGGDKKYSIGLDIGTNSVGWAVITDEYKVPSKKFKVLGNTDRHSIKKNLIGALLFDSGETAEATRLKRTARRRYTRRKNRICYLQEIFSNEMAKVDDSFFHRLEESFLVEEDKKHERHPIFGNIVDEVAYHEKYPTIYHLRKKLVDSTDKADLRLIYLALAHMIKFRGHFLIEGDLNPDNSDVDKLFIQLVQTYNQLFEENPINASGVDAKAILSARLSKSRRLENLIAQLPGEKKNGLFGNLIALSLGLTPNFKSNFDLAEDAKLQLSKDTYDDDLDNLLAQIGDQYADLFLAAKNLSDAILLSDILRVNTEITKAPLSASMIKRYDEHHQDLTLLKALVRQQLPEKYKEIFFDQSKNGYAGYIDGGASQEEFYKFIKPILEKMDGTEELLVKLNREDLLRKQRTFDNGSIPHQIHLGELHAILRRQEDFYPFLKDNREKIEKILTFRIPYYVGPLARGNSRFAWMTRKSEETITPWNFEEVVDKGASAQSFIERMTNFDKNLPNEKVLPKHSLLYEYFTVYNELTKVKYVTEGMRKPAFLSGEQKKAIVDLLFKTNRKVTVKQLKEDYFKKIECFDSVEISGVEDRFNASLGTYHDLLKIIKDKDFLDNEENEDILEDIVLTLTLFEDREMIEERLKTYAHLFDDKVMKQLKRRRYTGWGRLSRKLINGIRDKQSGKTILDFLKSDGFANRNFMQLIHDDSLTFKEDIQKAQVSGQGDSLHEHIANLAGSPAIKKGILQTVKVVDELVKVMGRHKPENIVIEMARENQTTQKGQKNSRERMKRIEEGIKELGSQILKEHPVENTQLQNEKLYLYYLQNGRDMYVDQELDINRLSDYDVDHIVPQSFLKDDSIDNKVLTRSDKARGKSDNVPSEEVVKKMKNYWRQLLNAKLITQRKFDNLTKAERGGLSELDKAGFIKRQLVETRQITKHVAQILDSRMNTKYDENDKLIREVKVITLKSKLVSDFRKDFQFYKVREINNYHHAHDAYLNAVVGTALIKKYPKLESEFVYGDYKVYDVRKMIAKSEQEIGKATAKYFFYSNIMNFFKTEITLANGEIRKRPLIETNGETGEIVWDKGRDFATVRKVLSMPQVNIVKKTEVQTGGFSKESILPKRNSDKLIARKKDWDPKKYGGFDSPTVAYSVLVVAKVEKGKSKKLKSVKELLGITIMERSSFEKNPIDFLEAKGYKEVKKDLIIKLPKYSLFELENGRKRMLASAGELQKGNELALPSKYVNFLYLASHYEKLKGSPEDNEQKQLFVEQHKHYLDEIIEQISEFSKRVILADANLDKVLSAYNKHRDKPIREQAENIIHLFTLTNLGAPAAFKYFDTTIDRKRYTSTKEVLDATLIHQSITGLYETRIDLSQLGGDGGGSSGGSGGGGGWVQEISDSRPMLHIYLNGRRFLGLLNTGADKTCIAGRDWPANWPIHQTESSLQGLGMACGVARSSQPLRWQHEDKSGIIHPFVIPTLPFTLWGRDIMKDIKVRLMTDSPDDSQDLMIGAIESNLFADQISWKSDQPVWLNQWPLKQEKLQALQQLVTEQLQLGHLEESNSPWNTPVFVIKKKSGKWRLLQDLRAVNATMHDMGALQPGLPSPVAVPKGWEIIIIDLQDCFFNIKLHPEDCKRFAFSVPSPNFKRPYQRFQWKVLPQGMKNSPTLCQKFVDKAILTVRDKYQDSYIVHYMDDILLAHPSRSIVDEILTSMIQALNKHGLVVSTEKIQKYDNLKYLGTHIQGDSVSYQKLQIRTDKLRTLNDFQKLLGNINWIRPFLKLTTGELKPLFEILNGDSNPISTRKLTPEACKALQLMNERLSTARVKRLDLSQPWSLCILKTEYTPTACLWQDGVVEWIHLPHISPKVITPYDIFCTQLIIKGRHRSKELFSKDPDYIVVPYTKVQFDLLLQEKEDWPISLLGFLGEVHFHLPKDPLLTFTLQTAIIFPHMTSTTPLEKGIVIFTDGSANGRSVTYIQGREPIIKENTQNTAQQAEIVAVITAFEEVSQPFNLYTDSKYVTGLFPEIETATLSPRTKIYTELKHLQRLIHKRQEKFYIGHIRGHTGLPGPLAQGNAYADSLTRILTAGKRTADGSEFEKRTADGSEFESPKKKAKVE

SEQ ID NO: 3191 - protein, 2116 aa, synthetic construct
MPAAKRVKLDGGDKKYSIGLDIGTNSVGWAVITDEYKVPSKKFKVLGNTDRHSIKKNLIGALLFDSGETAEATRLKRTARRRYTRRKNRICYLQEIFSNEMAKVDDSFFHRLEESFLVEEDKKHERHPIFGNIVDEVAYHEKYPTIYHLRKKLVDSTDKADLRLIYLALAHMIKFRGHFLIEGDLNPDNSDVDKLFIQLVQTYNQLFEENPINASGVDAKAILSARLSKSRRLENLIAQLPGEKKNGLFGNLIALSLGLTPNFKSNFDLAEDAKLQLSKDTYDDDLDNLLAQIGDQYADLFLAAKNLSDAILLSDILRVNTEITKAPLSASMIKRYDEHHQDLTLLKALVRQQLPEKYKEIFFDQSKNGYAGYIDGGASQEEFYKFIKPILEKMDGTEELLVKLNREDLLRKQRTFDNGSIPHQIHLGELHAILRRQEDFYPFLKDNREKIEKILTFRIPYYVGPLARGNSRFAWMTRKSEETITPWNFEEVVDKGASAQSFIERMTNFDKNLPNEKVLPKHSLLYEYFTVYNELTKVKYVTEGMRKPAFLSGEQKKAIVDLLFKTNRKVTVKQLKEDYFKKIECFDSVEISGVEDRFNASLGTYHDLLKIIKDKDFLDNEENEDILEDIVLTLTLFEDREMIEERLKTYAHLFDDKVMKQLKRRRYTGWGRLSRKLINGIRDKQSGKTILDFLKSDGFANRNFMQLIHDDSLTFKEDIQKAQVSGQGDSLHEHIANLAGSPAIKKGILQTVKVVDELVKVMGRHKPENIVIEMARENQTTQKGQKNSRERMKRIEEGIKELGSQILKEHPVENTQLQNEKLYLYYLQNGRDMYVDQELDINRLSDYDVDHIVPQSFLKDDSIDNKVLTRSDKARGKSDNVPSEEVVKKMKNYWRQLLNAKLITQRKFDNLTKAERGGLSELDKAGFIKRQLVETRQITKHVAQILDSRMNTKYDENDKLIREVKVITLKSKLVSDFRKDFQFYKVREINNYHHAHDAYLNAVVGTALIKKYPKLESEFVYGDYKVYDVRKMIAKSEQEIGKATAKYFFYSNIMNFFKTEITLANGEIRKRPLIETNGETGEIVWDKGRDFATVRKVLSMPQVNIVKKTEVQTGGFSKESILPKRNSDKLIARKKDWDPKKYGGFDSPTVAYSVLVVAKVEKGKSKKLKSVKELLGITIMERSSFEKNPIDFLEAKGYKEVKKDLIIKLPKYSLFELENGRKRMLASAGELQKGNELALPSKYVNFLYLASHYEKLKGSPEDNEQKQLFVEQHKHYLDEIIEQISEFSKRVILADANLDKVLSAYNKHRDKPIREQAENIIHLFTLTNLGAPAAFKYFDTTIDRKRYTSTKEVLDATLIHQSITGLYETRIDLSQLGGDGGGGGEAAAKPAPGGWVQEISDSRPMLHIYLNGRRFLGLLNTGADKTCIAGRDWPANWPIHQTESSLQGLGMACGVARSSQPLRWQHEDKSGIIHPFVIPTLPFTLWGRDIMKDIKVRLMTDSPDDSQDLMIGAIESNLFADQISWKSDQPVWLNQWPLKQEKLQALQQLVTEQLQLGHLEESNSPWNTPVFVIKKKSGKWRLLQDLRAVNATMHDMGALQPGLPSPVAVPKGWEIIIIDLQDCFFNIKLHPEDCKRFAFSVPSPNFKRPYQRFQWKVLPQGMKNSPTLCQKFVDKAILTVRDKYQDSYIVHYMDDILLAHPSRSIVDEILTSMIQALNKHGLVVSTEKIQKYDNLKYLGTHIQGDSVSYQKLQIRTDKLRTLNDFQKLLGNINWIRPFLKLTTGELKPLFEILNGDSNPISTRKLTPEACKALQLMNERLSTARVKRLDLSQPWSLCILKTEYTPTACLWQDGVVEWIHLPHISPKVITPYDIFCTQLIIKGRHRSKELFSKDPDYIVVPYTKVQFDLLLQEKEDWPISLLGFLGEVHFHLPKDPLLTFTLQTAIIFPHMTSTTPLEKGIVIFTDGSANGRSVTYIQGREPIIKENTQNTAQQAEIVAVITAFEEVSQPFNLYTDSKYVTGLFPEIETATLSPRTKIYTELKHLQRLIHKRQEKFYIGHIRGHTGLPGPLAQGNAYADSLTRILTAGKRTADGSEFEKRTADGSEFESPKKKAKVE

SEQ ID NO: 3192 - protein, 2116 aa, synthetic construct
MPAAKRVKLDGGDKKYSIGLDIGTNSVGWAVITDEYKVPSKKFKVLGNTDRHSIKKNLIGALLFDSGETAEATRLKRTARRRYTRRKNRICYLQEIFSNEMAKVDDSFFHRLEESFLVEEDKKHERHPIFGNIVDEVAYHEKYPTIYHLRKKLVDSTDKADLRLIYLALAHMIKFRGHFLIEGDLNPDNSDVDKLFIQLVQTYNQLFEENPINASGVDAKAILSARLSKSRRLENLIAQLPGEKKNGLFGNLIALSLGLTPNFKSNFDLAEDAKLQLSKDTYDDDLDNLLAQIGDQYADLFLAAKNLSDAILLSDILRVNTEITKAPLSASMIKRYDEHHQDLTLLKALVRQQLPEKYKEIFFDQSKNGYAGYIDGGASQEEFYKFIKPILEKMDGTEELLVKLNREDLLRKQRTFDNGSIPHQIHLGELHAILRRQEDFYPFLKDNREKIEKILTFRIPYYVGPLARGNSRFAWMTRKSEETITPWNFEEVVDKGASAQSFIERMTNFDKNLPNEKVLPKHSLLYEYFTVYNELTKVKYVTEGMRKPAFLSGEQKKAIVDLLFKTNRKVTVKQLKEDYFKKIECFDSVEISGVEDRFNASLGTYHDLLKIIKDKDFLDNEENEDILEDIVLTLTLFEDREMIEERLKTYAHLFDDKVMKQLKRRRYTGWGRLSRKLINGIRDKQSGKTILDFLKSDGFANRNFMQLIHDDSLTFKEDIQKAQVSGQGDSLHEHIANLAGSPAIKKGILQTVKVVDELVKVMGRHKPENIVIEMARENQTTQKGQKNSRERMKRIEEGIKELGSQILKEHPVENTQLQNEKLYLYYLQNGRDMYVDQELDINRLSDYDVDHIVPQSFLKDDSIDNKVLTRSDKARGKSDNVPSEEVVKKMKNYWRQLLNAKLITQRKFDNLTKAERGGLSELDKAGFIKRQLVETRQITKHVAQILDSRMNTKYDENDKLIREVKVITLKSKLVSDFRKDFQFYKVREINNYHHAHDAYLNAVVGTALIKKYPKLESEFVYGDYKVYDVRKMIAKSEQEIGKATAKYFFYSNIMNFFKTEITLANGEIRKRPLIETNGETGEIVWDKGRDFATVRKVLSMPQVNIVKKTEVQTGGFSKESILPKRNSDKLIARKKDWDPKKYGGFDSPTVAYSVLVVAKVEKGKSKKLKSVKELLGITIMERSSFEKNPIDFLEAKGYKEVKKDLIIKLPKYSLFELENGRKRMLASAGELQKGNELALPSKYVNFLYLASHYEKLKGSPEDNEQKQLFVEQHKHYLDEIIEQISEFSKRVILADANLDKVLSAYNKHRDKPIREQAENIIHLFTLTNLGAPAAFKYFDTTIDRKRYTSTKEVLDATLIHQSITGLYETRIDLSQLGGDGGGSSEAAAKGGSGGWVQEISDSRPMLHIYLNGRRFLGLLNTGADKTCIAGRDWPANWPIHQTESSLQGLGMACGVARSSQPLRWQHEDKSGIIHPFVIPTLPFTLWGRDIMKDIKVRLMTDSPDDSQDLMIGAIESNLFADQISWKSDQPVWLNQWPLKQEKLQALQQLVTEQLQLGHLEESNSPWNTPVFVIKKKSGKWRLLQDLRAVNATMHDMGALQPGLPSPVAVPKGWEIIIIDLQDCFFNIKLHPEDCKRFAFSVPSPNFKRPYQRFQWKVLPQGMKNSPTLCQKFVDKAILTVRDKYQDSYIVHYMDDILLAHPSRSIVDEILTSMIQALNKHGLVVSTEKIQKYDNLKYLGTHIQGDSVSYQKLQIRTDKLRTLNDFQKLLGNINWIRPFLKLTTGELKPLFEILNGDSNPISTRKLTPEACKALQLMNERLSTARVKRLDLSQPWSLCILKTEYTPTACLWQDGVVEWIHLPHISPKVITPYDIFCTQLIIKGRHRSKELFSKDPDYIVVPYTKVQFDLLLQEKEDWPISLLGFLGEVHFHLPKDPLLTFTLQTAIIFPHMTSTTPLEKGIVIFTDGSANGRSVTYIQGREPIIKENTQNTAQQAEIVAVITAFEEVSQPFNLYTDSKYVTGLFPEIETATLSPRTKIYTELKHLQRLIHKRQEKFYIGHIRGHTGLPGPLAQGNAYADSLTRILTAGKRTADGSEFEKRTADGSEFESPKKKAKVE

SEQ ID NO: 3193 - protein, 2125 aa, synthetic construct
MPAAKRVKLDGGDKKYSIGLDIGTNSVGWAVITDEYKVPSKKFKVLGNTDRHSIKKNLIGALLFDSGETAEATRLKRTARRRYTRRKNRICYLQEIFSNEMAKVDDSFFHRLEESFLVEEDKKHERHPIFGNIVDEVAYHEKYPTIYHLRKKLVDSTDKADLRLIYLALAHMIKFRGHFLIEGDLNPDNSDVDKLFIQLVQTYNQLFEENPINASGVDAKAILSARLSKSRRLENLIAQLPGEKKNGLFGNLIALSLGLTPNFKSNFDLAEDAKLQLSKDTYDDDLDNLLAQIGDQYADLFLAAKNLSDAILLSDILRVNTEITKAPLSASMIKRYDEHHQDLTLLKALVRQQLPEKYKEIFFDQSKNGYAGYIDGGASQEEFYKFIKPILEKMDGTEELLVKLNREDLLRKQRTFDNGSIPHQIHLGELHAILRRQEDFYPFLKDNREKIEKILTFRIPYYVGPLARGNSRFAWMTRKSEETITPWNFEEVVDKGASAQSFIERMTNFDKNLPNEKVLPKHSLLYEYFTVYNELTKVKYVTEGMRKPAFLSGEQKKAIVDLLFKTNRKVTVKQLKEDYFKKIECFDSVEISGVEDRFNASLGTYHDLLKIIKDKDFLDNEENEDILEDIVLTLTLFEDREMIEERLKTYAHLFDDKVMKQLKRRRYTGWGRLSRKLINGIRDKQSGKTILDFLKSDGFANRNFMQLIHDDSLTFKEDIQKAQVSGQGDSLHEHIANLAGSPAIKKGILQTVKVVDELVKVMGRHKPENIVIEMARENQTTQKGQKNSRERMKRIEEGIKELGSQILKEHPVENTQLQNEKLYLYYLQNGRDMYVDQELDINRLSDYDVDHIVPQSFLKDDSIDNKVLTRSDKARGKSDNVPSEEVVKKMKNYWRQLLNAKLITQRKFDNLTKAERGGLSELDKAGFIKRQLVETRQITKHVAQILDSRMNTKYDENDKLIREVKVITLKSKLVSDFRKDFQFYKVREINNYHHAHDAYLNAVVGTALIKKYPKLESEFVYGDYKVYDVRKMIAKSEQEIGKATAKYFFYSNIMNFFKTEITLANGEIRKRPLIETNGETGEIVWDKGRDFATVRKVLSMPQVNIVKKTEVQTGGFSKESILPKRNSDKLIARKKDWDPKKYGGFDSPTVAYSVLVVAKVEKGKSKKLKSVKELLGITIMERSSFEKNPIDFLEAKGYKEVKKDLIIKLPKYSLFELENGRKRMLASAGELQKGNELALPSKYVNFLYLASHYEKLKGSPEDNEQKQLFVEQHKHYLDEIIEQISEFSKRVILADANLDKVLSAYNKHRDKPIREQAENIIHLFTLTNLGAPAAFKYFDTTIDRKRYTSTKEVLDATLIHQSITGLYETRIDLSQLGGDGGGGGGSGGGGSGGGGSGGGGSGGWVQEISDSRPMLHIYLNGRRFLGLLNTGADKTCIAGRDWPANWPIHQTESSLQGLGMACGVARSSQPLRWQHEDKSGIIHPFVIPTLPFTLWGRDIMKDIKVRLMTDSPDDSQDLMIGAIESNLFADQISWKSDQPVWLNQWPLKQEKLQALQQLVTEQLQLGHLEESNSPWNTPVFVIKKKSGKWRLLQDLRAVNATMHDMGALQPGLPSPVAVPKGWEIIIIDLQDCFFNIKLHPEDCKRFAFSVPSPNFKRPYQRFQWKVLPQGMKNSPTLCQKFVDKAILTVRDKYQDSYIVHYMDDILLAHPSRSIVDEILTSMIQALNKHGLVVSTEKIQKYDNLKYLGTHIQGDSVSYQKLQIRTDKLRTLNDFQKLLGNINWIRPFLKLTTGELKPLFEILNGDSNPISTRKLTPEACKALQLMNERLSTARVKRLDLSQPWSLCILKTEYTPTACLWQDGVVEWIHLPHISPKVITPYDIFCTQLIIKGRHRSKELFSKDPDYIVVPYTKVQFDLLLQEKEDWPISLLGFLGEVHFHLPKDPLLTFTLQTAIIFPHMTSTTPLEKGIVIFTDGSANGRSVTYIQGREPIIKENTQNTAQQAEIVAVITAFEEVSQPFNLYTDSKYVTGLFPEIETATLSPRTKIYTELKHLQRLIHKRQEKFYIGHIRGHTGLPGPLAQGNAYADSLTRILTAGKRTADGSEFEKRTADGSEFESPKKKAKVE

SEQ ID NO: 3194 - protein, 2115 aa, synthetic construct
MPAAKRVKLDGGDKKYSIGLDIGTNSVGWAVITDEYKVPSKKFKVLGNTDRHSIKKNLIGALLFDSGETAEATRLKRTARRRYTRRKNRICYLQEIFSNEMAKVDDSFFHRLEESFLVEEDKKHERHPIFGNIVDEVAYHEKYPTIYHLRKKLVDSTDKADLRLIYLALAHMIKFRGHFLIEGDLNPDNSDVDKLFIQLVQTYNQLFEENPINASGVDAKAILSARLSKSRRLENLIAQLPGEKKNGLFGNLIALSLGLTPNFKSNFDLAEDAKLQLSKDTYDDDLDNLLAQIGDQYADLFLAAKNLSDAILLSDILRVNTEITKAPLSASMIKRYDEHHQDLTLLKALVRQQLPEKYKEIFFDQSKNGYAGYIDGGASQEEFYKFIKPILEKMDGTEELLVKLNREDLLRKQRTFDNGSIPHQIHLGELHAILRRQEDFYPFLKDNREKIEKILTFRIPYYVGPLARGNSRFAWMTRKSEETITPWNFEEVVDKGASAQSFIERMTNFDKNLPNEKVLPKHSLLYEYFTVYNELTKVKYVTEGMRKPAFLSGEQKKAIVDLLFKTNRKVTVKQLKEDYFKKIECFDSVEISGVEDRFNASLGTYHDLLKIIKDKDFLDNEENEDILEDIVLTLTLFEDREMIEERLKTYAHLFDDKVMKQLKRRRYTGWGRLSRKLINGIRDKQSGKTILDFLKSDGFANRNFMQLIHDDSLTFKEDIQKAQVSGQGDSLHEHIANLAGSPAIKKGILQTVKVVDELVKVMGRHKPENIVIEMARENQTTQKGQKNSRERMKRIEEGIKELGSQILKEHPVENTQLQNEKLYLYYLQNGRDMYVDQELDINRLSDYDVDHIVPQSFLKDDSIDNKVLTRSDKARGKSDNVPSEEVVKKMKNYWRQLLNAKLITQRKFDNLTKAERGGLSELDKAGFIKRQLVETRQITKHVAQILDSRMNTKYDENDKLIREVKVITLKSKLVSDFRKDFQFYKVREINNYHHAHDAYLNAVVGTALIKKYPKLESEFVYGDYKVYDVRKMIAKSEQEIGKATAKYFFYSNIMNFFKTEITLANGEIRKRPLIETNGETGEIVWDKGRDFATVRKVLSMPQVNIVKKTEVQTGGFSKESILPKRNSDKLIARKKDWDPKKYGGFDSPTVAYSVLVVAKVEKGKSKKLKSVKELLGITIMERSSFEKNPIDFLEAKGYKEVKKDLIIKLPKYSLFELENGRKRMLASAGELQKGNELALPSKYVNFLYLASHYEKLKGSPEDNEQKQLFVEQHKHYLDEIIEQISEFSKRVILADANLDKVLSAYNKHRDKPIREQAENIIHLFTLTNLGAPAAFKYFDTTIDRKRYTSTKEVLDATLIHQSITGLYETRIDLSQLGGDGGGGGGSGGGGSGGWVQEISDSRPMLHIYLNGRRFLGLLNTGADKTCIAGRDWPANWPIHQTESSLQGLGMACGVARSSQPLRWQHEDKSGIIHPFVIPTLPFTLWGRDIMKDIKVRLMTDSPDDSQDLMIGAIESNLFADQISWKSDQPVWLNQWPLKQEKLQALQQLVTEQLQLGHLEESNSPWNTPVFVIKKKSGKWRLLQDLRAVNATMHDMGALQPGLPSPVAVPKGWEIIIIDLQDCFFNIKLHPEDCKRFAFSVPSPNFKRPYQRFQWKVLPQGMKNSPTLCQKFVDKAILTVRDKYQDSYIVHYMDDILLAHPSRSIVDEILTSMIQALNKHGLVVSTEKIQKYDNLKYLGTHIQGDSVSYQKLQIRTDKLRTLNDFQKLLGNINWIRPFLKLTTGELKPLFEILNGDSNPISTRKLTPEACKALQLMNERLSTARVKRLDLSQPWSLCILKTEYTPTACLWQDGVVEWIHLPHISPKVITPYDIFCTQLIIKGRHRSKELFSKDPDYIVVPYTKVQFDLLLQEKEDWPISLLGFLGEVHFHLPKDPLLTFTLQTAIIFPHMTSTTPLEKGIVIFTDGSANGRSVTYIQGREPIIKENTQNTAQQAEIVAVITAFEEVSQPFNLYTDSKYVTGLFPEIETATLSPRTKIYTELKHLQRLIHKRQEKFYIGHIRGHTGLPGPLAQGNAYADSLTRILTAGKRTADGSEFEKRTADGSEFESPKKKAKVE

SEQ ID NO: 3195 - protein, 2114 aa, synthetic construct
MPAAKRVKLDGGDKKYSIGLDIGTNSVGWAVITDEYKVPSKKFKVLGNTDRHSIKKNLIGALLFDSGETAEATRLKRTARRRYTRRKNRICYLQEIFSNEMAKVDDSFFHRLEESFLVEEDKKHERHPIFGNIVDEVAYHEKYPTIYHLRKKLVDSTDKADLRLIYLALAHMIKFRGHFLIEGDLNPDNSDVDKLFIQLVQTYNQLFEENPINASGVDAKAILSARLSKSRRLENLIAQLPGEKKNGLFGNLIALSLGLTPNFKSNFDLAEDAKLQLSKDTYDDDLDNLLAQIGDQYADLFLAAKNLSDAILLSDILRVNTEITKAPLSASMIKRYDEHHQDLTLLKALVRQQLPEKYKEIFFDQSKNGYAGYIDGGASQEEFYKFIKPILEKMDGTEELLVKLNREDLLRKQRTFDNGSIPHQIHLGELHAILRRQEDFYPFLKDNREKIEKILTFRIPYYVGPLARGNSRFAWMTRKSEETITPWNFEEVVDKGASAQSFIERMTNFDKNLPNEKVLPKHSLLYEYFTVYNELTKVKYVTEGMRKPAFLSGEQKKAIVDLLFKTNRKVTVKQLKEDYFKKIECFDSVEISGVEDRFNASLGTYHDLLKIIKDKDFLDNEENEDILEDIVLTLTLFEDREMIEERLKTYAHLFDDKVMKQLKRRRYTGWGRLSRKLINGIRDKQSGKTILDFLKSDGFANRNFMQLIHDDSLTFKEDIQKAQVSGQGDSLHEHIANLAGSPAIKKGILQTVKVVDELVKVMGRHKPENIVIEMARENQTTQKGQKNSRERMKRIEEGIKELGSQILKEHPVENTQLQNEKLYLYYLQNGRDMYVDQELDINRLSDYDVDHIVPQSFLKDDSIDNKVLTRSDKARGKSDNVPSEEVVKKMKNYWRQLLNAKLITQRKFDNLTKAERGGLSELDKAGFIKRQLVETRQITKHVAQILDSRMNTKYDENDKLIREVKVITLKSKLVSDFRKDFQFYKVREINNYHHAHDAYLNAVVGTALIKKYPKLESEFVYGDYKVYDVRKMIAKSEQEIGKATAKYFFYSNIMNFFKTEITLANGEIRKRPLIETNGETGEIVWDKGRDFATVRKVLSMPQVNIVKKTEVQTGGFSKESILPKRNSDKLIARKKDWDPKKYGGFDSPTVAYSVLVVAKVEKGKSKKLKSVKELLGITIMERSSFEKNPIDFLEAKGYKEVKKDLIIKLPKYSLFELENGRKRMLASAGELQKGNELALPSKYVNFLYLASHYEKLKGSPEDNEQKQLFVEQHKHYLDEIIEQISEFSKRVILADANLDKVLSAYNKHRDKPIREQAENIIHLFTLTNLGAPAAFKYFDTTIDRKRYTSTKEVLDATLIHQSITGLYETRIDLSQLGGDGGPAPGGGGSSGGWVQEISDSRPMLHIYLNGRRFLGLLNTGADKTCIAGRDWPANWPIHQTESSLQGLGMACGVARSSQPLRWQHEDKSGIIHPFVIPTLPFTLWGRDIMKDIKVRLMTDSPDDSQDLMIGAIESNLFADQISWKSDQPVWLNQWPLKQEKLQALQQLVTEQLQLGHLEESNSPWNTPVFVIKKKSGKWRLLQDLRAVNATMHDMGALQPGLPSPVAVPKGWEIIIIDLQDCFFNIKLHPEDCKRFAFSVPSPNFKRPYQRFQWKVLPQGMKNSPTLCQKFVDKAILTVRDKYQDSYIVHYMDDILLAHPSRSIVDEILTSMIQALNKHGLVVSTEKIQKYDNLKYLGTHIQGDSVSYQKLQIRTDKLRTLNDFQKLLGNINWIRPFLKLTTGELKPLFEILNGDSNPISTRKLTPEACKALQLMNERLSTARVKRLDLSQPWSLCILKTEYTPTACLWQDGVVEWIHLPHISPKVITPYDIFCTQLIIKGRHRSKELFSKDPDYIVVPYTKVQFDLLLQEKEDWPISLLGFLGEVHFHLPKDPLLTFTLQTAIIFPHMTSTTPLEKGIVIFTDGSANGRSVTYIQGREPIIKENTQNTAQQAEIVAVITAFEEVSQPFNLYTDSKYVTGLFPEIETATLSPRTKIYTELKHLQRLIHKRQEKFYIGHIRGHTGLPGPLAQGNAYADSLTRILTAGKRTADGSEFEKRTADGSEFESPKKKAKVE

SEQ ID NO: 3196 - protein, 2024 aa, synthetic construct
MPAAKRVKLDGGDKKYSIGLDIGTNSVGWAVITDEYKVPSKKFKVLGNTDRHSIKKNLIGALLFDSGETAEATRLKRTARRRYTRRKNRICYLQEIFSNEMAKVDDSFFHRLEESFLVEEDKKHERHPIFGNIVDEVAYHEKYPTIYHLRKKLVDSTDKADLRLIYLALAHMIKFRGHFLIEGDLNPDNSDVDKLFIQLVQTYNQLFEENPINASGVDAKAILSARLSKSRRLENLIAQLPGEKKNGLFGNLIALSLGLTPNFKSNFDLAEDAKLQLSKDTYDDDLDNLLAQIGDQYADLFLAAKNLSDAILLSDILRVNTEITKAPLSASMIKRYDEHHQDLTLLKALVRQQLPEKYKEIFFDQSKNGYAGYIDGGASQEEFYKFIKPILEKMDGTEELLVKLNREDLLRKQRTFDNGSIPHQIHLGELHAILRRQEDFYPFLKDNREKIEKILTFRIPYYVGPLARGNSRFAWMTRKSEETITPWNFEEVVDKGASAQSFIERMTNFDKNLPNEKVLPKHSLLYEYFTVYNELTKVKYVTEGMRKPAFLSGEQKKAIVDLLFKTNRKVTVKQLKEDYFKKIECFDSVEISGVEDRFNASLGTYHDLLKIIKDKDFLDNEENEDILEDIVLTLTLFEDREMIEERLKTYAHLFDDKVMKQLKRRRYTGWGRLSRKLINGIRDKQSGKTILDFLKSDGFANRNFMQLIHDDSLTFKEDIQKAQVSGQGDSLHEHIANLAGSPAIKKGILQTVKVVDELVKVMGRHKPENIVIEMARENQTTQKGQKNSRERMKRIEEGIKELGSQILKEHPVENTQLQNEKLYLYYLQNGRDMYVDQELDINRLSDYDVDHIVPQSFLKDDSIDNKVLTRSDKARGKSDNVPSEEVVKKMKNYWRQLLNAKLITQRKFDNLTKAERGGLSELDKAGFIKRQLVETRQITKHVAQILDSRMNTKYDENDKLIREVKVITLKSKLVSDFRKDFQFYKVREINNYHHAHDAYLNAVVGTALIKKYPKLESEFVYGDYKVYDVRKMIAKSEQEIGKATAKYFFYSNIMNFFKTEITLANGEIRKRPLIETNGETGEIVWDKGRDFATVRKVLSMPQVNIVKKTEVQTGGFSKESILPKRNSDKLIARKKDWDPKKYGGFDSPTVAYSVLVVAKVEKGKSKKLKSVKELLGITIMERSSFEKNPIDFLEAKGYKEVKKDLIIKLPKYSLFELENGRKRMLASAGELQKGNELALPSKYVNFLYLASHYEKLKGSPEDNEQKQLFVEQHKHYLDEIIEQISEFSKRVILADANLDKVLSAYNKHRDKPIREQAENIIHLFTLTNLGAPAAFKYFDTTIDRKRYTSTKEVLDATLIHQSITGLYETRIDLSQLGGDGGGGGPAPEAAAKGGGRDIMKDIKVRLMTDSPDDSQDLMIGAIESNLFADQISWKSDQPVWLNQWPLKQEKLQALQQLVTEQLQLGHLEESNSPWNTPVFVIKKKSGKWRLLQDLRAVNATMHDMGALQPGLPSPVAVPKGWEIIIIDLQDCFFNIKLHPEDCKRFAFSVPSPNFKRPYQRFQWKVLPQGMKNSPTLCQKFVDKAILTVRDKYQDSYIVHYMDDILLAHPSRSIVDEILTSMIQALNKHGLVVSTEKIQKYDNLKYLGTHIQGDSVSYQKLQIRTDKLRTLNDFQKLLGNINWIRPFLKLTTGELKPLFEILNGDSNPISTRKLTPEACKALQLMNERLSTARVKRLDLSQPWSLCILKTEYTPTACLWQDGVVEWIHLPHISPKVITPYDIFCTQLIIKGRHRSKELFSKDPDYIVVPYTKVQFDLLLQEKEDWPISLLGFLGEVHFHLPKDPLLTFTLQTAIIFPHMTSTTPLEKGIVIFTDGSANGRSVTYIQGREPIIKENTQNTAQQAEIVAVITAFEEVSQPFNLYTDSKYVTGLFPEIETATLSPRTKIYTELKHLQRLIHKRQEKFYIGHIRGHTGLPGPLAQGNAYADSLTRILTAGKRTADGSEFEKRTADGSEFESPKKKAKVE

SEQ ID NO: 3197 - protein, 2059 aa, synthetic construct
MPAAKRVKLDGGDKKYSIGLDIGTNSVGWAVITDEYKVPSKKFKVLGNTDRHSIKKNLIGALLFDSGETAEATRLKRTARRRYTRRKNRICYLQEIFSNEMAKVDDSFFHRLEESFLVEEDKKHERHPIFGNIVDEVAYHEKYPTIYHLRKKLVDSTDKADLRLIYLALAHMIKFRGHFLIEGDLNPDNSDVDKLFIQLVQTYNQLFEENPINASGVDAKAILSARLSKSRRLENLIAQLPGEKKNGLFGNLIALSLGLTPNFKSNFDLAEDAKLQLSKDTYDDDLDNLLAQIGDQYADLFLAAKNLSDAILLSDILRVNTEITKAPLSASMIKRYDEHHQDLTLLKALVRQQLPEKYKEIFFDQSKNGYAGYIDGGASQEEFYKFIKPILEKMDGTEELLVKLNREDLLRKQRTFDNGSIPHQIHLGELHAILRRQEDFYPFLKDNREKIEKILTFRIPYYVGPLARGNSRFAWMTRKSEETITPWNFEEVVDKGASAQSFIERMTNFDKNLPNEKVLPKHSLLYEYFTVYNELTKVKYVTEGMRKPAFLSGEQKKAIVDLLFKTNRKVTVKQLKEDYFKKIECFDSVEISGVEDRFNASLGTYHDLLKIIKDKDFLDNEENEDILEDIVLTLTLFEDREMIEERLKTYAHLFDDKVMKQLKRRRYTGWGRLSRKLINGIRDKQSGKTILDFLKSDGFANRNFMQLIHDDSLTFKEDIQKAQVSGQGDSLHEHIANLAGSPAIKKGILQTVKVVDELVKVMGRHKPENIVIEMARENQTTQKGQKNSRERMKRIEEGIKELGSQILKEHPVENTQLQNEKLYLYYLQNGRDMYVDQELDINRLSDYDVDHIVPQSFLKDDSIDNKVLTRSDKARGKSDNVPSEEVVKKMKNYWRQLLNAKLITQRKFDNLTKAERGGLSELDKAGFIKRQLVETRQITKHVAQILDSRMNTKYDENDKLIREVKVITLKSKLVSDFRKDFQFYKVREINNYHHAHDAYLNAVVGTALIKKYPKLESEFVYGDYKVYDVRKMIAKSEQEIGKATAKYFFYSNIMNFFKTEITLANGEIRKRPLIETNGETGEIVWDKGRDFATVRKVLSMPQVNIVKKTEVQTGGFSKESILPKRNSDKLIARKKDWDPKKYGGFDSPTVAYSVLVVAKVEKGKSKKLKSVKELLGITIMERSSFEKNPIDFLEAKGYKEVKKDLIIKLPKYSLFELENGRKRMLASAGELQKGNELALPSKYVNFLYLASHYEKLKGSPEDNEQKQLFVEQHKHYLDEIIEQISEFSKRVILADANLDKVLSAYNKHRDKPIREQAENIIHLFTLTNLGAPAAFKYFDTTIDRKRYTSTKEVLDATLIHQSITGLYETRIDLSQLGGDGGAEAAAKEAAAKEAAAKEAAAKALEAEAAAKEAAAKEAAAKEAAAKAGGGRDIMKDIKVRLMTDSPDDSQDLMIGAIESNLFADQISWKSDQPVWLNQWPLKQEKLQALQQLVTEQLQLGHLEESNSPWNTPVFVIKKKSGKWRLLQDLRAVNATMHDMGALQPGLPSPVAVPKGWEIIIIDLQDCFFNIKLHPEDCKRFAFSVPSPNFKRPYQRFQWKVLPQGMKNSPTLCQKFVDKAILTVRDKYQDSYIVHYMDDILLAHPSRSIVDEILTSMIQALNKHGLVVSTEKIQKYDNLKYLGTHIQGDSVSYQKLQIRTDKLRTLNDFQKLLGNINWIRPFLKLTTGELKPLFEILNGDSNPISTRKLTPEACKALQLMNERLSTARVKRLDLSQPWSLCILKTEYTPTACLWQDGVVEWIHLPHISPKVITPYDIFCTQLIIKGRHRSKELFSKDPDYIVVPYTKVQFDLLLQEKEDWPISLLGFLGEVHFHLPKDPLLTFTLQTAIIFPHMTSTTPLEKGIVIFTDGSANGRSVTYIQGREPIIKENTQNTAQQAEIVAVITAFEEVSQPFNLYTDSKYVTGLFPEIETATLSPRTKIYTELKHLQRLIHKRQEKFYIGHIRGHTGLPGPLAQGNAYADSLTRILTAGKRTADGSEFEKRTADGSEFESPKKKAKVE

SEQ ID NO: 3198 - protein, 2024 aa, synthetic construct
MPAAKRVKLDGGDKKYSIGLDIGTNSVGWAVITDEYKVPSKKFKVLGNTDRHSIKKNLIGALLFDSGETAEATRLKRTARRRYTRRKNRICYLQEIFSNEMAKVDDSFFHRLEESFLVEEDKKHERHPIFGNIVDEVAYHEKYPTIYHLRKKLVDSTDKADLRLIYLALAHMIKFRGHFLIEGDLNPDNSDVDKLFIQLVQTYNQLFEENPINASGVDAKAILSARLSKSRRLENLIAQLPGEKKNGLFGNLIALSLGLTPNFKSNFDLAEDAKLQLSKDTYDDDLDNLLAQIGDQYADLFLAAKNLSDAILLSDILRVNTEITKAPLSASMIKRYDEHHQDLTLLKALVRQQLPEKYKEIFFDQSKNGYAGYIDGGASQEEFYKFIKPILEKMDGTEELLVKLNREDLLRKQRTFDNGSIPHQIHLGELHAILRRQEDFYPFLKDNREKIEKILTFRIPYYVGPLARGNSRFAWMTRKSEETITPWNFEEVVDKGASAQSFIERMTNFDKNLPNEKVLPKHSLLYEYFTVYNELTKVKYVTEGMRKPAFLSGEQKKAIVDLLFKTNRKVTVKQLKEDYFKKIECFDSVEISGVEDRFNASLGTYHDLLKIIKDKDFLDNEENEDILEDIVLTLTLFEDREMIEERLKTYAHLFDDKVMKQLKRRRYTGWGRLSRKLINGIRDKQSGKTILDFLKSDGFANRNFMQLIHDDSLTFKEDIQKAQVSGQGDSLHEHIANLAGSPAIKKGILQTVKVVDELVKVMGRHKPENIVIEMARENQTTQKGQKNSRERMKRIEEGIKELGSQILKEHPVENTQLQNEKLYLYYLQNGRDMYVDQELDINRLSDYDVDHIVPQSFLKDDSIDNKVLTRSDKARGKSDNVPSEEVVKKMKNYWRQLLNAKLITQRKFDNLTKAERGGLSELDKAGFIKRQLVETRQITKHVAQILDSRMNTKYDENDKLIREVKVITLKSKLVSDFRKDFQFYKVREINNYHHAHDAYLNAVVGTALIKKYPKLESEFVYGDYKVYDVRKMIAKSEQEIGKATAKYFFYSNIMNFFKTEITLANGEIRKRPLIETNGETGEIVWDKGRDFATVRKVLSMPQVNIVKKTEVQTGGFSKESILPKRNSDKLIARKKDWDPKKYGGFDSPTVAYSVLVVAKVEKGKSKKLKSVKELLGITIMERSSFEKNPIDFLEAKGYKEVKKDLIIKLPKYSLFELENGRKRMLASAGELQKGNELALPSKYVNFLYLASHYEKLKGSPEDNEQKQLFVEQHKHYLDEIIEQISEFSKRVILADANLDKVLSAYNKHRDKPIREQAENIIHLFTLTNLGAPAAFKYFDTTIDRKRYTSTKEVLDATLIHQSITGLYETRIDLSQLGGDGGPAPGSSEAAAKGGGRDIMKDIKVRLMTDSPDDSQDLMIGAIESNLFADQISWKSDQPVWLNQWPLKQEKLQALQQLVTEQLQLGHLEESNSPWNTPVFVIKKKSGKWRLLQDLRAVNATMHDMGALQPGLPSPVAVPKGWEIIIIDLQDCFFNIKLHPEDCKRFAFSVPSPNFKRPYQRFQWKVLPQGMKNSPTLCQKFVDKAILTVRDKYQDSYIVHYMDDILLAHPSRSIVDEILTSMIQALNKHGLVVSTEKIQKYDNLKYLGTHIQGDSVSYQKLQIRTDKLRTLNDFQKLLGNINWIRPFLKLTTGELKPLFEILNGDSNPISTRKLTPEACKALQLMNERLSTARVKRLDLSQPWSLCILKTEYTPTACLWQDGVVEWIHLPHISPKVITPYDIFCTQLIIKGRHRSKELFSKDPDYIVVPYTKVQFDLLLQEKEDWPISLLGFLGEVHFHLPKDPLLTFTLQTAIIFPHMTSTTPLEKGIVIFTDGSANGRSVTYIQGREPIIKENTQNTAQQAEIVAVITAFEEVSQPFNLYTDSKYVTGLFPEIETATLSPRTKIYTELKHLQRLIHKRQEKFYIGHIRGHTGLPGPLAQGNAYADSLTRILTAGKRTADGSEFEKRTADGSEFESPKKKAKVE

SEQ ID NO: 3199 - protein, 2022 aa, synthetic construct
MPAAKRVKLDGGDKKYSIGLDIGTNSVGWAVITDEYKVPSKKFKVLGNTDRHSIKKNLIGALLFDSGETAEATRLKRTARRRYTRRKNRICYLQEIFSNEMAKVDDSFFHRLEESFLVEEDKKHERHPIFGNIVDEVAYHEKYPTIYHLRKKLVDSTDKADLRLIYLALAHMIKFRGHFLIEGDLNPDNSDVDKLFIQLVQTYNQLFEENPINASGVDAKAILSARLSKSRRLENLIAQLPGEKKNGLFGNLIALSLGLTPNFKSNFDLAEDAKLQLSKDTYDDDLDNLLAQIGDQYADLFLAAKNLSDAILLSDILRVNTEITKAPLSASMIKRYDEHHQDLTLLKALVRQQLPEKYKEIFFDQSKNGYAGYIDGGASQEEFYKFIKPILEKMDGTEELLVKLNREDLLRKQRTFDNGSIPHQIHLGELHAILRRQEDFYPFLKDNREKIEKILTFRIPYYVGPLARGNSRFAWMTRKSEETITPWNFEEVVDKGASAQSFIERMTNFDKNLPNEKVLPKHSLLYEYFTVYNELTKVKYVTEGMRKPAFLSGEQKKAIVDLLFKTNRKVTVKQLKEDYFKKIECFDSVEISGVEDRFNASLGTYHDLLKIIKDKDFLDNEENEDILEDIVLTLTLFEDREMIEERLKTYAHLFDDKVMKQLKRRRYTGWGRLSRKLINGIRDKQSGKTILDFLKSDGFANRNFMQLIHDDSLTFKEDIQKAQVSGQGDSLHEHIANLAGSPAIKKGILQTVKVVDELVKVMGRHKPENIVIEMARENQTTQKGQKNSRERMKRIEEGIKELGSQILKEHPVENTQLQNEKLYLYYLQNGRDMYVDQELDINRLSDYDVDHIVPQSFLKDDSIDNKVLTRSDKARGKSDNVPSEEVVKKMKNYWRQLLNAKLITQRKFDNLTKAERGGLSELDKAGFIKRQLVETRQITKHVAQILDSRMNTKYDENDKLIREVKVITLKSKLVSDFRKDFQFYKVREINNYHHAHDAYLNAVVGTALIKKYPKLESEFVYGDYKVYDVRKMIAKSEQEIGKATAKYFFYSNIMNFFKTEITLANGEIRKRPLIETNGETGEIVWDKGRDFATVRKVLSMPQVNIVKKTEVQTGGFSKESILPKRNSDKLIARKKDWDPKKYGGFDSPTVAYSVLVVAKVEKGKSKKLKSVKELLGITIMERSSFEKNPIDFLEAKGYKEVKKDLIIKLPKYSLFELENGRKRMLASAGELQKGNELALPSKYVNFLYLASHYEKLKGSPEDNEQKQLFVEQHKHYLDEIIEQISEFSKRVILADANLDKVLSAYNKHRDKPIREQAENIIHLFTLTNLGAPAAFKYFDTTIDRKRYTSTKEVLDATLIHQSITGLYETRIDLSQLGGDGGGGSGGGGSSGGGRDIMKDIKVRLMTDSPDDSQDLMIGAIESNLFADQISWKSDQPVWLNQWPLKQEKLQALQQLVTEQLQLGHLEESNSPWNTPVFVIKKKSGKWRLLQDLRAVNATMHDMGALQPGLPSPVAVPKGWEIIIIDLQDCFFNIKLHPEDCKRFAFSVPSPNFKRPYQRFQWKVLPQGMKNSPTLCQKFVDKAILTVRDKYQDSYIVHYMDDILLAHPSRSIVDEILTSMIQALNKHGLVVSTEKIQKYDNLKYLGTHIQGDSVSYQKLQIRTDKLRTLNDFQKLLGNINWIRPFLKLTTGELKPLFEILNGDSNPISTRKLTPEACKALQLMNERLSTARVKRLDLSQPWSLCILKTEYTPTACLWQDGVVEWIHLPHISPKVITPYDIFCTQLIIKGRHRSKELFSKDPDYIVVPYTKVQFDLLLQEKEDWPISLLGFLGEVHFHLPKDPLLTFTLQTAIIFPHMTSTTPLEKGIVIFTDGSANGRSVTYIQGREPIIKENTQNTAQQAEIVAVITAFEEVSQPFNLYTDSKYVTGLFPEIETATLSPRTKIYTELKHLQRLIHKRQEKFYIGHIRGHTGLPGPLAQGNAYADSLTRILTAGKRTADGSEFEKRTADGSEFESPKKKAKVE

SEQ ID NO: 3200 - protein, 2024 aa, synthetic construct
MPAAKRVKLDGGDKKYSIGLDIGTNSVGWAVITDEYKVPSKKFKVLGNTDRHSIKKNLIGALLFDSGETAEATRLKRTARRRYTRRKNRICYLQEIFSNEMAKVDDSFFHRLEESFLVEEDKKHERHPIFGNIVDEVAYHEKYPTIYHLRKKLVDSTDKADLRLIYLALAHMIKFRGHFLIEGDLNPDNSDVDKLFIQLVQTYNQLFEENPINASGVDAKAILSARLSKSRRLENLIAQLPGEKKNGLFGNLIALSLGLTPNFKSNFDLAEDAKLQLSKDTYDDDLDNLLAQIGDQYADLFLAAKNLSDAILLSDILRVNTEITKAPLSASMIKRYDEHHQDLTLLKALVRQQLPEKYKEIFFDQSKNGYAGYIDGGASQEEFYKFIKPILEKMDGTEELLVKLNREDLLRKQRTFDNGSIPHQIHLGELHAILRRQEDFYPFLKDNREKIEKILTFRIPYYVGPLARGNSRFAWMTRKSEETITPWNFEEVVDKGASAQSFIERMTNFDKNLPNEKVLPKHSLLYEYFTVYNELTKVKYVTEGMRKPAFLSGEQKKAIVDLLFKTNRKVTVKQLKEDYFKKIECFDSVEISGVEDRFNASLGTYHDLLKIIKDKDFLDNEENEDILEDIVLTLTLFEDREMIEERLKTYAHLFDDKVMKQLKRRRYTGWGRLSRKLINGIRDKQSGKTILDFLKSDGFANRNFMQLIHDDSLTFKEDIQKAQVSGQGDSLHEHIANLAGSPAIKKGILQTVKVVDELVKVMGRHKPENIVIEMARENQTTQKGQKNSRERMKRIEEGIKELGSQILKEHPVENTQLQNEKLYLYYLQNGRDMYVDQELDINRLSDYDVDHIVPQSFLKDDSIDNKVLTRSDKARGKSDNVPSEEVVKKMKNYWRQLLNAKLITQRKFDNLTKAERGGLSELDKAGFIKRQLVETRQITKHVAQILDSRMNTKYDENDKLIREVKVITLKSKLVSDFRKDFQFYKVREINNYHHAHDAYLNAVVGTALIKKYPKLESEFVYGDYKVYDVRKMIAKSEQEIGKATAKYFFYSNIMNFFKTEITLANGEIRKRPLIETNGETGEIVWDKGRDFATVRKVLSMPQVNIVKKTEVQTGGFSKESILPKRNSDKLIARKKDWDPKKYGGFDSPTVAYSVLVVAKVEKGKSKKLKSVKELLGITIMERSSFEKNPIDFLEAKGYKEVKKDLIIKLPKYSLFELENGRKRMLASAGELQKGNELALPSKYVNFLYLASHYEKLKGSPEDNEQKQLFVEQHKHYLDEIIEQISEFSKRVILADANLDKVLSAYNKHRDKPIREQAENIIHLFTLTNLGAPAAFKYFDTTIDRKRYTSTKEVLDATLIHQSITGLYETRIDLSQLGGDGGPAPEAAAKGGGGGGRDIMKDIKVRLMTDSPDDSQDLMIGAIESNLFADQISWKSDQPVWLNQWPLKQEKLQALQQLVTEQLQLGHLEESNSPWNTPVFVIKKKSGKWRLLQDLRAVNATMHDMGALQPGLPSPVAVPKGWEIIIIDLQDCFFNIKLHPEDCKRFAFSVPSPNFKRPYQRFQWKVLPQGMKNSPTLCQKFVDKAILTVRDKYQDSYIVHYMDDILLAHPSRSIVDEILTSMIQALNKHGLVVSTEKIQKYDNLKYLGTHIQGDSVSYQKLQIRTDKLRTLNDFQKLLGNINWIRPFLKLTTGELKPLFEILNGDSNPISTRKLTPEACKALQLMNERLSTARVKRLDLSQPWSLCILKTEYTPTACLWQDGVVEWIHLPHISPKVITPYDIFCTQLIIKGRHRSKELFSKDPDYIVVPYTKVQFDLLLQEKEDWPISLLGFLGEVHFHLPKDPLLTFTLQTAIIFPHMTSTTPLEKGIVIFTDGSANGRSVTYIQGREPIIKENTQNTAQQAEIVAVITAFEEVSQPFNLYTDSKYVTGLFPEIETATLSPRTKIYTELKHLQRLIHKRQEKFYIGHIRGHTGLPGPLAQGNAYADSLTRILTAGKRTADGSEFEKRTADGSEFESPKKKAKVE

SEQ ID NO: 3201 - protein, 2028 aa, synthetic construct
MPAAKRVKLDGGDKKYSIGLDIGTNSVGWAVITDEYKVPSKKFKVLGNTDRHSIKKNLIGALLFDSGETAEATRLKRTARRRYTRRKNRICYLQEIFSNEMAKVDDSFFHRLEESFLVEEDKKHERHPIFGNIVDEVAYHEKYPTIYHLRKKLVDSTDKADLRLIYLALAHMIKFRGHFLIEGDLNPDNSDVDKLFIQLVQTYNQLFEENPINASGVDAKAILSARLSKSRRLENLIAQLPGEKKNGLFGNLIALSLGLTPNFKSNFDLAEDAKLQLSKDTYDDDLDNLLAQIGDQYADLFLAAKNLSDAILLSDILRVNTEITKAPLSASMIKRYDEHHQDLTLLKALVRQQLPEKYKEIFFDQSKNGYAGYIDGGASQEEFYKFIKPILEKMDGTEELLVKLNREDLLRKQRTFDNGSIPHQIHLGELHAILRRQEDFYPFLKDNREKIEKILTFRIPYYVGPLARGNSRFAWMTRKSEETITPWNFEEVVDKGASAQSFIERMTNFDKNLPNEKVLPKHSLLYEYFTVYNELTKVKYVTEGMRKPAFLSGEQKKAIVDLLFKTNRKVTVKQLKEDYFKKIECFDSVEISGVEDRFNASLGTYHDLLKIIKDKDFLDNEENEDILEDIVLTLTLFEDREMIEERLKTYAHLFDDKVMKQLKRRRYTGWGRLSRKLINGIRDKQSGKTILDFLKSDGFANRNFMQLIHDDSLTFKEDIQKAQVSGQGDSLHEHIANLAGSPAIKKGILQTVKVVDELVKVMGRHKPENIVIEMARENQTTQKGQKNSRERMKRIEEGIKELGSQILKEHPVENTQLQNEKLYLYYLQNGRDMYVDQELDINRLSDYDVDHIVPQSFLKDDSIDNKVLTRSDKARGKSDNVPSEEVVKKMKNYWRQLLNAKLITQRKFDNLTKAERGGLSELDKAGFIKRQLVETRQITKHVAQILDSRMNTKYDENDKLIREVKVITLKSKLVSDFRKDFQFYKVREINNYHHAHDAYLNAVVGTALIKKYPKLESEFVYGDYKVYDVRKMIAKSEQEIGKATAKYFFYSNIMNFFKTEITLANGEIRKRPLIETNGETGEIVWDKGRDFATVRKVLSMPQVNIVKKTEVQTGGFSKESILPKRNSDKLIARKKDWDPKKYGGFDSPTVAYSVLVVAKVEKGKSKKLKSVKELLGITIMERSSFEKNPIDFLEAKGYKEVKKDLIIKLPKYSLFELENGRKRMLASAGELQKGNELALPSKYVNFLYLASHYEKLKGSPEDNEQKQLFVEQHKHYLDEIIEQISEFSKRVILADANLDKVLSAYNKHRDKPIREQAENIIHLFTLTNLGAPAAFKYFDTTIDRKRYTSTKEVLDATLIHQSITGLYETRIDLSQLGGDGGEAAAKGGGGSEAAAKGGGRDIMKDIKVRLMTDSPDDSQDLMIGAIESNLFADQISWKSDQPVWLNQWPLKQEKLQALQQLVTEQLQLGHLEESNSPWNTPVFVIKKKSGKWRLLQDLRAVNATMHDMGALQPGLPSPVAVPKGWEIIIIDLQDCFFNIKLHPEDCKRFAFSVPSPNFKRPYQRFQWKVLPQGMKNSPTLCQKFVDKAILTVRDKYQDSYIVHYMDDILLAHPSRSIVDEILTSMIQALNKHGLVVSTEKIQKYDNLKYLGTHIQGDSVSYQKLQIRTDKLRTLNDFQKLLGNINWIRPFLKLTTGELKPLFEILNGDSNPISTRKLTPEACKALQLMNERLSTARVKRLDLSQPWSLCILKTEYTPTACLWQDGVVEWIHLPHISPKVITPYDIFCTQLIIKGRHRSKELFSKDPDYIVVPYTKVQFDLLLQEKEDWPISLLGFLGEVHFHLPKDPLLTFTLQTAIIFPHMTSTTPLEKGIVIFTDGSANGRSVTYIQGREPIIKENTQNTAQQAEIVAVITAFEEVSQPFNLYTDSKYVTGLFPEIETATLSPRTKIYTELKHLQRLIHKRQEKFYIGHIRGHTGLPGPLAQGNAYADSLTRILTAGKRTADGSEFEKRTADGSEFESPKKKAKVE

SEQ ID NO: 3202 - protein, 2019 aa, synthetic construct
MPAAKRVKLDGGDKKYSIGLDIGTNSVGWAVITDEYKVPSKKFKVLGNTDRHSIKKNLIGALLFDSGETAEATRLKRTARRRYTRRKNRICYLQEIFSNEMAKVDDSFFHRLEESFLVEEDKKHERHPIFGNIVDEVAYHEKYPTIYHLRKKLVDSTDKADLRLIYLALAHMIKFRGHFLIEGDLNPDNSDVDKLFIQLVQTYNQLFEENPINASGVDAKAILSARLSKSRRLENLIAQLPGEKKNGLFGNLIALSLGLTPNFKSNFDLAEDAKLQLSKDTYDDDLDNLLAQIGDQYADLFLAAKNLSDAILLSDILRVNTEITKAPLSASMIKRYDEHHQDLTLLKALVRQQLPEKYKEIFFDQSKNGYAGYIDGGASQEEFYKFIKPILEKMDGTEELLVKLNREDLLRKQRTFDNGSIPHQIHLGELHAILRRQEDFYPFLKDNREKIEKILTFRIPYYVGPLARGNSRFAWMTRKSEETITPWNFEEVVDKGASAQSFIERMTNFDKNLPNEKVLPKHSLLYEYFTVYNELTKVKYVTEGMRKPAFLSGEQKKAIVDLLFKTNRKVTVKQLKEDYFKKIECFDSVEISGVEDRFNASLGTYHDLLKIIKDKDFLDNEENEDILEDIVLTLTLFEDREMIEERLKTYAHLFDDKVMKQLKRRRYTGWGRLSRKLINGIRDKQSGKTILDFLKSDGFANRNFMQLIHDDSLTFKEDIQKAQVSGQGDSLHEHIANLAGSPAIKKGILQTVKVVDELVKVMGRHKPENIVIEMARENQTTQKGQKNSRERMKRIEEGIKELGSQILKEHPVENTQLQNEKLYLYYLQNGRDMYVDQELDINRLSDYDVDHIVPQSFLKDDSIDNKVLTRSDKARGKSDNVPSEEVVKKMKNYWRQLLNAKLITQRKFDNLTKAERGGLSELDKAGFIKRQLVETRQITKHVAQILDSRMNTKYDENDKLIREVKVITLKSKLVSDFRKDFQFYKVREINNYHHAHDAYLNAVVGTALIKKYPKLESEFVYGDYKVYDVRKMIAKSEQEIGKATAKYFFYSNIMNFFKTEITLANGEIRKRPLIETNGETGEIVWDKGRDFATVRKVLSMPQVNIVKKTEVQTGGFSKESILPKRNSDKLIARKKDWDPKKYGGFDSPTVAYSVLVVAKVEKGKSKKLKSVKELLGITIMERSSFEKNPIDFLEAKGYKEVKKDLIIKLPKYSLFELENGRKRMLASAGELQKGNELALPSKYVNFLYLASHYEKLKGSPEDNEQKQLFVEQHKHYLDEIIEQISEFSKRVILADANLDKVLSAYNKHRDKPIREQAENIIHLFTLTNLGAPAAFKYFDTTIDRKRYTSTKEVLDATLIHQSITGLYETRIDLSQLGGDGGGGGPAPGGGRDIMKDIKVRLMTDSPDDSQDLMIGAIESNLFADQISWKSDQPVWLNQWPLKQEKLQALQQLVTEQLQLGHLEESNSPWNTPVFVIKKKSGKWRLLQDLRAVNATMHDMGALQPGLPSPVAVPKGWEIIIIDLQDCFFNIKLHPEDCKRFAFSVPSPNFKRPYQRFQWKVLPQGMKNSPTLCQKFVDKAILTVRDKYQDSYIVHYMDDILLAHPSRSIVDEILTSMIQALNKHGLVVSTEKIQKYDNLKYLGTHIQGDSVSYQKLQIRTDKLRTLNDFQKLLGNINWIRPFLKLTTGELKPLFEILNGDSNPISTRKLTPEACKALQLMNERLSTARVKRLDLSQPWSLCILKTEYTPTACLWQDGVVEWIHLPHISPKVITPYDIFCTQLIIKGRHRSKELFSKDPDYIVVPYTKVQFDLLLQEKEDWPISLLGFLGEVHFHLPKDPLLTFTLQTAIIFPHMTSTTPLEKGIVIFTDGSANGRSVTYIQGREPIIKENTQNTAQQAEIVAVITAFEEVSQPFNLYTDSKYVTGLFPEIETATLSPRTKIYTELKHLQRLIHKRQEKFYIGHIRGHTGLPGPLAQGNAYADSLTRILTAGKRTADGSEFEKRTADGSEFESPKKKAKVE

SEQ ID NO: 3203 - protein, 2028 aa, synthetic construct
MPAAKRVKLDGGDKKYSIGLDIGTNSVGWAVITDEYKVPSKKFKVLGNTDRHSIKKNLIGALLFDSGETAEATRLKRTARRRYTRRKNRICYLQEIFSNEMAKVDDSFFHRLEESFLVEEDKKHERHPIFGNIVDEVAYHEKYPTIYHLRKKLVDSTDKADLRLIYLALAHMIKFRGHFLIEGDLNPDNSDVDKLFIQLVQTYNQLFEENPINASGVDAKAILSARLSKSRRLENLIAQLPGEKKNGLFGNLIALSLGLTPNFKSNFDLAEDAKLQLSKDTYDDDLDNLLAQIGDQYADLFLAAKNLSDAILLSDILRVNTEITKAPLSASMIKRYDEHHQDLTLLKALVRQQLPEKYKEIFFDQSKNGYAGYIDGGASQEEFYKFIKPILEKMDGTEELLVKLNREDLLRKQRTFDNGSIPHQIHLGELHAILRRQEDFYPFLKDNREKIEKILTFRIPYYVGPLARGNSRFAWMTRKSEETITPWNFEEVVDKGASAQSFIERMTNFDKNLPNEKVLPKHSLLYEYFTVYNELTKVKYVTEGMRKPAFLSGEQKKAIVDLLFKTNRKVTVKQLKEDYFKKIECFDSVEISGVEDRFNASLGTYHDLLKIIKDKDFLDNEENEDILEDIVLTLTLFEDREMIEERLKTYAHLFDDKVMKQLKRRRYTGWGRLSRKLINGIRDKQSGKTILDFLKSDGFANRNFMQLIHDDSLTFKEDIQKAQVSGQGDSLHEHIANLAGSPAIKKGILQTVKVVDELVKVMGRHKPENIVIEMARENQTTQKGQKNSRERMKRIEEGIKELGSQILKEHPVENTQLQNEKLYLYYLQNGRDMYVDQELDINRLSDYDVDHIVPQSFLKDDSIDNKVLTRSDKARGKSDNVPSEEVVKKMKNYWRQLLNAKLITQRKFDNLTKAERGGLSELDKAGFIKRQLVETRQITKHVAQILDSRMNTKYDENDKLIREVKVITLKSKLVSDFRKDFQFYKVREINNYHHAHDAYLNAVVGTALIKKYPKLESEFVYGDYKVYDVRKMIAKSEQEIGKATAKYFFYSNIMNFFKTEITLANGEIRKRPLIETNGETGEIVWDKGRDFATVRKVLSMPQVNIVKKTEVQTGGFSKESILPKRNSDKLIARKKDWDPKKYGGFDSPTVAYSVLVVAKVEKGKSKKLKSVKELLGITIMERSSFEKNPIDFLEAKGYKEVKKDLIIKLPKYSLFELENGRKRMLASAGELQKGNELALPSKYVNFLYLASHYEKLKGSPEDNEQKQLFVEQHKHYLDEIIEQISEFSKRVILADANLDKVLSAYNKHRDKPIREQAENIIHLFTLTNLGAPAAFKYFDTTIDRKRYTSTKEVLDATLIHQSITGLYETRIDLSQLGGDGGGGGGSGGGGSGGGGSGGGRDIMKDIKVRLMTDSPDDSQDLMIGAIESNLFADQISWKSDQPVWLNQWPLKQEKLQALQQLVTEQLQLGHLEESNSPWNTPVFVIKKKSGKWRLLQDLRAVNATMHDMGALQPGLPSPVAVPKGWEIIIIDLQDCFFNIKLHPEDCKRFAFSVPSPNFKRPYQRFQWKVLPQGMKNSPTLCQKFVDKAILTVRDKYQDSYIVHYMDDILLAHPSRSIVDEILTSMIQALNKHGLVVSTEKIQKYDNLKYLGTHIQGDSVSYQKLQIRTDKLRTLNDFQKLLGNINWIRPFLKLTTGELKPLFEILNGDSNPISTRKLTPEACKALQLMNERLSTARVKRLDLSQPWSLCILKTEYTPTACLWQDGVVEWIHLPHISPKVITPYDIFCTQLIIKGRHRSKELFSKDPDYIVVPYTKVQFDLLLQEKEDWPISLLGFLGEVHFHLPKDPLLTFTLQTAIIFPHMTSTTPLEKGIVIFTDGSANGRSVTYIQGREPIIKENTQNTAQQAEIVAVITAFEEVSQPFNLYTDSKYVTGLFPEIETATLSPRTKIYTELKHLQRLIHKRQEKFYIGHIRGHTGLPGPLAQGNAYADSLTRILTAGKRTADGSEFEKRTADGSEFESPKKKAKVE

SEQ ID NO: 3204 - protein, 2022 aa, synthetic construct
MPAAKRVKLDGGDKKYSIGLDIGTNSVGWAVITDEYKVPSKKFKVLGNTDRHSIKKNLIGALLFDSGETAEATRLKRTARRRYTRRKNRICYLQEIFSNEMAKVDDSFFHRLEESFLVEEDKKHERHPIFGNIVDEVAYHEKYPTIYHLRKKLVDSTDKADLRLIYLALAHMIKFRGHFLIEGDLNPDNSDVDKLFIQLVQTYNQLFEENPINASGVDAKAILSARLSKSRRLENLIAQLPGEKKNGLFGNLIALSLGLTPNFKSNFDLAEDAKLQLSKDTYDDDLDNLLAQIGDQYADLFLAAKNLSDAILLSDILRVNTEITKAPLSASMIKRYDEHHQDLTLLKALVRQQLPEKYKEIFFDQSKNGYAGYIDGGASQEEFYKFIKPILEKMDGTEELLVKLNREDLLRKQRTFDNGSIPHQIHLGELHAILRRQEDFYPFLKDNREKIEKILTFRIPYYVGPLARGNSRFAWMTRKSEETITPWNFEEVVDKGASAQSFIERMTNFDKNLPNEKVLPKHSLLYEYFTVYNELTKVKYVTEGMRKPAFLSGEQKKAIVDLLFKTNRKVTVKQLKEDYFKKIECFDSVEISGVEDRFNASLGTYHDLLKIIKDKDFLDNEENEDILEDIVLTLTLFEDREMIEERLKTYAHLFDDKVMKQLKRRRYTGWGRLSRKLINGIRDKQSGKTILDFLKSDGFANRNFMQLIHDDSLTFKEDIQKAQVSGQGDSLHEHIANLAGSPAIKKGILQTVKVVDELVKVMGRHKPENIVIEMARENQTTQKGQKNSRERMKRIEEGIKELGSQILKEHPVENTQLQNEKLYLYYLQNGRDMYVDQELDINRLSDYDVDHIVPQSFLKDDSIDNKVLTRSDKARGKSDNVPSEEVVKKMKNYWRQLLNAKLITQRKFDNLTKAERGGLSELDKAGFIKRQLVETRQITKHVAQILDSRMNTKYDENDKLIREVKVITLKSKLVSDFRKDFQFYKVREINNYHHAHDAYLNAVVGTALIKKYPKLESEFVYGDYKVYDVRKMIAKSEQEIGKATAKYFFYSNIMNFFKTEITLANGEIRKRPLIETNGETGEIVWDKGRDFATVRKVLSMPQVNIVKKTEVQTGGFSKESILPKRNSDKLIARKKDWDPKKYGGFDSPTVAYSVLVVAKVEKGKSKKLKSVKELLGITIMERSSFEKNPIDFLEAKGYKEVKKDLIIKLPKYSLFELENGRKRMLASAGELQKGNELALPSKYVNFLYLASHYEKLKGSPEDNEQKQLFVEQHKHYLDEIIEQISEFSKRVILADANLDKVLSAYNKHRDKPIREQAENIIHLFTLTNLGAPAAFKYFDTTIDRKRYTSTKEVLDATLIHQSITGLYETRIDLSQLGGDGGGSSGGGPAPGGGRDIMKDIKVRLMTDSPDDSQDLMIGAIESNLFADQISWKSDQPVWLNQWPLKQEKLQALQQLVTEQLQLGHLEESNSPWNTPVFVIKKKSGKWRLLQDLRAVNATMHDMGALQPGLPSPVAVPKGWEIIIIDLQDCFFNIKLHPEDCKRFAFSVPSPNFKRPYQRFQWKVLPQGMKNSPTLCQKFVDKAILTVRDKYQDSYIVHYMDDILLAHPSRSIVDEILTSMIQALNKHGLVVSTEKIQKYDNLKYLGTHIQGDSVSYQKLQIRTDKLRTLNDFQKLLGNINWIRPFLKLTTGELKPLFEILNGDSNPISTRKLTPEACKALQLMNERLSTARVKRLDLSQPWSLCILKTEYTPTACLWQDGVVEWIHLPHISPKVITPYDIFCTQLIIKGRHRSKELFSKDPDYIVVPYTKVQFDLLLQEKEDWPISLLGFLGEVHFHLPKDPLLTFTLQTAIIFPHMTSTTPLEKGIVIFTDGSANGRSVTYIQGREPIIKENTQNTAQQAEIVAVITAFEEVSQPFNLYTDSKYVTGLFPEIETATLSPRTKIYTELKHLQRLIHKRQEKFYIGHIRGHTGLPGPLAQGNAYADSLTRILTAGKRTADGSEFEKRTADGSEFESPKKKAKVE

SEQ ID NO: 3205 - protein, 2022 aa, synthetic construct
MPAAKRVKLDGGDKKYSIGLDIGTNSVGWAVITDEYKVPSKKFKVLGNTDRHSIKKNLIGALLFDSGETAEATRLKRTARRRYTRRKNRICYLQEIFSNEMAKVDDSFFHRLEESFLVEEDKKHERHPIFGNIVDEVAYHEKYPTIYHLRKKLVDSTDKADLRLIYLALAHMIKFRGHFLIEGDLNPDNSDVDKLFIQLVQTYNQLFEENPINASGVDAKAILSARLSKSRRLENLIAQLPGEKKNGLFGNLIALSLGLTPNFKSNFDLAEDAKLQLSKDTYDDDLDNLLAQIGDQYADLFLAAKNLSDAILLSDILRVNTEITKAPLSASMIKRYDEHHQDLTLLKALVRQQLPEKYKEIFFDQSKNGYAGYIDGGASQEEFYKFIKPILEKMDGTEELLVKLNREDLLRKQRTFDNGSIPHQIHLGELHAILRRQEDFYPFLKDNREKIEKILTFRIPYYVGPLARGNSRFAWMTRKSEETITPWNFEEVVDKGASAQSFIERMTNFDKNLPNEKVLPKHSLLYEYFTVYNELTKVKYVTEGMRKPAFLSGEQKKAIVDLLFKTNRKVTVKQLKEDYFKKIECFDSVEISGVEDRFNASLGTYHDLLKIIKDKDFLDNEENEDILEDIVLTLTLFEDREMIEERLKTYAHLFDDKVMKQLKRRRYTGWGRLSRKLINGIRDKQSGKTILDFLKSDGFANRNFMQLIHDDSLTFKEDIQKAQVSGQGDSLHEHIANLAGSPAIKKGILQTVKVVDELVKVMGRHKPENIVIEMARENQTTQKGQKNSRERMKRIEEGIKELGSQILKEHPVENTQLQNEKLYLYYLQNGRDMYVDQELDINRLSDYDVDHIVPQSFLKDDSIDNKVLTRSDKARGKSDNVPSEEVVKKMKNYWRQLLNAKLITQRKFDNLTKAERGGLSELDKAGFIKRQLVETRQITKHVAQILDSRMNTKYDENDKLIREVKVITLKSKLVSDFRKDFQFYKVREINNYHHAHDAYLNAVVGTALIKKYPKLESEFVYGDYKVYDVRKMIAKSEQEIGKATAKYFFYSNIMNFFKTEITLANGEIRKRPLIETNGETGEIVWDKGRDFATVRKVLSMPQVNIVKKTEVQTGGFSKESILPKRNSDKLIARKKDWDPKKYGGFDSPTVAYSVLVVAKVEKGKSKKLKSVKELLGITIMERSSFEKNPIDFLEAKGYKEVKKDLIIKLPKYSLFELENGRKRMLASAGELQKGNELALPSKYVNFLYLASHYEKLKGSPEDNEQKQLFVEQHKHYLDEIIEQISEFSKRVILADANLDKVLSAYNKHRDKPIREQAENIIHLFTLTNLGAPAAFKYFDTTIDRKRYTSTKEVLDATLIHQSITGLYETRIDLSQLGGDGGGSSGGSGGGGGGRDIMKDIKVRLMTDSPDDSQDLMIGAIESNLFADQISWKSDQPVWLNQWPLKQEKLQALQQLVTEQLQLGHLEESNSPWNTPVFVIKKKSGKWRLLQDLRAVNATMHDMGALQPGLPSPVAVPKGWEIIIIDLQDCFFNIKLHPEDCKRFAFSVPSPNFKRPYQRFQWKVLPQGMKNSPTLCQKFVDKAILTVRDKYQDSYIVHYMDDILLAHPSRSIVDEILTSMIQALNKHGLVVSTEKIQKYDNLKYLGTHIQGDSVSYQKLQIRTDKLRTLNDFQKLLGNINWIRPFLKLTTGELKPLFEILNGDSNPISTRKLTPEACKALQLMNERLSTARVKRLDLSQPWSLCILKTEYTPTACLWQDGVVEWIHLPHISPKVITPYDIFCTQLIIKGRHRSKELFSKDPDYIVVPYTKVQFDLLLQEKEDWPISLLGFLGEVHFHLPKDPLLTFTLQTAIIFPHMTSTTPLEKGIVIFTDGSANGRSVTYIQGREPIIKENTQNTAQQAEIVAVITAFEEVSQPFNLYTDSKYVTGLFPEIETATLSPRTKIYTELKHLQRLIHKRQEKFYIGHIRGHTGLPGPLAQGNAYADSLTRILTAGKRTADGSEFEKRTADGSEFESPKKKAKVE

SEQ ID NO: 3206 - protein, 2021 aa, synthetic construct
MPAAKRVKLDGGDKKYSIGLDIGTNSVGWAVITDEYKVPSKKFKVLGNTDRHSIKKNLIGALLFDSGETAEATRLKRTARRRYTRRKNRICYLQEIFSNEMAKVDDSFFHRLEESFLVEEDKKHERHPIFGNIVDEVAYHEKYPTIYHLRKKLVDSTDKADLRLIYLALAHMIKFRGHFLIEGDLNPDNSDVDKLFIQLVQTYNQLFEENPINASGVDAKAILSARLSKSRRLENLIAQLPGEKKNGLFGNLIALSLGLTPNFKSNFDLAEDAKLQLSKDTYDDDLDNLLAQIGDQYADLFLAAKNLSDAILLSDILRVNTEITKAPLSASMIKRYDEHHQDLTLLKALVRQQLPEKYKEIFFDQSKNGYAGYIDGGASQEEFYKFIKPILEKMDGTEELLVKLNREDLLRKQRTFDNGSIPHQIHLGELHAILRRQEDFYPFLKDNREKIEKILTFRIPYYVGPLARGNSRFAWMTRKSEETITPWNFEEVVDKGASAQSFIERMTNFDKNLPNEKVLPKHSLLYEYFTVYNELTKVKYVTEGMRKPAFLSGEQKKAIVDLLFKTNRKVTVKQLKEDYFKKIECFDSVEISGVEDRFNASLGTYHDLLKIIKDKDFLDNEENEDILEDIVLTLTLFEDREMIEERLKTYAHLFDDKVMKQLKRRRYTGWGRLSRKLINGIRDKQSGKTILDFLKSDGFANRNFMQLIHDDSLTFKEDIQKAQVSGQGDSLHEHIANLAGSPAIKKGILQTVKVVDELVKVMGRHKPENIVIEMARENQTTQKGQKNSRERMKRIEEGIKELGSQILKEHPVENTQLQNEKLYLYYLQNGRDMYVDQELDINRLSDYDVDHIVPQSFLKDDSIDNKVLTRSDKARGKSDNVPSEEVVKKMKNYWRQLLNAKLITQRKFDNLTKAERGGLSELDKAGFIKRQLVETRQITKHVAQILDSRMNTKYDENDKLIREVKVITLKSKLVSDFRKDFQFYKVREINNYHHAHDAYLNAVVGTALIKKYPKLESEFVYGDYKVYDVRKMIAKSEQEIGKATAKYFFYSNIMNFFKTEITLANGEIRKRPLIETNGETGEIVWDKGRDFATVRKVLSMPQVNIVKKTEVQTGGFSKESILPKRNSDKLIARKKDWDPKKYGGFDSPTVAYSVLVVAKVEKGKSKKLKSVKELLGITIMERSSFEKNPIDFLEAKGYKEVKKDLIIKLPKYSLFELENGRKRMLASAGELQKGNELALPSKYVNFLYLASHYEKLKGSPEDNEQKQLFVEQHKHYLDEIIEQISEFSKRVILADANLDKVLSAYNKHRDKPIREQAENIIHLFTLTNLGAPAAFKYFDTTIDRKRYTSTKEVLDATLIHQSITGLYETRIDLSQLGGDGGEAAAKGGSGGGRDIMKDIKVRLMTDSPDDSQDLMIGAIESNLFADQISWKSDQPVWLNQWPLKQEKLQALQQLVTEQLQLGHLEESNSPWNTPVFVIKKKSGKWRLLQDLRAVNATMHDMGALQPGLPSPVAVPKGWEIIIIDLQDCFFNIKLHPEDCKRFAFSVPSPNFKRPYQRFQWKVLPQGMKNSPTLCQKFVDKAILTVRDKYQDSYIVHYMDDILLAHPSRSIVDEILTSMIQALNKHGLVVSTEKIQKYDNLKYLGTHIQGDSVSYQKLQIRTDKLRTLNDFQKLLGNINWIRPFLKLTTGELKPLFEILNGDSNPISTRKLTPEACKALQLMNERLSTARVKRLDLSQPWSLCILKTEYTPTACLWQDGVVEWIHLPHISPKVITPYDIFCTQLIIKGRHRSKELFSKDPDYIVVPYTKVQFDLLLQEKEDWPISLLGFLGEVHFHLPKDPLLTFTLQTAIIFPHMTSTTPLEKGIVIFTDGSANGRSVTYIQGREPIIKENTQNTAQQAEIVAVITAFEEVSQPFNLYTDSKYVTGLFPEIETATLSPRTKIYTELKHLQRLIHKRQEKFYIGHIRGHTGLPGPLAQGNAYADSLTRILTAGKRTADGSEFEKRTADGSEFESPKKKAKVE

SEQ ID NO: 3207 - protein, 2024 aa, synthetic construct
MPAAKRVKLDGGDKKYSIGLDIGTNSVGWAVITDEYKVPSKKFKVLGNTDRHSIKKNLIGALLFDSGETAEATRLKRTARRRYTRRKNRICYLQEIFSNEMAKVDDSFFHRLEESFLVEEDKKHERHPIFGNIVDEVAYHEKYPTIYHLRKKLVDSTDKADLRLIYLALAHMIKFRGHFLIEGDLNPDNSDVDKLFIQLVQTYNQLFEENPINASGVDAKAILSARLSKSRRLENLIAQLPGEKKNGLFGNLIALSLGLTPNFKSNFDLAEDAKLQLSKDTYDDDLDNLLAQIGDQYADLFLAAKNLSDAILLSDILRVNTEITKAPLSASMIKRYDEHHQDLTLLKALVRQQLPEKYKEIFFDQSKNGYAGYIDGGASQEEFYKFIKPILEKMDGTEELLVKLNREDLLRKQRTFDNGSIPHQIHLGELHAILRRQEDFYPFLKDNREKIEKILTFRIPYYVGPLARGNSRFAWMTRKSEETITPWNFEEVVDKGASAQSFIERMTNFDKNLPNEKVLPKHSLLYEYFTVYNELTKVKYVTEGMRKPAFLSGEQKKAIVDLLFKTNRKVTVKQLKEDYFKKIECFDSVEISGVEDRFNASLGTYHDLLKIIKDKDFLDNEENEDILEDIVLTLTLFEDREMIEERLKTYAHLFDDKVMKQLKRRRYTGWGRLSRKLINGIRDKQSGKTILDFLKSDGFANRNFMQLIHDDSLTFKEDIQKAQVSGQGDSLHEHIANLAGSPAIKKGILQTVKVVDELVKVMGRHKPENIVIEMARENQTTQKGQKNSRERMKRIEEGIKELGSQILKEHPVENTQLQNEKLYLYYLQNGRDMYVDQELDINRLSDYDVDHIVPQSFLKDDSIDNKVLTRSDKARGKSDNVPSEEVVKKMKNYWRQLLNAKLITQRKFDNLTKAERGGLSELDKAGFIKRQLVETRQITKHVAQILDSRMNTKYDENDKLIREVKVITLKSKLVSDFRKDFQFYKVREINNYHHAHDAYLNAVVGTALIKKYPKLESEFVYGDYKVYDVRKMIAKSEQEIGKATAKYFFYSNIMNFFKTEITLANGEIRKRPLIETNGETGEIVWDKGRDFATVRKVLSMPQVNIVKKTEVQTGGFSKESILPKRNSDKLIARKKDWDPKKYGGFDSPTVAYSVLVVAKVEKGKSKKLKSVKELLGITIMERSSFEKNPIDFLEAKGYKEVKKDLIIKLPKYSLFELENGRKRMLASAGELQKGNELALPSKYVNFLYLASHYEKLKGSPEDNEQKQLFVEQHKHYLDEIIEQISEFSKRVILADANLDKVLSAYNKHRDKPIREQAENIIHLFTLTNLGAPAAFKYFDTTIDRKRYTSTKEVLDATLIHQSITGLYETRIDLSQLGGDGGGSSEAAAKPAPGGGRDIMKDIKVRLMTDSPDDSQDLMIGAIESNLFADQISWKSDQPVWLNQWPLKQEKLQALQQLVTEQLQLGHLEESNSPWNTPVFVIKKKSGKWRLLQDLRAVNATMHDMGALQPGLPSPVAVPKGWEIIIIDLQDCFFNIKLHPEDCKRFAFSVPSPNFKRPYQRFQWKVLPQGMKNSPTLCQKFVDKAILTVRDKYQDSYIVHYMDDILLAHPSRSIVDEILTSMIQALNKHGLVVSTEKIQKYDNLKYLGTHIQGDSVSYQKLQIRTDKLRTLNDFQKLLGNINWIRPFLKLTTGELKPLFEILNGDSNPISTRKLTPEACKALQLMNERLSTARVKRLDLSQPWSLCILKTEYTPTACLWQDGVVEWIHLPHISPKVITPYDIFCTQLIIKGRHRSKELFSKDPDYIVVPYTKVQFDLLLQEKEDWPISLLGFLGEVHFHLPKDPLLTFTLQTAIIFPHMTSTTPLEKGIVIFTDGSANGRSVTYIQGREPIIKENTQNTAQQAEIVAVITAFEEVSQPFNLYTDSKYVTGLFPEIETATLSPRTKIYTELKHLQRLIHKRQEKFYIGHIRGHTGLPGPLAQGNAYADSLTRILTAGKRTADGSEFEKRTADGSEFESPKKKAKVE

SEQ ID NO: 3208 - protein, 2021 aa, synthetic construct
MPAAKRVKLDGGDKKYSIGLDIGTNSVGWAVITDEYKVPSKKFKVLGNTDRHSIKKNLIGALLFDSGETAEATRLKRTARRRYTRRKNRICYLQEIFSNEMAKVDDSFFHRLEESFLVEEDKKHERHPIFGNIVDEVAYHEKYPTIYHLRKKLVDSTDKADLRLIYLALAHMIKFRGHFLIEGDLNPDNSDVDKLFIQLVQTYNQLFEENPINASGVDAKAILSARLSKSRRLENLIAQLPGEKKNGLFGNLIALSLGLTPNFKSNFDLAEDAKLQLSKDTYDDDLDNLLAQIGDQYADLFLAAKNLSDAILLSDILRVNTEITKAPLSASMIKRYDEHHQDLTLLKALVRQQLPEKYKEIFFDQSKNGYAGYIDGGASQEEFYKFIKPILEKMDGTEELLVKLNREDLLRKQRTFDNGSIPHQIHLGELHAILRRQEDFYPFLKDNREKIEKILTFRIPYYVGPLARGNSRFAWMTRKSEETITPWNFEEVVDKGASAQSFIERMTNFDKNLPNEKVLPKHSLLYEYFTVYNELTKVKYVTEGMRKPAFLSGEQKKAIVDLLFKTNRKVTVKQLKEDYFKKIECFDSVEISGVEDRFNASLGTYHDLLKIIKDKDFLDNEENEDILEDIVLTLTLFEDREMIEERLKTYAHLFDDKVMKQLKRRRYTGWGRLSRKLINGIRDKQSGKTILDFLKSDGFANRNFMQLIHDDSLTFKEDIQKAQVSGQGDSLHEHIANLAGSPAIKKGILQTVKVVDELVKVMGRHKPENIVIEMARENQTTQKGQKNSRERMKRIEEGIKELGSQILKEHPVENTQLQNEKLYLYYLQNGRDMYVDQELDINRLSDYDVDHIVPQSFLKDDSIDNKVLTRSDKARGKSDNVPSEEVVKKMKNYWRQLLNAKLITQRKFDNLTKAERGGLSELDKAGFIKRQLVETRQITKHVAQILDSRMNTKYDENDKLIREVKVITLKSKLVSDFRKDFQFYKVREINNYHHAHDAYLNAVVGTALIKKYPKLESEFVYGDYKVYDVRKMIAKSEQEIGKATAKYFFYSNIMNFFKTEITLANGEIRKRPLIETNGETGEIVWDKGRDFATVRKVLSMPQVNIVKKTEVQTGGFSKESILPKRNSDKLIARKKDWDPKKYGGFDSPTVAYSVLVVAKVEKGKSKKLKSVKELLGITIMERSSFEKNPIDFLEAKGYKEVKKDLIIKLPKYSLFELENGRKRMLASAGELQKGNELALPSKYVNFLYLASHYEKLKGSPEDNEQKQLFVEQHKHYLDEIIEQISEFSKRVILADANLDKVLSAYNKHRDKPIREQAENIIHLFTLTNLGAPAAFKYFDTTIDRKRYTSTKEVLDATLIHQSITGLYETRIDLSQLGGDGGGGGEAAAKGGGRDIMKDIKVRLMTDSPDDSQDLMIGAIESNLFADQISWKSDQPVWLNQWPLKQEKLQALQQLVTEQLQLGHLEESNSPWNTPVFVIKKKSGKWRLLQDLRAVNATMHDMGALQPGLPSPVAVPKGWEIIIIDLQDCFFNIKLHPEDCKRFAFSVPSPNFKRPYQRFQWKVLPQGMKNSPTLCQKFVDKAILTVRDKYQDSYIVHYMDDILLAHPSRSIVDEILTSMIQALNKHGLVVSTEKIQKYDNLKYLGTHIQGDSVSYQKLQIRTDKLRTLNDFQKLLGNINWIRPFLKLTTGELKPLFEILNGDSNPISTRKLTPEACKALQLMNERLSTARVKRLDLSQPWSLCILKTEYTPTACLWQDGVVEWIHLPHISPKVITPYDIFCTQLIIKGRHRSKELFSKDPDYIVVPYTKVQFDLLLQEKEDWPISLLGFLGEVHFHLPKDPLLTFTLQTAIIFPHMTSTTPLEKGIVIFTDGSANGRSVTYIQGREPIIKENTQNTAQQAEIVAVITAFEEVSQPFNLYTDSKYVTGLFPEIETATLSPRTKIYTELKHLQRLIHKRQEKFYIGHIRGHTGLPGPLAQGNAYADSLTRILTAGKRTADGSEFEKRTADGSEFESPKKKAKVE

SEQ ID NO: 3209 - protein, 2022 aa, synthetic construct
MPAAKRVKLDGGDKKYSIGLDIGTNSVGWAVITDEYKVPSKKFKVLGNTDRHSIKKNLIGALLFDSGETAEATRLKRTARRRYTRRKNRICYLQEIFSNEMAKVDDSFFHRLEESFLVEEDKKHERHPIFGNIVDEVAYHEKYPTIYHLRKKLVDSTDKADLRLIYLALAHMIKFRGHFLIEGDLNPDNSDVDKLFIQLVQTYNQLFEENPINASGVDAKAILSARLSKSRRLENLIAQLPGEKKNGLFGNLIALSLGLTPNFKSNFDLAEDAKLQLSKDTYDDDLDNLLAQIGDQYADLFLAAKNLSDAILLSDILRVNTEITKAPLSASMIKRYDEHHQDLTLLKALVRQQLPEKYKEIFFDQSKNGYAGYIDGGASQEEFYKFIKPILEKMDGTEELLVKLNREDLLRKQRTFDNGSIPHQIHLGELHAILRRQEDFYPFLKDNREKIEKILTFRIPYYVGPLARGNSRFAWMTRKSEETITPWNFEEVVDKGASAQSFIERMTNFDKNLPNEKVLPKHSLLYEYFTVYNELTKVKYVTEGMRKPAFLSGEQKKAIVDLLFKTNRKVTVKQLKEDYFKKIECFDSVEISGVEDRFNASLGTYHDLLKIIKDKDFLDNEENEDILEDIVLTLTLFEDREMIEERLKTYAHLFDDKVMKQLKRRRYTGWGRLSRKLINGIRDKQSGKTILDFLKSDGFANRNFMQLIHDDSLTFKEDIQKAQVSGQGDSLHEHIANLAGSPAIKKGILQTVKVVDELVKVMGRHKPENIVIEMARENQTTQKGQKNSRERMKRIEEGIKELGSQILKEHPVENTQLQNEKLYLYYLQNGRDMYVDQELDINRLSDYDVDHIVPQSFLKDDSIDNKVLTRSDKARGKSDNVPSEEVVKKMKNYWRQLLNAKLITQRKFDNLTKAERGGLSELDKAGFIKRQLVETRQITKHVAQILDSRMNTKYDENDKLIREVKVITLKSKLVSDFRKDFQFYKVREINNYHHAHDAYLNAVVGTALIKKYPKLESEFVYGDYKVYDVRKMIAKSEQEIGKATAKYFFYSNIMNFFKTEITLANGEIRKRPLIETNGETGEIVWDKGRDFATVRKVLSMPQVNIVKKTEVQTGGFSKESILPKRNSDKLIARKKDWDPKKYGGFDSPTVAYSVLVVAKVEKGKSKKLKSVKELLGITIMERSSFEKNPIDFLEAKGYKEVKKDLIIKLPKYSLFELENGRKRMLASAGELQKGNELALPSKYVNFLYLASHYEKLKGSPEDNEQKQLFVEQHKHYLDEIIEQISEFSKRVILADANLDKVLSAYNKHRDKPIREQAENIIHLFTLTNLGAPAAFKYFDTTIDRKRYTSTKEVLDATLIHQSITGLYETRIDLSQLGGDGGPAPGGSGSSGGGRDIMKDIKVRLMTDSPDDSQDLMIGAIESNLFADQISWKSDQPVWLNQWPLKQEKLQALQQLVTEQLQLGHLEESNSPWNTPVFVIKKKSGKWRLLQDLRAVNATMHDMGALQPGLPSPVAVPKGWEIIIIDLQDCFFNIKLHPEDCKRFAFSVPSPNFKRPYQRFQWKVLPQGMKNSPTLCQKFVDKAILTVRDKYQDSYIVHYMDDILLAHPSRSIVDEILTSMIQALNKHGLVVSTEKIQKYDNLKYLGTHIQGDSVSYQKLQIRTDKLRTLNDFQKLLGNINWIRPFLKLTTGELKPLFEILNGDSNPISTRKLTPEACKALQLMNERLSTARVKRLDLSQPWSLCILKTEYTPTACLWQDGVVEWIHLPHISPKVITPYDIFCTQLIIKGRHRSKELFSKDPDYIVVPYTKVQFDLLLQEKEDWPISLLGFLGEVHFHLPKDPLLTFTLQTAIIFPHMTSTTPLEKGIVIFTDGSANGRSVTYIQGREPIIKENTQNTAQQAEIVAVITAFEEVSQPFNLYTDSKYVTGLFPEIETATLSPRTKIYTELKHLQRLIHKRQEKFYIGHIRGHTGLPGPLAQGNAYADSLTRILTAGKRTADGSEFEKRTADGSEFESPKKKAKVE

SEQ ID NO: 3210 - protein, 2016 aa, synthetic construct
MPAAKRVKLDGGDKKYSIGLDIGTNSVGWAVITDEYKVPSKKFKVLGNTDRHSIKKNLIGALLFDSGETAEATRLKRTARRRYTRRKNRICYLQEIFSNEMAKVDDSFFHRLEESFLVEEDKKHERHPIFGNIVDEVAYHEKYPTIYHLRKKLVDSTDKADLRLIYLALAHMIKFRGHFLIEGDLNPDNSDVDKLFIQLVQTYNQLFEENPINASGVDAKAILSARLSKSRRLENLIAQLPGEKKNGLFGNLIALSLGLTPNFKSNFDLAEDAKLQLSKDTYDDDLDNLLAQIGDQYADLFLAAKNLSDAILLSDILRVNTEITKAPLSASMIKRYDEHHQDLTLLKALVRQQLPEKYKEIFFDQSKNGYAGYIDGGASQEEFYKFIKPILEKMDGTEELLVKLNREDLLRKQRTFDNGSIPHQIHLGELHAILRRQEDFYPFLKDNREKIEKILTFRIPYYVGPLARGNSRFAWMTRKSEETITPWNFEEVVDKGASAQSFIERMTNFDKNLPNEKVLPKHSLLYEYFTVYNELTKVKYVTEGMRKPAFLSGEQKKAIVDLLFKTNRKVTVKQLKEDYFKKIECFDSVEISGVEDRFNASLGTYHDLLKIIKDKDFLDNEENEDILEDIVLTLTLFEDREMIEERLKTYAHLFDDKVMKQLKRRRYTGWGRLSRKLINGIRDKQSGKTILDFLKSDGFANRNFMQLIHDDSLTFKEDIQKAQVSGQGDSLHEHIANLAGSPAIKKGILQTVKVVDELVKVMGRHKPENIVIEMARENQTTQKGQKNSRERMKRIEEGIKELGSQILKEHPVENTQLQNEKLYLYYLQNGRDMYVDQELDINRLSDYDVDHIVPQSFLKDDSIDNKVLTRSDKARGKSDNVPSEEVVKKMKNYWRQLLNAKLITQRKFDNLTKAERGGLSELDKAGFIKRQLVETRQITKHVAQILDSRMNTKYDENDKLIREVKVITLKSKLVSDFRKDFQFYKVREINNYHHAHDAYLNAVVGTALIKKYPKLESEFVYGDYKVYDVRKMIAKSEQEIGKATAKYFFYSNIMNFFKTEITLANGEIRKRPLIETNGETGEIVWDKGRDFATVRKVLSMPQVNIVKKTEVQTGGFSKESILPKRNSDKLIARKKDWDPKKYGGFDSPTVAYSVLVVAKVEKGKSKKLKSVKELLGITIMERSSFEKNPIDFLEAKGYKEVKKDLIIKLPKYSLFELENGRKRMLASAGELQKGNELALPSKYVNFLYLASHYEKLKGSPEDNEQKQLFVEQHKHYLDEIIEQISEFSKRVILADANLDKVLSAYNKHRDKPIREQAENIIHLFTLTNLGAPAAFKYFDTTIDRKRYTSTKEVLDATLIHQSITGLYETRIDLSQLGGDGGGGGGGGRDIMKDIKVRLMTDSPDDSQDLMIGAIESNLFADQISWKSDQPVWLNQWPLKQEKLQALQQLVTEQLQLGHLEESNSPWNTPVFVIKKKSGKWRLLQDLRAVNATMHDMGALQPGLPSPVAVPKGWEIIIIDLQDCFFNIKLHPEDCKRFAFSVPSPNFKRPYQRFQWKVLPQGMKNSPTLCQKFVDKAILTVRDKYQDSYIVHYMDDILLAHPSRSIVDEILTSMIQALNKHGLVVSTEKIQKYDNLKYLGTHIQGDSVSYQKLQIRTDKLRTLNDFQKLLGNINWIRPFLKLTTGELKPLFEILNGDSNPISTRKLTPEACKALQLMNERLSTARVKRLDLSQPWSLCILKTEYTPTACLWQDGVVEWIHLPHISPKVITPYDIFCTQLIIKGRHRSKELFSKDPDYIVVPYTKVQFDLLLQEKEDWPISLLGFLGEVHFHLPKDPLLTFTLQTAIIFPHMTSTTPLEKGIVIFTDGSANGRSVTYIQGREPIIKENTQNTAQQAEIVAVITAFEEVSQPFNLYTDSKYVTGLFPEIETATLSPRTKIYTELKHLQRLIHKRQEKFYIGHIRGHTGLPGPLAQGNAYADSLTRILTAGKRTADGSEFEKRTADGSEFESPKKKAKVE

SEQ ID NO: 3211 - protein, 2019 aa, synthetic construct
MPAAKRVKLDGGDKKYSIGLDIGTNSVGWAVITDEYKVPSKKFKVLGNTDRHSIKKNLIGALLFDSGETAEATRLKRTARRRYTRRKNRICYLQEIFSNEMAKVDDSFFHRLEESFLVEEDKKHERHPIFGNIVDEVAYHEKYPTIYHLRKKLVDSTDKADLRLIYLALAHMIKFRGHFLIEGDLNPDNSDVDKLFIQLVQTYNQLFEENPINASGVDAKAILSARLSKSRRLENLIAQLPGEKKNGLFGNLIALSLGLTPNFKSNFDLAEDAKLQLSKDTYDDDLDNLLAQIGDQYADLFLAAKNLSDAILLSDILRVNTEITKAPLSASMIKRYDEHHQDLTLLKALVRQQLPEKYKEIFFDQSKNGYAGYIDGGASQEEFYKFIKPILEKMDGTEELLVKLNREDLLRKQRTFDNGSIPHQIHLGELHAILRRQEDFYPFLKDNREKIEKILTFRIPYYVGPLARGNSRFAWMTRKSEETITPWNFEEVVDKGASAQSFIERMTNFDKNLPNEKVLPKHSLLYEYFTVYNELTKVKYVTEGMRKPAFLSGEQKKAIVDLLFKTNRKVTVKQLKEDYFKKIECFDSVEISGVEDRFNASLGTYHDLLKIIKDKDFLDNEENEDILEDIVLTLTLFEDREMIEERLKTYAHLFDDKVMKQLKRRRYTGWGRLSRKLINGIRDKQSGKTILDFLKSDGFANRNFMQLIHDDSLTFKEDIQKAQVSGQGDSLHEHIANLAGSPAIKKGILQTVKVVDELVKVMGRHKPENIVIEMARENQTTQKGQKNSRERMKRIEEGIKELGSQILKEHPVENTQLQNEKLYLYYLQNGRDMYVDQELDINRLSDYDVDHIVPQSFLKDDSIDNKVLTRSDKARGKSDNVPSEEVVKKMKNYWRQLLNAKLITQRKFDNLTKAERGGLSELDKAGFIKRQLVETRQITKHVAQILDSRMNTKYDENDKLIREVKVITLKSKLVSDFRKDFQFYKVREINNYHHAHDAYLNAVVGTALIKKYPKLESEFVYGDYKVYDVRKMIAKSEQEIGKATAKYFFYSNIMNFFKTEITLANGEIRKRPLIETNGETGEIVWDKGRDFATVRKVLSMPQVNIVKKTEVQTGGFSKESILPKRNSDKLIARKKDWDPKKYGGFDSPTVAYSVLVVAKVEKGKSKKLKSVKELLGITIMERSSFEKNPIDFLEAKGYKEVKKDLIIKLPKYSLFELENGRKRMLASAGELQKGNELALPSKYVNFLYLASHYEKLKGSPEDNEQKQLFVEQHKHYLDEIIEQISEFSKRVILADANLDKVLSAYNKHRDKPIREQAENIIHLFTLTNLGAPAAFKYFDTTIDRKRYTSTKEVLDATLIHQSITGLYETRIDLSQLGGDGGGSSGGGGGGRDIMKDIKVRLMTDSPDDSQDLMIGAIESNLFADQISWKSDQPVWLNQWPLKQEKLQALQQLVTEQLQLGHLEESNSPWNTPVFVIKKKSGKWRLLQDLRAVNATMHDMGALQPGLPSPVAVPKGWEIIIIDLQDCFFNIKLHPEDCKRFAFSVPSPNFKRPYQRFQWKVLPQGMKNSPTLCQKFVDKAILTVRDKYQDSYIVHYMDDILLAHPSRSIVDEILTSMIQALNKHGLVVSTEKIQKYDNLKYLGTHIQGDSVSYQKLQIRTDKLRTLNDFQKLLGNINWIRPFLKLTTGELKPLFEILNGDSNPISTRKLTPEACKALQLMNERLSTARVKRLDLSQPWSLCILKTEYTPTACLWQDGVVEWIHLPHISPKVITPYDIFCTQLIIKGRHRSKELFSKDPDYIVVPYTKVQFDLLLQEKEDWPISLLGFLGEVHFHLPKDPLLTFTLQTAIIFPHMTSTTPLEKGIVIFTDGSANGRSVTYIQGREPIIKENTQNTAQQAEIVAVITAFEEVSQPFNLYTDSKYVTGLFPEIETATLSPRTKIYTELKHLQRLIHKRQEKFYIGHIRGHTGLPGPLAQGNAYADSLTRILTAGKRTADGSEFEKRTADGSEFESPKKKAKVE

SEQ ID NO: 3212 - protein, 2020 aa, synthetic construct
MPAAKRVKLDGGDKKYSIGLDIGTNSVGWAVITDEYKVPSKKFKVLGNTDRHSIKKNLIGALLFDSGETAEATRLKRTARRRYTRRKNRICYLQEIFSNEMAKVDDSFFHRLEESFLVEEDKKHERHPIFGNIVDEVAYHEKYPTIYHLRKKLVDSTDKADLRLIYLALAHMIKFRGHFLIEGDLNPDNSDVDKLFIQLVQTYNQLFEENPINASGVDAKAILSARLSKSRRLENLIAQLPGEKKNGLFGNLIALSLGLTPNFKSNFDLAEDAKLQLSKDTYDDDLDNLLAQIGDQYADLFLAAKNLSDAILLSDILRVNTEITKAPLSASMIKRYDEHHQDLTLLKALVRQQLPEKYKEIFFDQSKNGYAGYIDGGASQEEFYKFIKPILEKMDGTEELLVKLNREDLLRKQRTFDNGSIPHQIHLGELHAILRRQEDFYPFLKDNREKIEKILTFRIPYYVGPLARGNSRFAWMTRKSEETITPWNFEEVVDKGASAQSFIERMTNFDKNLPNEKVLPKHSLLYEYFTVYNELTKVKYVTEGMRKPAFLSGEQKKAIVDLLFKTNRKVTVKQLKEDYFKKIECFDSVEISGVEDRFNASLGTYHDLLKIIKDKDFLDNEENEDILEDIVLTLTLFEDREMIEERLKTYAHLFDDKVMKQLKRRRYTGWGRLSRKLINGIRDKQSGKTILDFLKSDGFANRNFMQLIHDDSLTFKEDIQKAQVSGQGDSLHEHIANLAGSPAIKKGILQTVKVVDELVKVMGRHKPENIVIEMARENQTTQKGQKNSRERMKRIEEGIKELGSQILKEHPVENTQLQNEKLYLYYLQNGRDMYVDQELDINRLSDYDVDHIVPQSFLKDDSIDNKVLTRSDKARGKSDNVPSEEVVKKMKNYWRQLLNAKLITQRKFDNLTKAERGGLSELDKAGFIKRQLVETRQITKHVAQILDSRMNTKYDENDKLIREVKVITLKSKLVSDFRKDFQFYKVREINNYHHAHDAYLNAVVGTALIKKYPKLESEFVYGDYKVYDVRKMIAKSEQEIGKATAKYFFYSNIMNFFKTEITLANGEIRKRPLIETNGETGEIVWDKGRDFATVRKVLSMPQVNIVKKTEVQTGGFSKESILPKRNSDKLIARKKDWDPKKYGGFDSPTVAYSVLVVAKVEKGKSKKLKSVKELLGITIMERSSFEKNPIDFLEAKGYKEVKKDLIIKLPKYSLFELENGRKRMLASAGELQKGNELALPSKYVNFLYLASHYEKLKGSPEDNEQKQLFVEQHKHYLDEIIEQISEFSKRVILADANLDKVLSAYNKHRDKPIREQAENIIHLFTLTNLGAPAAFKYFDTTIDRKRYTSTKEVLDATLIHQSITGLYETRIDLSQLGGDGGGGGGGGGGGGRDIMKDIKVRLMTDSPDDSQDLMIGAIESNLFADQISWKSDQPVWLNQWPLKQEKLQALQQLVTEQLQLGHLEESNSPWNTPVFVIKKKSGKWRLLQDLRAVNATMHDMGALQPGLPSPVAVPKGWEIIIIDLQDCFFNIKLHPEDCKRFAFSVPSPNFKRPYQRFQWKVLPQGMKNSPTLCQKFVDKAILTVRDKYQDSYIVHYMDDILLAHPSRSIVDEILTSMIQALNKHGLVVSTEKIQKYDNLKYLGTHIQGDSVSYQKLQIRTDKLRTLNDFQKLLGNINWIRPFLKLTTGELKPLFEILNGDSNPISTRKLTPEACKALQLMNERLSTARVKRLDLSQPWSLCILKTEYTPTACLWQDGVVEWIHLPHISPKVITPYDIFCTQLIIKGRHRSKELFSKDPDYIVVPYTKVQFDLLLQEKEDWPISLLGFLGEVHFHLPKDPLLTFTLQTAIIFPHMTSTTPLEKGIVIFTDGSANGRSVTYIQGREPIIKENTQNTAQQAEIVAVITAFEEVSQPFNLYTDSKYVTGLFPEIETATLSPRTKIYTELKHLQRLIHKRQEKFYIGHIRGHTGLPGPLAQGNAYADSLTRILTAGKRTADGSEFEKRTADGSEFESPKKKAKVE

SEQ ID NO: 3213 - protein, 2024 aa, synthetic construct
MPAAKRVKLDGGDKKYSIGLDIGTNSVGWAVITDEYKVPSKKFKVLGNTDRHSIKKNLIGALLFDSGETAEATRLKRTARRRYTRRKNRICYLQEIFSNEMAKVDDSFFHRLEESFLVEEDKKHERHPIFGNIVDEVAYHEKYPTIYHLRKKLVDSTDKADLRLIYLALAHMIKFRGHFLIEGDLNPDNSDVDKLFIQLVQTYNQLFEENPINASGVDAKAILSARLSKSRRLENLIAQLPGEKKNGLFGNLIALSLGLTPNFKSNFDLAEDAKLQLSKDTYDDDLDNLLAQIGDQYADLFLAAKNLSDAILLSDILRVNTEITKAPLSASMIKRYDEHHQDLTLLKALVRQQLPEKYKEIFFDQSKNGYAGYIDGGASQEEFYKFIKPILEKMDGTEELLVKLNREDLLRKQRTFDNGSIPHQIHLGELHAILRRQEDFYPFLKDNREKIEKILTFRIPYYVGPLARGNSRFAWMTRKSEETITPWNFEEVVDKGASAQSFIERMTNFDKNLPNEKVLPKHSLLYEYFTVYNELTKVKYVTEGMRKPAFLSGEQKKAIVDLLFKTNRKVTVKQLKEDYFKKIECFDSVEISGVEDRFNASLGTYHDLLKIIKDKDFLDNEENEDILEDIVLTLTLFEDREMIEERLKTYAHLFDDKVMKQLKRRRYTGWGRLSRKLINGIRDKQSGKTILDFLKSDGFANRNFMQLIHDDSLTFKEDIQKAQVSGQGDSLHEHIANLAGSPAIKKGILQTVKVVDELVKVMGRHKPENIVIEMARENQTTQKGQKNSRERMKRIEEGIKELGSQILKEHPVENTQLQNEKLYLYYLQNGRDMYVDQELDINRLSDYDVDHIVPQSFLKDDSIDNKVLTRSDKARGKSDNVPSEEVVKKMKNYWRQLLNAKLITQRKFDNLTKAERGGLSELDKAGFIKRQLVETRQITKHVAQILDSRMNTKYDENDKLIREVKVITLKSKLVSDFRKDFQFYKVREINNYHHAHDAYLNAVVGTALIKKYPKLESEFVYGDYKVYDVRKMIAKSEQEIGKATAKYFFYSNIMNFFKTEITLANGEIRKRPLIETNGETGEIVWDKGRDFATVRKVLSMPQVNIVKKTEVQTGGFSKESILPKRNSDKLIARKKDWDPKKYGGFDSPTVAYSVLVVAKVEKGKSKKLKSVKELLGITIMERSSFEKNPIDFLEAKGYKEVKKDLIIKLPKYSLFELENGRKRMLASAGELQKGNELALPSKYVNFLYLASHYEKLKGSPEDNEQKQLFVEQHKHYLDEIIEQISEFSKRVILADANLDKVLSAYNKHRDKPIREQAENIIHLFTLTNLGAPAAFKYFDTTIDRKRYTSTKEVLDATLIHQSITGLYETRIDLSQLGGDGGGGGEAAAKPAPGGGRDIMKDIKVRLMTDSPDDSQDLMIGAIESNLFADQISWKSDQPVWLNQWPLKQEKLQALQQLVTEQLQLGHLEESNSPWNTPVFVIKKKSGKWRLLQDLRAVNATMHDMGALQPGLPSPVAVPKGWEIIIIDLQDCFFNIKLHPEDCKRFAFSVPSPNFKRPYQRFQWKVLPQGMKNSPTLCQKFVDKAILTVRDKYQDSYIVHYMDDILLAHPSRSIVDEILTSMIQALNKHGLVVSTEKIQKYDNLKYLGTHIQGDSVSYQKLQIRTDKLRTLNDFQKLLGNINWIRPFLKLTTGELKPLFEILNGDSNPISTRKLTPEACKALQLMNERLSTARVKRLDLSQPWSLCILKTEYTPTACLWQDGVVEWIHLPHISPKVITPYDIFCTQLIIKGRHRSKELFSKDPDYIVVPYTKVQFDLLLQEKEDWPISLLGFLGEVHFHLPKDPLLTFTLQTAIIFPHMTSTTPLEKGIVIFTDGSANGRSVTYIQGREPIIKENTQNTAQQAEIVAVITAFEEVSQPFNLYTDSKYVTGLFPEIETATLSPRTKIYTELKHLQRLIHKRQEKFYIGHIRGHTGLPGPLAQGNAYADSLTRILTAGKRTADGSEFEKRTADGSEFESPKKKAKVE

SEQ ID NO: 3214 - protein, 2024 aa, synthetic construct
MPAAKRVKLDGGDKKYSIGLDIGTNSVGWAVITDEYKVPSKKFKVLGNTDRHSIKKNLIGALLFDSGETAEATRLKRTARRRYTRRKNRICYLQEIFSNEMAKVDDSFFHRLEESFLVEEDKKHERHPIFGNIVDEVAYHEKYPTIYHLRKKLVDSTDKADLRLIYLALAHMIKFRGHFLIEGDLNPDNSDVDKLFIQLVQTYNQLFEENPINASGVDAKAILSARLSKSRRLENLIAQLPGEKKNGLFGNLIALSLGLTPNFKSNFDLAEDAKLQLSKDTYDDDLDNLLAQIGDQYADLFLAAKNLSDAILLSDILRVNTEITKAPLSASMIKRYDEHHQDLTLLKALVRQQLPEKYKEIFFDQSKNGYAGYIDGGASQEEFYKFIKPILEKMDGTEELLVKLNREDLLRKQRTFDNGSIPHQIHLGELHAILRRQEDFYPFLKDNREKIEKILTFRIPYYVGPLARGNSRFAWMTRKSEETITPWNFEEVVDKGASAQSFIERMTNFDKNLPNEKVLPKHSLLYEYFTVYNELTKVKYVTEGMRKPAFLSGEQKKAIVDLLFKTNRKVTVKQLKEDYFKKIECFDSVEISGVEDRFNASLGTYHDLLKIIKDKDFLDNEENEDILEDIVLTLTLFEDREMIEERLKTYAHLFDDKVMKQLKRRRYTGWGRLSRKLINGIRDKQSGKTILDFLKSDGFANRNFMQLIHDDSLTFKEDIQKAQVSGQGDSLHEHIANLAGSPAIKKGILQTVKVVDELVKVMGRHKPENIVIEMARENQTTQKGQKNSRERMKRIEEGIKELGSQILKEHPVENTQLQNEKLYLYYLQNGRDMYVDQELDINRLSDYDVDHIVPQSFLKDDSIDNKVLTRSDKARGKSDNVPSEEVVKKMKNYWRQLLNAKLITQRKFDNLTKAERGGLSELDKAGFIKRQLVETRQITKHVAQILDSRMNTKYDENDKLIREVKVITLKSKLVSDFRKDFQFYKVREINNYHHAHDAYLNAVVGTALIKKYPKLESEFVYGDYKVYDVRKMIAKSEQEIGKATAKYFFYSNIMNFFKTEITLANGEIRKRPLIETNGETGEIVWDKGRDFATVRKVLSMPQVNIVKKTEVQTGGFSKESILPKRNSDKLIARKKDWDPKKYGGFDSPTVAYSVLVVAKVEKGKSKKLKSVKELLGITIMERSSFEKNPIDFLEAKGYKEVKKDLIIKLPKYSLFELENGRKRMLASAGELQKGNELALPSKYVNFLYLASHYEKLKGSPEDNEQKQLFVEQHKHYLDEIIEQISEFSKRVILADANLDKVLSAYNKHRDKPIREQAENIIHLFTLTNLGAPAAFKYFDTTIDRKRYTSTKEVLDATLIHQSITGLYETRIDLSQLGGDGGGGGEAAAKGGSGGGRDIMKDIKVRLMTDSPDDSQDLMIGAIESNLFADQISWKSDQPVWLNQWPLKQEKLQALQQLVTEQLQLGHLEESNSPWNTPVFVIKKKSGKWRLLQDLRAVNATMHDMGALQPGLPSPVAVPKGWEIIIIDLQDCFFNIKLHPEDCKRFAFSVPSPNFKRPYQRFQWKVLPQGMKNSPTLCQKFVDKAILTVRDKYQDSYIVHYMDDILLAHPSRSIVDEILTSMIQALNKHGLVVSTEKIQKYDNLKYLGTHIQGDSVSYQKLQIRTDKLRTLNDFQKLLGNINWIRPFLKLTTGELKPLFEILNGDSNPISTRKLTPEACKALQLMNERLSTARVKRLDLSQPWSLCILKTEYTPTACLWQDGVVEWIHLPHISPKVITPYDIFCTQLIIKGRHRSKELFSKDPDYIVVPYTKVQFDLLLQEKEDWPISLLGFLGEVHFHLPKDPLLTFTLQTAIIFPHMTSTTPLEKGIVIFTDGSANGRSVTYIQGREPIIKENTQNTAQQAEIVAVITAFEEVSQPFNLYTDSKYVTGLFPEIETATLSPRTKIYTELKHLQRLIHKRQEKFYIGHIRGHTGLPGPLAQGNAYADSLTRILTAGKRTADGSEFEKRTADGSEFESPKKKAKVE

SEQ ID NO: 3215 - protein, 2022 aa, synthetic construct
MPAAKRVKLDGGDKKYSIGLDIGTNSVGWAVITDEYKVPSKKFKVLGNTDRHSIKKNLIGALLFDSGETAEATRLKRTARRRYTRRKNRICYLQEIFSNEMAKVDDSFFHRLEESFLVEEDKKHERHPIFGNIVDEVAYHEKYPTIYHLRKKLVDSTDKADLRLIYLALAHMIKFRGHFLIEGDLNPDNSDVDKLFIQLVQTYNQLFEENPINASGVDAKAILSARLSKSRRLENLIAQLPGEKKNGLFGNLIALSLGLTPNFKSNFDLAEDAKLQLSKDTYDDDLDNLLAQIGDQYADLFLAAKNLSDAILLSDILRVNTEITKAPLSASMIKRYDEHHQDLTLLKALVRQQLPEKYKEIFFDQSKNGYAGYIDGGASQEEFYKFIKPILEKMDGTEELLVKLNREDLLRKQRTFDNGSIPHQIHLGELHAILRRQEDFYPFLKDNREKIEKILTFRIPYYVGPLARGNSRFAWMTRKSEETITPWNFEEVVDKGASAQSFIERMTNFDKNLPNEKVLPKHSLLYEYFTVYNELTKVKYVTEGMRKPAFLSGEQKKAIVDLLFKTNRKVTVKQLKEDYFKKIECFDSVEISGVEDRFNASLGTYHDLLKIIKDKDFLDNEENEDILEDIVLTLTLFEDREMIEERLKTYAHLFDDKVMKQLKRRRYTGWGRLSRKLINGIRDKQSGKTILDFLKSDGFANRNFMQLIHDDSLTFKEDIQKAQVSGQGDSLHEHIANLAGSPAIKKGILQTVKVVDELVKVMGRHKPENIVIEMARENQTTQKGQKNSRERMKRIEEGIKELGSQILKEHPVENTQLQNEKLYLYYLQNGRDMYVDQELDINRLSDYDVDHIVPQSFLKDDSIDNKVLTRSDKARGKSDNVPSEEVVKKMKNYWRQLLNAKLITQRKFDNLTKAERGGLSELDKAGFIKRQLVETRQITKHVAQILDSRMNTKYDENDKLIREVKVITLKSKLVSDFRKDFQFYKVREINNYHHAHDAYLNAVVGTALIKKYPKLESEFVYGDYKVYDVRKMIAKSEQEIGKATAKYFFYSNIMNFFKTEITLANGEIRKRPLIETNGETGEIVWDKGRDFATVRKVLSMPQVNIVKKTEVQTGGFSKESILPKRNSDKLIARKKDWDPKKYGGFDSPTVAYSVLVVAKVEKGKSKKLKSVKELLGITIMERSSFEKNPIDFLEAKGYKEVKKDLIIKLPKYSLFELENGRKRMLASAGELQKGNELALPSKYVNFLYLASHYEKLKGSPEDNEQKQLFVEQHKHYLDEIIEQISEFSKRVILADANLDKVLSAYNKHRDKPIREQAENIIHLFTLTNLGAPAAFKYFDTTIDRKRYTSTKEVLDATLIHQSITGLYETRIDLSQLGGDGGPAPGSSGGSGGGRDIMKDIKVRLMTDSPDDSQDLMIGAIESNLFADQISWKSDQPVWLNQWPLKQEKLQALQQLVTEQLQLGHLEESNSPWNTPVFVIKKKSGKWRLLQDLRAVNATMHDMGALQPGLPSPVAVPKGWEIIIIDLQDCFFNIKLHPEDCKRFAFSVPSPNFKRPYQRFQWKVLPQGMKNSPTLCQKFVDKAILTVRDKYQDSYIVHYMDDILLAHPSRSIVDEILTSMIQALNKHGLVVSTEKIQKYDNLKYLGTHIQGDSVSYQKLQIRTDKLRTLNDFQKLLGNINWIRPFLKLTTGELKPLFEILNGDSNPISTRKLTPEACKALQLMNERLSTARVKRLDLSQPWSLCILKTEYTPTACLWQDGVVEWIHLPHISPKVITPYDIFCTQLIIKGRHRSKELFSKDPDYIVVPYTKVQFDLLLQEKEDWPISLLGFLGEVHFHLPKDPLLTFTLQTAIIFPHMTSTTPLEKGIVIFTDGSANGRSVTYIQGREPIIKENTQNTAQQAEIVAVITAFEEVSQPFNLYTDSKYVTGLFPEIETATLSPRTKIYTELKHLQRLIHKRQEKFYIGHIRGHTGLPGPLAQGNAYADSLTRILTAGKRTADGSEFEKRTADGSEFESPKKKAKVE

SEQ ID NO: 3216 - protein, 2043 aa, synthetic construct
MPAAKRVKLDGGDKKYSIGLDIGTNSVGWAVITDEYKVPSKKFKVLGNTDRHSIKKNLIGALLFDSGETAEATRLKRTARRRYTRRKNRICYLQEIFSNEMAKVDDSFFHRLEESFLVEEDKKHERHPIFGNIVDEVAYHEKYPTIYHLRKKLVDSTDKADLRLIYLALAHMIKFRGHFLIEGDLNPDNSDVDKLFIQLVQTYNQLFEENPINASGVDAKAILSARLSKSRRLENLIAQLPGEKKNGLFGNLIALSLGLTPNFKSNFDLAEDAKLQLSKDTYDDDLDNLLAQIGDQYADLFLAAKNLSDAILLSDILRVNTEITKAPLSASMIKRYDEHHQDLTLLKALVRQQLPEKYKEIFFDQSKNGYAGYIDGGASQEEFYKFIKPILEKMDGTEELLVKLNREDLLRKQRTFDNGSIPHQIHLGELHAILRRQEDFYPFLKDNREKIEKILTFRIPYYVGPLARGNSRFAWMTRKSEETITPWNFEEVVDKGASAQSFIERMTNFDKNLPNEKVLPKHSLLYEYFTVYNELTKVKYVTEGMRKPAFLSGEQKKAIVDLLFKTNRKVTVKQLKEDYFKKIECFDSVEISGVEDRFNASLGTYHDLLKIIKDKDFLDNEENEDILEDIVLTLTLFEDREMIEERLKTYAHLFDDKVMKQLKRRRYTGWGRLSRKLINGIRDKQSGKTILDFLKSDGFANRNFMQLIHDDSLTFKEDIQKAQVSGQGDSLHEHIANLAGSPAIKKGILQTVKVVDELVKVMGRHKPENIVIEMARENQTTQKGQKNSRERMKRIEEGIKELGSQILKEHPVENTQLQNEKLYLYYLQNGRDMYVDQELDINRLSDYDVDHIVPQSFLKDDSIDNKVLTRSDKARGKSDNVPSEEVVKKMKNYWRQLLNAKLITQRKFDNLTKAERGGLSELDKAGFIKRQLVETRQITKHVAQILDSRMNTKYDENDKLIREVKVITLKSKLVSDFRKDFQFYKVREINNYHHAHDAYLNAVVGTALIKKYPKLESEFVYGDYKVYDVRKMIAKSEQEIGKATAKYFFYSNIMNFFKTEITLANGEIRKRPLIETNGETGEIVWDKGRDFATVRKVLSMPQVNIVKKTEVQTGGFSKESILPKRNSDKLIARKKDWDPKKYGGFDSPTVAYSVLVVAKVEKGKSKKLKSVKELLGITIMERSSFEKNPIDFLEAKGYKEVKKDLIIKLPKYSLFELENGRKRMLASAGELQKGNELALPSKYVNFLYLASHYEKLKGSPEDNEQKQLFVEQHKHYLDEIIEQISEFSKRVILADANLDKVLSAYNKHRDKPIREQAENIIHLFTLTNLGAPAAFKYFDTTIDRKRYTSTKEVLDATLIHQSITGLYETRIDLSQLGGDGGGGGGSGGGGSGGGGSGGGGSGGGGSGGGGSGGGRDIMKDIKVRLMTDSPDDSQDLMIGAIESNLFADQISWKSDQPVWLNQWPLKQEKLQALQQLVTEQLQLGHLEESNSPWNTPVFVIKKKSGKWRLLQDLRAVNATMHDMGALQPGLPSPVAVPKGWEIIIIDLQDCFFNIKLHPEDCKRFAFSVPSPNFKRPYQRFQWKVLPQGMKNSPTLCQKFVDKAILTVRDKYQDSYIVHYMDDILLAHPSRSIVDEILTSMIQALNKHGLVVSTEKIQKYDNLKYLGTHIQGDSVSYQKLQIRTDKLRTLNDFQKLLGNINWIRPFLKLTTGELKPLFEILNGDSNPISTRKLTPEACKALQLMNERLSTARVKRLDLSQPWSLCILKTEYTPTACLWQDGVVEWIHLPHISPKVITPYDIFCTQLIIKGRHRSKELFSKDPDYIVVPYTKVQFDLLLQEKEDWPISLLGFLGEVHFHLPKDPLLTFTLQTAIIFPHMTSTTPLEKGIVIFTDGSANGRSVTYIQGREPIIKENTQNTAQQAEIVAVITAFEEVSQPFNLYTDSKYVTGLFPEIETATLSPRTKIYTELKHLQRLIHKRQEKFYIGHIRGHTGLPGPLAQGNAYADSLTRILTAGKRTADGSEFEKRTADGSEFESPKKKAKVE
